United States Patent Application Publication US 2020/0109395 A1 - sequence listing, part 16

SEQ ID NO: 60767 - protein, 335 aa, Yersinia aldovae
MSIDHSYLIGRDDVNDLVLNISGLDADSRDVSTLSANIFAHCTSTGSPKFTCQLNIGHLQSLYQHLSQYSVIRDTASVSTGRFIEIQSNHEEIMRVLEHSDNTSLVLALQHIVSNRLTNTDINTILGRKDALDEYERMYENANDYNEIDWQRFFERNEWIFGYGLNYKYLKILQREAHISHTDLNGSNDVITDFLLSDSRFTKIVELKTPTTNLFVNRQNRADSWRLSSELTDAVSQILAQKANWEIESQRSNYTSDGDLIREETHDAECILVIGSISSISGSDREKLIKRKTLELYRRNLKSINILFYDELLERARFIVRSAEIIENAIVEILE

SEQ ID NO: 60768 - protein, 335 aa, Yersinia aldovae
MSIDHSYLIGRDDVNDLVLNISGLDADSRDVSTLSANIFAHCTSTGSPKFTCQLNIGHLQSLYQHLSQYSVIRDIASVSTGRFIEIQSNHEEIMRVLEHSDNTSLVLALQHIVSNRLTNTDINTILGRKDALDEYEQMYENANDYNEIDWQRFFERNEWIFGYGLNYKYLKILQREAHISHTDLNGSNDVITDFLLSDSRFTKIVELKTPTTNLFVNRQNRADSWRLSSELTDAVSQILAQKANWEIESQRSNYTSDGDLIREETHDAECILVIGSISSISGSDREKLIKRKTLELYRRNLKSINILFYDELLERARFIVRSAEIIENAIGEILE

SEQ ID NO: 60769 - protein, 356 aa, Yersinia frederiksenii ATCC 33641
MKILDLVHDFGNNRTSGVGGICRVRCYINKKDIIVLLTDLDALNDGQSVTNAVEKIISSVYEHGVVTQPAIFIEHYERNSHKLDTFDIVNINPKTEWISISREKVLDLLGCDEDELSERSINNGRIYEKADKIRYARDPFIDSSYIPSPEFISRKCEILNSMIPKSSIAQLIESGAKEQEIQRVIKSDLSLIAEAYVGGNEYICFSEYPLADGSVDFVIFTGRSRMDIILIEVKGANFNLVNANNYGSFNHKVRDAAEQIEKRLGLVYRDYESFRKDAHEKRMKVLSGDLIHNAFVGPKSCKQVDPNKDVYVRSIVIGGRTVNDLEESKKRHDYEIHSTPPIRIESWDTWLRRLTR

SEQ ID NO: 60770 - protein, 356 aa, Yersinia frederiksenii ATCC 33641; identical to SEQ ID NO: 60769

SEQ ID NO: 60771 - protein, 385 aa, Yersinia frederiksenii
MDSYMEPDPEKTYISPSLPSFGNKDLKIRIASKAIVSNEGYEFAKIKDEIILRHKLDASTYITAKFFESSKEIFVLSIQKFSTQTGQPYGSGFSFIGDEIGKFIEFLANINSMGFNGNGPMKITDEELREIVLTNNQASQLLNGNEVAISEALKTHVTKKDIISIAYRKKQLDTFNRLLNDEAFFEYAKKEKNCSNEALWQKFFEKNPWIFGYGLSYIYLSSLNDKKIEQVVQGVQIGQHGKRVDGLLKTRGAISNLCFVEIKTNTTGLLANTPYRSGCWAPSSELTGAVAQIQGTVSYAMDSIKRNLNLTDSYGDPTGEELFNFNPKSFLVVGNLSQFSSDNGINHDKLRSFENFRSNLIRPEVITFDELYERARFIVAFSENI

SEQ ID NO: 60772 - protein, 224 aa, Vibrio navarrensis; identical to SEQ ID NO: 60515

SEQ ID NO: 60773 - protein, 362 aa, Vibrio navarrensis
FLLSLEVNLSVGSIGKKQAKSGNVGYSDPVTIHETTRSRIDFVPFYITKSHGVELAGKIITYKKDKTPFGWLPVDEKSVSLQAGSLLKLYEAIKSHVAVKDETEGDFLLIRVNDGTAQLAEHDPQSVANALTAVLSQTEIVKHLENTDLSDELANALKGSIRLKDMKSAVNQLRNHLNNQENDEKIYQKWCEEYPWAFGNAYVVNDDVRAISPHDHLDLMLSNVIGGFRDIIELKRPNMEVLNYDSSHRNFYFSSEVSKAIGQCHRYMDVFNDVASKGLADHPEIVAYHPRATIVIGRSYDWTPEKHKALHGLNSRLTSLSIMTYDHLLNQGERLVNLLEPSQCTESESNSVDNDDWLDFEF

SEQ ID NO: 60774 - protein, 361 aa, Methylobacterium radiotolerans JCM 2831
MEPTKVYVDKRDPSVNPNLLGRKECVLKDGRADRSKVRRIARLTSVRDQHTGEHHHDALTIKTIALSKTACEVDPTRSVQLGGDETRRLADFLAASGSGSVPSDTGGYIVMPTKGSPADVIRALQDLTATDRMDALAMLLREASEKPAILGDLVSRLAADERFIEKAAAAMNLAVYRQVLFRLETMIDDPTVKEGQFQALLEEQPWLFGSEYSCILDRRRWTRDEITDFVPRRTTDGRVELIEIKTPLHGKSLFNWDASHKVWAPGVELSRVVAQAENYLEKLDRNRDGILANDREDVTKMRARIIIGRDRDDDQRDALRRHNGHLHRIEIITFDGLLAIAKRVLRYFEDAPAEQCVVLGT

SEQ ID NO: 60775 - protein, 466 aa, Pseudomonas viridiflava ICMP 13104
MMHSQPSRLRERRVKDGSDESSQTKKQQRGRAKSLPEPSIRKGVVNRAFYVELSVPSSTAGEHPTNSSSGADSHVLARIFADRIETWPTVINRVFFFLFSEYTQHRAPYPLIVYRLPKPFAGPLPSDLSSAVSHIERVFDSGIFNCCAKGLGFEASFNSVLSALQIDKSVDTIEIHFEGDLFRRGNVVCVSEATLNDLRTAFNTGDAFWNRQKEGSRRSYIYEEIVEKLAPVLKHSGDRGGHYLSGFSEAERDYLATLRAYIRDLPLGMPEDFKAMRESMDRGELYRMIHHYQIMLAQNLSATEWQSFLNHNIDLVVKCLQHPDCGVLDPPLGAQPKSVVGSPIIYGHEALVLTVRSPHATLMIRDSLGRVGDSDLEGSGEPPGRLIPHPELASAIEEGRKLRPDIPGQIQKPRCVVVAGLMPANVDEAAAYIGYREAARQYNGIHLVDFGTLLNGLRLLASAIET

SEQ ID NO: 60776 - protein, 463 aa, Brevibacterium casei S18
MARFGNDQTKIGRLDVRTTNEDGRVEAFFVPTELPYEESSAHRRLADGVKLVEFEAGAGTLKIHPINTLSNHSDYLGPKYDQVQTLSLETSLLDEYYEGSDLESIFETLPPGFVKDFAYGLGLLKDCNRLIRLIEANTPCTEIIFTDGNSAAIDGTEFHLGLSRFAAIWAEIGRINDRGNRAAGRVKDVFVHNNLAAALGLASADFSLGRHPDSRVIAKAANGIEELSGVERDTLVEAVVSESAAIAAESPQKFQKLKRDIDLVSLDRLIEAYAEALEQGKAEPYWQAFFDDNAFALQQVFGAPMVSVRSGATVGGRGLSGSGDKIADYLFKNSLTNNVALVEIKKPTTQLLEAREYRQGVFGPSKELNGAVSQVLDQAYNLTKNLTGLKESSRQWDLESYAISCFVVAGRTPSASDPVRQKSFELYRANSRSVTIVTYDEILERLRLLRDFLTPASPEAEEV

SEQ ID NO: 60777 - protein, 273 aa, Lysinibacillus macroides
MDGVCDVKIYSRDFTVLTKEELKEWEILKDKEVVHRSGNFVVRRSKYREYPAAVRHYESLFPNNHLDIVDLQKIEQLTKLTEKFHQMIDNPNSNERSILNWIRENRAYFIIASIMKGPYNFGHHDAFIFPEFQLGNTYQVDYLIVGRNSGGYEFIFVELEHPNKNITLADGHLGDAIRKGERQVIDWKYWLEANYATLYETFNKYKDPKKLLPVEFMKYDSTRIHYAVIAGRRNDFNEKTYQLKRQKLTEGILLLHYDNLYDSAMALIGESTY

SEQ ID NO: 60778 - protein, 264 aa, Pelodictyon phaeoclathratiforme BU-1
MKISDEELRRVVLSNVQAQALFQDNQELFAEVIRSAVTKEDVVAVGYRKRQLQVFQQLLENDEYFKTVKTQKQCNSEAVWQKFFEKNPWIFGYGLSYIQLSTLDDRKLEQVVHGHTVSEHGKRVDALLKTRGVISSLCFVEIKTHKTELLKSRPYRVGCWSPSDELSGAIAQVQGTVVLATETIKSKLALTDDVGNPTGEEAFNYMPKSFLVVGSLHEFVGDHGVNQERYRSFELFRRNTNSPEIVTFDELYERARFIVHQNET

SEQ ID NO: 60779 - protein, 152 aa, Streptomyces ghanaensis ATCC 14672
MDCRALHEAMDNATEERPMQVVLENHPALLANVIAGHHGIWVRPQVRLGDRYVSDFLIASRTSAGLRWHLVELESPTERLTNPGNQRESPTLRHAIDQIPGLARVAEGQPPARPGYAPGHHRGCTRAHHHGPGGRDGQRPRNPGSPFRERPD

SEQ ID NO: 60780 - protein, 316 aa, Mycobacterium abscessus
MVKNLVFSDGQQRTHAELVNSLEKVVDQARPLAEKYEGFNEYVVDPEGNPDFLNKLTKGLDSSPAKWAASIVVLGSGLFEDANLDDKLRQVLIWQIAKFRSMLVFTEHIEDLAWRGYFNYGVDVIDKALTAWDTSEKKEPERYWQRFLKEQPYLINLIFPGPVAIRKGEAYLGGKKIDNTGGRLVDFLVEHSIGGNAALLELKRPVTPLVTKRPYRGSDIYAASSDLAGAVSQILHYRDSIMSGNKNMVDTGEGGSLHVFVPTCVVLIGNYASELDSEDRRRSFELYRASLNGVSIVTYDELFDRLRKILDVLRGN

SEQ ID NO: 60781 - protein, 467 aa, Mycobacterium abscessus
MRAEWEHDDGAGRVVAHHEDEVLVLTWWPANHTSKSKGGIEMVRFDPTAEMLRIFPKTFFLGNEGQQFQQVSEVQIDTGVWAWEPYDPVSENVYRGEAELVGLPDGFGKIFQYGLGFPRQYRGIIYAIEDHTECDVVRFGASDCEGSNGNVFCLGLDRFAEYKHTVDLTIRRARVVATRIIETESFNSIAGTLGKARVAPTLGRHPTIQAITRALTDDVPLDTDDRAALVGRMSAESRTVAREDPPAFGRLRQDIDLVTLEVLIEQFRGGLEGKAAGSESWWQKFFKTNTFALQQLFAAPVALYKDQAHVRVTNAGGGGGRIADFVLVNTVARSVVAVEIKTPGTKLIGPIYRGTGGGEVYLPHKELSGAVAQIQAQLESVITDFPEIVKHSPDLESVDTTNVRGAVIIGKLDSLAEEEQRESFARYRTRLLGVDVLTFDEIYHRLCGLHAMLSNEQSGVQDASHNS

SEQ ID NO: 60782 - protein, 316 aa, Mycobacterium abscessus; identical to SEQ ID NO: 60780

SEQ ID NO: 60783 - protein, 467 aa, Mycobacterium abscessus; identical to SEQ ID NO: 60781

SEQ ID NO: 60784 - protein, 407 aa, Mycobacterium abscessus
MPTFEFDVPAEPNEVTYAEGRLTTRTYATRSFLAQFGRDAGHPSRYIYRVFDEVQQADDEHCEWTREVVYETPGGRKQLQLQIAREQGAVRKLRVQKVPTSGDATRLETVLELDRDQATRLIDMLRAIEMVPVEGDSSVYVDDQLLRDLFDDPTAFHNLYSRDPERFRALIETDAEADDVIALQRRKHVAETMRRWLSDDAAFDAAAEAAGGPERAWQSLLEENPWVLGIGLGGQLLTSWDNDRLEQTVVGRSVSGVGKRVDALLRTAGVIRSLAFAEIKHHRTPLLEGEYRSGCWSPAKELAGAVVQVHQSVHLACRDIGEYLRDTSADGELLPTGTFLLRPRSFVIAGTLEQLTGAAGGPVPDQFRSFELFRRNLHDPEIITFDELVARAEWHVEVAVRSAGDVT

SEQ ID NO: 60785 - protein, 407 aa, Mycobacterium abscessus; identical to SEQ ID NO: 60784

SEQ ID NO: 60786 - protein, 316 aa, Mycobacterium abscessus; identical to SEQ ID NO: 60780

SEQ ID NO: 60787 - protein, 316 aa, Mycobacterium abscessus; identical to SEQ ID NO: 60780

SEQ ID NO: 60788 - protein, 268 aa, Clostridium homopropionicum DSM 5847
MRIYDRDYTKLTEDEINEWEMLKKKEVVKTTGKFNIRKSMFRKYPKAVRHYLSIFPNNYLDIEDLKNEDMLKTSISNFYDFLSNENIIESDIAKFIKNNKAYFIIGSILKSNYNFGHHDAFIIPEFMLGNSYKVDYLLIGKNSGGYEFVFVELENPYGKITLKDGNLGDTFRKGIKQVFDWDEWLESNYVSLRETFQKYKNPNEQLPNEFFSLDKTRIHYAVVAGRRDAFNLKTYKEKRRYLDKHKILLLHYDNLCDSAKSTIGKPTY

SEQ ID NO: 60789 - protein, 370 aa, Nocardia nova SH22a
MARIKDLRPNTQNIRPHKLENGVSCEHQVIPDSDGQPLLHLSTFGSANRQLDPKSSQSLQVDSQIATELVGIIRSAFGDESLNIQPRVDIAFSPEIAIAPTLLAQAYQKNPDAFRQLVSDDDARGDIVAMAHRRKQVARFRRLLEDDGYFESEKMRLRKGGPEAVWQDFFEHNPWIFGVALAGQFLTSWDHQKLEQVVSGDSVSSTGKRVDALLRTSGRIKSMVFAEIKTHKKPLLKPTKDAYRPGCWAPSDELSGGVVQVQGTVHRAVSEMAERLQDTASDGSDIPGEFTYLLRPRAYLIIGRLDSLRGEQGGDHQDKFRSFELFRRALIEPEILTFDEVLARAEWAVESLLPDGDAGTDADDPAQNRT

SEQ ID NO: 60790 - protein, 422 aa, Nocardia seriolae
MVHPLFDELRSKAMANPIFDELLMSSTDKEFDVEGGDFSQLEIRQSQEHSSFHYFYDKQARRLVVDFVLNDGARVATICSVTLVRVDDQYTPRLKFWKKDKTKPGKAALELPLPDLPEYRMIKALVDTDSGHRNFWKLVNYLQACTEISLPSDQFHLVAENSTRLVEMLEGSDKDMLVAAMAKLIGGTVTQADLDLIAGRKGQLDYFQDLLMEKSFFEEERRRRSKKPTPLKPESLWQAFFEENQWVFGYGLNLVACESYDPAKLELPTTGANAFDGAGKRVDALLRTRGQLSSLMFCEIKRHDTPLLDPKPYRIPDVYRPSEELSGAVCQVQKTADKAIRAIRDHLYAAYNRDGAPAGFDVATIRPRQVVVAGMASQFEEDNGLNREKVSSFELYRRSVSDVEVITFDELLARARFIVADD

SEQ ID NO: 60791 - protein, 422 aa, Nocardia seriolae; identical to SEQ ID NO: 60790

SEQ ID NO: 60792 - protein, 212 aa, Eubacterium rectale M104/1
MEELQIAKLPSNFKVYEIDDYHAINCDKEAKNFLDIINEAKKENDVQRYIKSNQKWFIPLSILKAYDFGHHFSCVVPEFQLGSQYRLDYLLVGKNSLGYQFVFVEFEDVNVDFRIKTANAETEKVRKGLNQIRDWKRWIDQNRAYFFASEGIKEFANNVPSWGFRYCLVVSRRDRMDEISNQLRGEMQSETRVTIMTYDRLVEYVERLHNGI

SEQ ID NO: 60793 - protein, 384 aa, Thiomicrospira crunogena XCL-2
MDDYQNPKEGKTYISPRLKAFGDSDRKVRIASKVIESPDSYAFGKIKDEVVLRHKEDAKSHITAKFLEDNRGIFVLSIQGYSVATEKPHNASFSFVGEEIGKLLEFIRNIQSVNLDSPSRVNISDEELNRIVLSDKQAKSLLHENQELFAEVLRSEVTTEDLIAVGYRKKQLEVYEKLLTNQSYFNSIKDKKKCTNESLWQKYYEKNPWIFGYGLGYIFLSGLDDKKLEQVVQGHSLDSHGKRVDALMKTKGIISNICFVEIKTHLTDLLDSKPYRSGCWAPSKELVGAISQVQGTVASAIENLSIKINPTDKDGNLTGEEIYNYQPKSYLVIGSMAEFVSENGVNKDKLRSFELLRKNTTNPEIITFDELYERAKFIVYHNQS

SEQ ID NO: 60794 - protein, 212 aa, Acinetobacter johnsonii SH046
MDFDLEKVREQLVKARSNSSERELLQLLKENSFLFSELFSRHFGIQPVFSEVSFGNNFRCDFCWLNDNSDGPEWVLVEIEKPCARLFNQNNEPSAELNHGIEQVKSWQRYFEFHPAEKRRIFGAVSKFRYILVIGEKSDWDEKEASLWRAFENQNSIEIRSMNIFDRAIENYEKFPDHYWSFKENPLVLNARKLQTYWEEYPYIMTWRKILP

SEQ ID NO: 60795 - protein, 384 aa, Acinetobacter junii SH205
MDDYQNPKEGKTYISPRLDAFGDSDRKVRIASKVIESPDSYAFAKIQDEVVLRHKEGAKSYITAKFLEDNRGIFVLSIQGYTIATEKPRNASFSFVGDEIGKLLEFIRNIQSVNLDNPSRVNISDEELNRIVLNDKQAKSLFHENQELFAEVLKSEITTEDLIAVGYRKKQLDVYEKLLSDQSYFESIKSKKNTTNEGLWQKYFEKNPWVFGYGLGYIFLSALDDKKLEQVVQGHSVDSHGKRVDALMKTKGVISNLCFVEIKTHVTELLESKPYRSGCWAPSKELAGAIAQVQGTVSSAVESLSSKINPSDSQGNPTGEEIFNYQPKSYLVIGSMSEFVTENGVNKDKIRSFELLRKNTTNPEIITFDELYERARFIVHHNQS

SEQ ID NO: 60796 - protein, 355 aa, Stenotrophomonas maltophilia RA8
MEKPGQVQKVVRKTASSGKVDYAPPVVLNETSKSKLHALAWFIPHSDGRTTFSLKLEGFVKAKDQPWIEDKAKTLTLSETSSLQLLKYLQTHLPLAAQSETGEFILIRVANGEANLTGHDPQELVGALTKVLSQSELLGHLSSTELTHELSTALRGSIRLSEMRSAVAELRSNLGSGEAGEQTYQAWCEKHCWAFGNAYVVRDEVRAISTGDNLDLLLPNVIAGYRDIVELKRPDKEVLLYDAAHKNYYFSADVSRAIGQCHRYLDILHQAAKDGLLDHKEVVAYHPRATIVIGRSHGWTDEQQRALHGLNRRLHGISVMTYDHLLAQGERLIEMMSPAEGADAESAVEEDDIPW

SEQ ID NO: 60797 - protein, 357 aa, Stenotrophomonas maltophilia
MNDAVDLAKVVRKTASSGKLDYVPVVVLNETTRTKLHVVGWLIPHSDHTEFSVKLEGFKKTKASPWQEDPVKTITLTEASTLKLFKYLQTHLPLAQQSEAGEFILIRVANGAVDLTGHDPQSLVGALTKVLSHSDLVQHLASTELTHELTAALRGSIRLSEMRSAVAELRSSLGRGEAAEQVYQSWCEKHCWAFGNAYVIRDEVRAITTGDNIDLMLPNVIAGYRDIVELKRPDMEVLLYDRAHKNYYFPAEVSKAIGQCHRYLDMLHESADKGLLDHKEVVAYHPRATIVIGRSHDWTDAQQRALHGLNRRMHGITVMTYDHLLAQGDRLIDMIVPAAATCTESATAPESDDDIPW

SEQ ID NO: 60798 - protein, 391 aa, Stenotrophomonas maltophilia
MSDEDYVANKRSDRVYVSRPFKIGVSKDTDARYVTRVFDDGQRSCFDSVDGEIVIRATHDDKVQIKAVVTSDQEGLRHLTLQSFRVYKDGIRPNEQYGINLRGQEITEFVEFARLVSNVQLDNTRKLRLDGASLAHVAVDMDSAARAWIAKHPDALRELVANEATSRDVVAVAYRRRQLAEFERLLHEDAHFDRVTAERFNGRKEATWQAFFERNRWIFGYGLFHLSADGFSDEKLEQVVAGSTVATPGKRIDGLLRTRGRISAACLVEIKHHRTPLLAKASYRAGTWQPSQELTGAVSQILMSVDGMERQFQRLLVMNDDEGNPTGEEAVVARPRSVIVCGSLSEFVKEFGVNEDQFRSFELYRRHLFSPDILTFDELYERARLIVESTE

SEQ ID NO: 60799 - protein, 391 aa, Stenotrophomonas maltophilia
MSDEDYVANKRSDRVYVSRPFKIGQSKDTDARYVTRVFDDGQRSCFDSVDDEIVIRATHDDKVQIKAVVTSDEQGLRHLTLQSFRIYKNGTRPNEQYGINLRGQEISEFVEFAKLASNMQLDNTGKLRLDRASLAHVDVDMDSAARAWIAKHPDTLRELVASEATSRDVVAVAYRRKQLAKFELLLHDDSYFDQVTAEHFKGRKEATWQGFFERNRWIFGYGLFHLSADGFSDEKLEQMVAGATIATPGKRIDGLLRTRGRVSAACLVEIKHHRTPLLAKGNYRAGVWQPSQELTGAVSQILMSVDGMERQFQRLLVMRDKDGNPTGEEVAVARPRSVVVCGALSEFVKDFGVNEDQFRSFELYRRHLFSPDIVTFDELYERAKLIVESSD

SEQ ID NO: 60800 - protein, 357 aa, Stenotrophomonas maltophilia
MSESAEVSKVVRKTAQSGKLDYVPVVVLNENTRTKLHVVGWLIPHTNHTEFSIKLEGFKKTKASPWEEDPIKTITLTETSTLKLFKYLQTHLPLAQQSEAGEFILIRAANGTVDLTGHDPQSLVGALTKVLSQAELVKHLASTELTHELTEALRGSIRLNEMRSAVAELRSTLGRGESAEQVYQSWCERHCWAFGNAYVVRDEVRAITTGDNIDLMLPSVIAGYRDIVELKRPDMDVLLYDRAHKNYYFSADVSKAIGQCHRYLDMLHDFADKGLVDHKEVVAYQPRATIVIGRSHDWTDEQQRALHGLNRRMHGITVITYDHLLAQGERLIEMMVPTAGLEAAAVEAVEPDDDIPW

SEQ ID NO: 60801 - protein, 459 aa, Marinovum algicola DG 898
MGKVHNRRVPADANAADILRYIPNYIEAYRQEYQRLIILPPNGPGLPQAPLSPYLQCRRFEILLAKDGVVIFVADHPPKHDWWIAGGPALKVDYEPSRTPKWVTAKLSENGLLGKPIGIYRIVSKQALPERIWSGDLPAPIKQTTLKDGSQIHIMQLECDIDEAVAQLTFGAFGRVLDVHLERNRTNFWKPHIISGMGFFNAGLTGKRFCNYIEVLPHIDRAAWDTRTITLRAAADVRRDFARFTGKKDGGATFSFGEYGQWVESYQRSLHKLWESIIQFEALLATASDAVEEVFHQFLVRNPMLLDPIGDVVSKPRLAYPNGKTSPDGKTYVEPDFIVASPSGSYRLIEIERASKNLATKAGHARQDLAQAAFQIAEWKQFIAQNYHVLEDRFPNISENSPSAIILSRASQNGFESEASLHRKVDQLKRQFNVDEILTYDDVLKNARSLYDKLSNLGL

SEQ ID NO: 60802 - protein, 493 aa, Pseudomonas alcaligenes NBRC 14159
MPSRRPSQMTLQSRTDGGPFIDFLLYDDEGAPSDDAQEVKSCDVYFSDITPELESPDALETWHRILSITPEEICIFPIHQRVGKTDYGTPKHGPIEQIILARPKAHPYSVPINRDELEGLLSSLPSGFAKDWQIGLGLLWEYRFVIESIADIGGINTIVIHGEDGSDDAKIVGSVYYLGIDRYLELKRSIDRLSQRHQRETRADKQLVCYTGLAHAADPIRNPERPKKLPANVLTGLIKLGRGRSKLSRADQKSAVHLVKDNAEVIVKQAPQMLLELKADIERVTLGELIERYIKLMSAGAPEGKWQKFLAENPFILDMAFPYPVKVVCERPYVGSKRLSGRGGNFSDFLVAAKSTGNVAIIEIKHPQHDLLKVPEYRNNTYGPSFELSGSVAQIINQRASLQRQIHDLKEELEDEVHAHAIPAIIIIGRTPTDKHQRRSFEQYRNALKDVSVVTFDELQQRLEDIHKVLAPSTSASSNQDPSASAEYDNVPF

SEQ ID NO: 60803 - protein, 486 aa, Pseudomonas alcaligenes NBRC 14159
MASVPHTEFRNQSRTDGGPFLALESLDETGAPTIGDEVPVSVEVYYSDLPVPEGTPVGADPWIRIMSVDEDGLTIWPVHQRAGTEEYGKPIFYSIKQLIIPRPYVDFDELPETQEALEDMLEGLPTDFYRDWRHGLGVKWEFRSILSTVENMPEIDTVYFWDGSGDVDKEYTTHSFYILRMSTFQSLRKRLAAIGSRHQRAARREKRVACNNTLLHGADPLNFPKERVVLPEGALAEMATAGTRVKLSKGDQRAVVQMVQDHAETLAKEEPAELLRLKENIELVSLARLIERCSELLQPSTTETKWQKLLSENPFILSLAFHYPVICIGDVPYVGGKSHTGSGGSHSDFLMAAVATSNLALVEIKGPGTPIVGKPYRGIYPPSTDLSGAVAQVLSQRGELQLNFMSSVGRPLDRQGFRPHSTACVVIAGLRPTDEEQMQGFEQYRHTLQGVHVVTFDELVEKLKALHTLLAGDQATPTAASGAAAT

SEQ ID NO: 60804 - protein, 412 aa, Paenibacillus durus ATCC 35681
MSEISQNIEKYLKQLVDAIIEKMSTGYWDKMREILRKEPYLKKTFPHLLLNPEKLVIYIGKKHWAIEYIGATYQENFDVDNDELSIRLFDYSRTSEDFFEAILGFNFDGSSIRIPLPEGTNQDLYIPTNSADDILYENGWNYAAQSMMLSYNIAGIDLTEKEHYRLINCFFYGTNSHGLITRHIKWMEIFPYEVVPHDIGMSKSKISFFRDFKNQALRDVESEFPIPPDLQYDRLVRLNRFVELFSAAYLSELEITSFLAEPENQFILKMAFFAKEVHSELECHWAESKNKAIRPDFFITNPNGYSDIVEFKMPYLKNSTVVGTENRETFSAEINSYISQTRVYAKYFDDPRNREHVFNKYGIKVLYPKRWLVVGRRWMFDNDNWREIENEFRDFAIRTYDDLIDGVVSQLY

SEQ ID NO: 60805 - protein, 353 aa, Tsukamurella pulmonis
MTIEGYRAGLHAWIRDTSSEQFCLARDGMELKEKGTTFKAVGIAKYGRDADDPSNIVLEFKESKRLPENQGYDFDNPDSKFTLKNEEIDALRLFLSERFGEFDADAYYVRVGSPQMADLLKTKMSTIGGEQLAGLLSAVDSQEDLAAAVEAAGHGDFLASYVMYRKNSAALDELEAAIADPTSTESVFQKILERNPWLFGGQYVDVHDRRELAVGDQHDIPLLALDGSLHLVELKRAAIERLVKPHRNHLMMGNDVHEAVSQTQNYLRTLDEEAHTIKSKFGVEAHRVFSTVVIGSAQHNKATVSPDDLARTMRVYNSHLTRIQVITYDQLLANARSAIERHREASTPTPAVE

SEQ ID NO: 60806 - protein, 511 aa, Lactobacillus rhamnosus
MKKSDFFQIENFLCFRQDVSTSRAGLVKDSYAGRLRAVISANIDWSNINLSDLSDQRTLKTAIFGVAEPEIAFARQKGLFEYDEILKLWFRMNIDQKKKLASYNDVDVDMTPEEFISKLPERSFLESLDFDDDWFFPVAYKIEDASKDEYWRFDTIPLMAEGDACGFLFVSTRELTTHVLTNIFERKNAYSRMTTVWQDLYKILRRSADISGIFIGGKHQPTLSVDSLSILRNRLVGQSEVAHYIEVQNGRSLEELGQPVDIDTTRAQSLMAKQQSARSSTIHIATEQNITAISQVNQRLKVFHSELEQRLSEGNSARDKWDEKSFQSLLFKIFPFIFPQYTHFIREYRFKINGNLLKKEEIPDFIALSASLSVDVIEIKTPYFPLFRRSLYRKNWVFGSEVQGLISQSQKYIYNLTRNSAREEPNLQRRFIKDGGLILSDDSSGVHIRSPKAIIIVGRCPSYMIDDPGVAHQREQDFDIYKRRYEDILSFLTFDDVLDLTRRMISRQTKI

SEQ ID NO: 60807 - protein, 511 aa, Lactobacillus rhamnosus; identical to SEQ ID NO: 60806

SEQ ID NO: 60808 - protein, 354 aa, Spiroplasma kunkelii CR2-3x
MENNEKNSNEIWKNEIEVGQTLTQKEQDGKIKAIYQYLSKTNKGDYLQAKLTKHIDFPDKIRLKLGRYSKNNPNDFKTWKRNGNNFDDKYECGVQLKSEELKNLINFLKESKNNTFLFHPEERTIYKKINSEDIEILKLIKQKPTILKELDINNLEYAKNEYDIRSLKIEEFENMIANEKLTEDDWQTFLNENIHILQICIPSFFKYIGEKVYAGGKTINGKDGVYPDYAFTDSLNSIAFIEIKKPQTNLMKENTYRNNAFAPSEELSGGISQVLSQRHIYYSKESDKTENNPFYNSPCYLIIGNLSKLNKKQNQSFSLFRNSFMNINIVAFDEILERLKIFIETIKKTTLNTI

SEQ ID NO: 60809 - protein, 473 aa, Pseudomonas amygdali pv. tabaci str. 6605
MEGPKQTSQDVWNGEDVLEPSFITIRRPLESGFCVDLYLQVFEKVSMDKWRSLPEDRWHHLATIEPGWITMYPIYTNPHTQRYRSPKNGNVGCILYSHQSTRDFPDTPDDAVLYIDVSLPRKLFDSCDEGLGLVKQLTPLWRGLRFAPGLKTLVISDDSDTSITDDIVFVSEARVDECRRTCMRITRARKKSETSAQLHWVMSQVFPTLMPNVVFEGSRPVLVSDTNARKVGNTIAQAAVRARRHQLREMKVGVEMLAKEAPRELFELRAEIERVTLAVMIEKFETMLGQNLSEGHWQQFFEANLFILGMVFARPVALLHTQFHARGSMVNGAGAHIGDLLFAQGCELAIVEIKKPSTPLMQSRAYRNRDVFGPHLQLSGAITQVLHQQGLMRSNWLSHLQDPTMRDLQPDTARCVVIAGTKPTEEGRRRSFEIFRNACKDVEVVTFDELLGKLRMLAQHLAPVDPVDIPDIF

SEQ ID NO: 60810 - protein, 543 aa, Pseudomonas amygdali pv. eriobotryae
MDVKDPNSETLPNVNKEKGISNEEREGRSLLNKLRQEMMLEITFGEKRVGTSKEISEWILKKYQESAYSGDICQAVLYLKEDYVSPSNELPTIKAAFEQLYALEHYPIPEFFFVSTDYESEHVGFLFQREALEGGGRVYSVTGFNLCGGYEKVSRSEFRIKETDPEPFVSLMQNDGWAHTSKKTLSANNYIELIFKCLAAYSNYRHPRIDNKAVVDTRSIKPKDNEYLVQLICKAIQGKVTCTRISVPINRIKPRDIDYALNIPEADIQDFMRRIAEWGAPLAEILLYEKDGQLIMDDDYLTYCAYRALKIDSVKAVVIGNFDESDIKILKRGRGELIPPVIVDRAPKKLPQDSLSKDHMLDKRLSSLMPTPNSRAQMKRKFTNFCRLLGRDSTLEKDLQNFIKHNPEIFDSHFGRMHMEVPIGNFRADMVLQYEQSHRRVLLVELERHVDQIFTKDNRLRSKVNHASQQVEDWIGEIRSGKNNIPDWLKREYVVEGAVVIGRSKNLTVSQKDTLRVINTNRIVKIMTYDDLLEQMMRLISIL

SEQ ID NO: 60811 - protein, 473 aa, Pseudomonas amygdali pv. lachrymans
MEGPKQTSQDVWNGEDVLEPSFITIRRPLESGFCVDLYLQVFEKVSMDKWRSLPEDRWHHLATIEPGWITMYPIYTNPHTQRYRSPKNGNVGCILYSHQSTRDFPDTPDDAVLYIDVSLPRKLFDSCDEGLGLVKQLTPLWRGLRFAPGLKTLVISDDSDTSITDDIVFVSEARVDECRRTCMRITRARKKSETSAQLHWVMSQVFPTLMPNVVFEGSRPVLVSDTNARKVGNTIAQAAVRARRHQLREMKVGVEMLAKEAPRELSELRAEIERVTLAVMIEKFETMLGQNLSEGHWQQFFEANLFILGMVFARPVALLHTQFHARGSMVNGAGAHIGDLLFAQGCELAIVEIKKPSTPLMQSRAYRNRDVFGPHLQLSGAITQVLHQQGLMRSNWLSHLQDPTMRDLQQDTARCVVIAGTKPTEEGRRRSFEIFRNACKDVEVVTFDELLGKLRMLAQHLAPVDPVDIPDIF

SEQ ID NO: 60812 - protein, 472 aa, Pseudomonas amygdali pv. mori
MRYPALGAVMMLSQPSRLRERRVKDGSDESSQTKKQQRERAKSLPEPSIRKGVVNRAFYVELSVPSSTAGEHPTNSSSGADSHVLARIFADRIETWPTVINPRFISEYTRQRKPYPRIVYRLPKPFAGQLPSETSSVVSHIERVFDSGIFNTCAKGLGFKASFNAVLSALQIDKSVDTIEIHFEGDLFRRENVVCVSEATLNDLRTAFNTGDDFWNRQKEGSRRSYIYEEIVEKLAPVLKHSGDRGGHYLSGFSEAERDYLATLQAYIRDLPLGMPEDFKAMRESMDRGELYRMIHHYQIMLAQNLSATEWQSFLSHNIDLVVKCLQHPDCGALDPPLGAQPKSAVGSPIIYGHEALVLTVRSPHATLMIRDSSGRIGDSDLQGSGEPPGRLIPHPELASAIEEGRKLRPDIPGQIQKPRCVVVAGLMPANVDEAAAYIGYREAARQYNGIHLVDFGTLLNGFRLLASAIET

SEQ ID NO: 60813 - protein, 515 aa, Pseudomonas amygdali pv. mori
MRAWCAPFDSRRGNRGISVVDPARTSKTERSIISTTFGMESTMEGTQQTLQDTWNGEDVLEPSFSIIRRPVEAGFCIDLYLQVFDKISSDKWQSLPEDRWHRLATIEPGWITMYPIYTNPHTQRYRSPKNGNVGCILYSHQPTRDLPDTPEDAVLYIDVSLPRKLFDPCEEGLGLVKQLTPLWRGLRFAPSLKTLVISDDGDTSITDDVVFVSEARVDECRRTCMRITRARKKSETSAQMHWVLSQVFPTLMPNVVFEGSRPVLASDTTPRRVSNQVAQAAVRARRHQLREVKVGAEMLAKEAPRELFELHAEIERVTLAVMIEKFESMLSQNLSEGHWQHFFEANLFILAMVFSRPVALLHTQFHAQGSTINGAGAHIGDLLFSQGRELAIVEIKKPSTPLMQSRPYRNQDVFGPNLQLSGAITQVLYQQGLMRSNWLSHLRDPTMRDLNPDTARCVVIAGTKPTEEGRRRSFEIFRNACKDVEVVTFDELLGKLRMLAQHLTPAAPADLPDIF

SEQ ID NO: 60814 - protein, 473 aa, Pseudomonas amygdali pv. tabaci
MEGPKQTSQDVWNGEDVLEPSFITIRRPLESGFCVDLYLQVFEKVSMDKWRSLPEDRWHHLATIEPGWITMYPIYTNPHTQRYRSPKNGNVGCILYSHQSTRDFPDTPDDAVLYIDVSLPRKLFDSCDEGLGLVKQLTPLWRGLRFAPGLKTLVISDDSDTSITDDIVFVSEARVDECRRTCMRITRARKKSETSAQLHWVMSQVFPTLMPNVVFEGSRPVLVSDTNARKVGNTIAQAAVRARRHQLREMKVGVEMLAKEAPRELFELRAEIERVTLAVMIEKFETMLGQNLSEGHWQQFFEANLFILGMVFARPVALLHTQFHARGSMVNGAGAHIGDLLFAQGCELAIVEIKKPSTPLMQSRAYRNRDVFGPHLQLSGAITQVLHQQGLMRSNWLSHLQDPTMRDLQQDTARCVVIAGTKPTEEGRRRSFEIFRNACKDVEVVTFDELLGKLRMLAQHLAPVDPVDIPDIF

SEQ ID NO: 60815 - protein, 543 aa, Pseudomonas amygdali pv. eriobotryae; identical to SEQ ID NO: 60810

SEQ ID NO: 60816 - protein, 373 aa, Syntrophobotulus glycolicus DSM 8271
MGRLDDNWKEGKRFLPILSGEDEGFKKLFDEKTNRINRDNYEGHGFAWEIMNNCQEIVLGYEEKVGYCLNLVLRSIDMKTFEIIVEAALQMQCGEDINKVRDIIGIAMIKDVPVFGDTIELHENLKDIQSSIIKEGFTSFFDGEEKRVKITRFNDFDLNNSKEILKNLSCSHLITPGEIRIVNEKISSDFRQYANAAKFIDSLHLVIKEFSELLKSKTRNENQLQEYITRNPILFGTEYKSIKPKHCLGSEYEMDYALQRFDGIFDLVELESSSLGLYTKDGNPRAELTHAEQQILDWQEWLEEKNFYAREYLKDIRSPKGFVVLGRSESLNDDLKKKLARRNLTFGNKLQVLTYDDLLNKVETFLEIIKKSN

SEQ ID NO: 60817 - protein, 384 aa, Acinetobacter venetianus
MDDYQNPKEGKTYISPRLDAFGNSDRKVRIASKVIESPDSYAFAKIKDEVVLRHKEGAKSHITAKFLEDNRGIFVLSIQSYTIATEKPHNASFSFIGEEIGKLLEFIRNIQSVNLDNPSRVNISDEELNRIILNDKQVKSLFHENQELFAEVLKSEITTEDLIAVGYRKTQLDVYEKLLSNQSYFESIKSKKNTTNEGLWQKYFEKNPWVFGYGLGYIFLSTLDDKKLEQVVQGHSVDSHGKRVDALMKTKGIISNLCFVEIKTHVTELLESKPYRAGCWAPSKELAGAIAQVQGTVSSAVESLSSKINPSDSQGNPTGEEIFNYQPKSYLVIGSMSEFVSENGVNKDKIRSFELLRKNTTNPEIITFDELYERAKFIVHHNQS

SEQ ID NO: 60818 - protein, 224 aa, Pseudomonas coronafaciens pv. atropurpurea
MKVGVEMLAKEVPRELFELRAEIERVTLAVMIEKFETMLGQNLSEGYWQQFFEANLFILGIVFARPVALLHTQFHAHGSMVNGAGAHIGDLLFAQGRELAIVEIKKPSTPLMQSRPYRNRDVFGPHLQLSGAITQVLHQQGLMRSNWLSHLQDPTMRDLQPDTARCVVIAGTKPTEDGRRRSFEIFRNACKDVEVVTFDELLGKLRMLAQHLAPADPADIPDVF

SEQ ID NO: 60819 - protein, 354 aa, Xanthomonas axonopodis pv. phaseoli
MQDASKVQRIVRKAASSGKLDYAPPVVLNETTKSKLQALAWFIPHTDRTEFSLKLEGFVKSKNQPWVEDKAKTLTLTEASSLQLLKYLQTHLPVAAQSGTGEFILIKVSNGEANVSEHKPEELVGALTKVLSQPELVQHLSTAELTHELSAALRGSIRLSEMRSAVAELRSNLRREVGEQVYQAWCEKHCWAFGNAYVLRDEVRNISSGDSLDLLLPNVIAGYRDIVELKRPDKDVLVYDSAHRNYYFSADVSKAIGQCHRYLDILHEQAKHGLLDHKEVVAYHPRATIVIGRSHDWSAEQQRSLHGLNRRLHGISVMTYDHLLAQGERLLEMMSPLDPSLVDPSSDEDDDIPW

SEQ ID NO: 60820 - protein, 354 aa, Xanthomonas axonopodis pv. phaseoli
MQDASKVQRIVRKAASSGKLDYAPPVVLNETTKSKLQALAWFIPHTDRTEFSLKLEGFVKSKNQPWVEDKAKTLTLTEASSLQLLKYLQTHLPVAAQSGTGEFILIKVSNGEANVSEHKPEELVGALTKVLSQPELVQHLSTAELTHELSAALRGSIRLSEMRSAVAELRSNLGREVGEQVYQAWCEKHCWAFGNAYVLRDEVRNISSGDSLDLLLPNVIAGYRDIVELKRPDKDVLVYDSAHRNYYFSADVSKAIGQCHRYLDILHEQAKHGLLDHKEVVAYHPRATIVIGRSHDWSAEQQRSLHGLNRRLHGISVMTYDHLLAQGERLLEMMSPLDPSLVDPSSDEDDDIPW

SEQ ID NO: 60821 - protein, 354 aa, Xanthomonas axonopodis pv. phaseoli; identical to SEQ ID NO: 60819

SEQ ID NO: 60822 - protein, 354 aa, Xanthomonas axonopodis pv. phaseoli; identical to SEQ ID NO: 60819

SEQ ID NO: 60823 - protein, 430 aa, Xanthomonas axonopodis pv. dieffenbachiae
MLLAHVSSTEILMFPTVSAAYRSTFLEQKYDQIARIRIPGDWNVPQDIYEFNELLDDLPVGFSRRASRGLGLKWENRLIIEAIERATAATELQLVDGDEASLSGETFSLGRRLFDSVRKGMAQIGRKSQFRALQDRRFLAHNEIVHPIDGELYPKQVREARPGEFFALAQLSTRDQQRSAGDRAAATDLVRRDVSQIARDNPRALLELRSEIERVTLGELIDRFDALLQRNPDERVWQTFFETHPFVLSIAFPHPVLLIRGQAYVGGATIDGKGETIADFLFRNRLTGSVAIVEIKTARTHLLQKKTFRGTMHAAHSDLCAAISQALDQRAELTKNFHARGQHPDMEGTHVWHVHCLVVAGKTPETRDKRGSLDLFRSATKDVAVITFDELLEKLRAIHYAMSAGSIGAPGSVTQNAGPSPTSGGPDTDR

SEQ ID NO: 60824 - protein, 415 aa, endosymbiont of Riftia pachyptila (vent Ph05)
MIEIDCQDDRLLLIYTPERFSSDWVDNKLSKNGSVTFRRTFTFSTDALVEEDESGLWTEDERVFLLAIGDGDFFNVNKDILGLKYDLLLSKDMAISIKTFVAYRDISVFRRIDELVDESIVIGGNAEGAIPVADFEELLRNFPTSTELTHYARARITRVLKDYMGTMSDAQVKLDNYLDQKKTIRNRSKIDFIKDYEPKKFEYVRDEISAMLREVDARPDAFKEKDWQRQLVEFLLLIFPRYVAVLENVHIKDFYSTLGKGTDRYIDLLLVDANGSVDVIEVKRPRPHQLLSRKPGSRGNYTPSSELSEAVMQVEKYLFHLTKWGLVGERSIQEKCKAELPSDFVIKITNPKAMLILGRDNNFNNKQKLDFEIIKRKYANIIDIMTYDDLLRRLDNIIAMIHYNFSKLGIKGGQA

SEQ ID NO: 60825 - protein, 407 aa, Sphingobium chungbukense
MKAIKEAAPELRDRINRQKQDIYAEVDVVLLHLRTLVRTGEKADADRLMAVIVDQYREANELLKHALDTKLVAPLKDQKTEGWPDWAVETRADVLAMAGESGPYEPLWEGDLSDDCTAELHGYMLRAEKMDDRQWWWALYGPDGNISSNEKPGNYTTGGQARRAAANEFRRAVGAPRGEPQGASDMVALGLVDGALRLFAFADDEIYRFADGNNNPHQILSRIAHFGRFLSGAINEFEELINSPLAKERDLQRFFETYPDFLIRDEYKAAHPHMVLSTPGHGDLIPDFVLEPHDQGGFCDLLELKRPQHKITSYMKNRPDFTATVHRAKAQLRTYEAYFEEEGNRTRIAQRYGLNLYRPRMILVIGQKQHIDPRISALEYRRMEMETPQLVIRTYDQLLDRMRSRNR

SEQ ID NO: 60826 - protein, 308 aa, Xanthomonas arboricola pv. pruni str. MAFF 311562
NKLESQWSAWRSLDAPEVVEDKYPQVRVWIESLGDERIKRDAKKLIGAVERLALAESEKVEVLKHSIFVFERMKLKGRTAELAEAVSLSDAALIKLFADQDALEAGVYRDIVKGRLGEIRLLKDAVDKNEKEKVLQQLLFDRLWLLDPSWERATGSPQIEQQFKKLFPSSSDEKDEEASKGRFDITYRTAAGKHIIVELKRANRSVTLAELSEQGMKYVDELNRLLVKHGAIKEGFQPDIEVIFVLGNRVPEQQNNVQRYKNQMDAISVGSRVKTYEELVSQALDAYKDYLEKTKDLGSLSDLIESIG

SEQ ID NO: 60827 - protein, 353 aa, Xanthomonas vesicatoria
MQDSSKVQRIVRKAASSGKLDYAPPVVLNETTKSKLQALAWFIPHSDRTEFSLKLEGFVKSKNQPWVEDKAKTLTLTEASSLQLLKYLQTHLPVVAQSGTGEFILIKVSNGEANLSDHKPEELVGALTKVLSQPELVQHLSTAELTHELSAALRGSIRLSEMRSAVAELRSNLGREVGEQVYQAWCEKHCWAFGNAYVIRDEVRNISSGDSLDLLLPNVIAGYRDIVELKRPDKDVLVYDSAHRNYYFSADVSKAIGQCHRYLDILHEQAKHGLLDHKEVVAYHPRATIVIGRSNEWDEEQQRSLHGLNRRLHGISVMTYDHLLAQGERLIEMMSPSVSEALVPAAIDDGIPW

SEQ ID NO: 60828 - protein, 353 aa, Xanthomonas vesicatoria; identical to SEQ ID NO: 60827

SEQ ID NO: 60829 - protein, 468 aa, Rhizobium gallicum bv. gallicum R602
MSGSSIVKFQTVVAESQDGLSIDLMTTDHGLEQLHLIISPKALDKLIKDNPGFKHPGNPVVLAQYDADSEKLTVFPLRTLLTSRFLEPKYTKIRSIVVDGISSLEHQDYSENVGIGNMPAGLVRAPLFGFGVLNDLRTIVQAVERVPDVTELYVSKARGVSQNGGTLRISRSIFDGFRKTVGRLHRKTLAFVNERKLEVIETKISDLLQAKDSVDYHDDVNSALADRLAEALVGKIKSGTISRKAALQTVRASVANIAKTEPTEILSLQREIETVTLEDLIERMEKRIAQKGLTEHDWQSFLSANAFILRAFGVPALVFEEQLAVGGTRFDGGGGKLADYAIRAGLLGNLAIIEIKRSSTDLVERKAYRGDLHAPSTELSGAVSQVLDQRYRLQMDIKSKKIDSGIFDVYTYAVQCIVIAGLTPESEPMRKSFELYRNSLKEVLILTFDELLAKLRALLSFLKGEQTS

SEQ ID NO: 60830 - protein, 507 aa, Rhizobium gallicum bv. gallicum R602
MDCFAMSGDAHFSVNTRLTRLLGETYRSSEAALKELVDNAWDADARNVWIILPLPMTSEAIVVRDDGSGMTSLEMQNEYLNIASDKRARTGERTPSMKRRVKGRKGIGKFAGLSLANRMDVTAVARGRRCSLTIDKIALTENENDLESVPLPFIEEEAASGEIGTTIVLSDLDNRLNFPTADRFREVLVHEYGREESFKVFVNDVQLSVEDVPGVSKQVEEVLGESGAVRLHFTIADGKKAPESPGIVLKVAGKVVGRPMLFGLDDDEEIPLKLSKRVYGEVELEGNDHFVTADWGGVIENSKAFQEIQAYVRSIVKQELQETHARDMSLQLARLKRQIDLRLQQLPEHRRRYAEEALSRILRRFYGESEDRISTIAEVALDAIEHDAYWAVLERINTTSRGDVGSFAEALEQFGLVELSAMAAQAKRRLEFLDFLDELIQNDATLEQNVHKALETNLWVFGRQFATMASNATLKSIIASYGIRNSQAIVRRSAQISCCSRILATAT

SEQ ID NO: 60831 - protein, 356 aa, Citrobacter braakii
MKTLDLVHDFGNNRTSGVGGICRVRCYINKKDIIVLLTDLGSLNDGQSVTNAVEKIISSIYEHGIVTQAAVFIEHYERNSHKLDTFDIVNISPKTEWFSISREKVLDLLGCDEDELSERSINNRKVYEKADKIRYARDPFIDSTYIPSPEFISRKCEILNSMVLKSSIAQLIESGAKEQDIQQVIKNDLSLIAEAYVGNNEYICFSEYPLADGLVDFVIFTGRSRMDIILIEVKGANFNLVNANNYGSFNHKVRDAAEQIQKRLGLVYRNYESFRKDAHEKRIKVLSGDLIHNAFVGPESCKQVDPNKDVNVRSIVIGGRTLNDLEESKKRHDYEIHSTPPIRIESWDTWLRRLTR

SEQ ID NO: 60832 - protein, 393 aa, Streptomyces canus
MKLQLKHVAGHAVDSRVKDALAAVVKHMTSGRSSYRGGRALITLLKDVRSTAAAVDEWQVVRLIEDSLDYAEGRILRPDFEERYRLFQRSTEPLSSHQDYLARTLSASLAYFMQLGDQYLQQHPGASPSELLTHVEAIARDARYMQQSQERPGRYRILRGSAEVAAWLEQVFHERVDVEDPEDTARRIVMSPDSLAVLAADREGQLLLRAAEVQRRRRGLEVLRMAVEDPEANERDLQRALDGQYWIFGGQFASQAIRRRLVPGDEIDIPLIRGDGALHIVELKRSMSLHGSLVKRHRGCWVPTAEVHDAMSQAVNYLVGLDEHRIRIRDELGIETRRASALVLIGHPSVQPDVAEEDINEALRMLNTHMSRVEAVTYKELVDNAERALSGWR

SEQ ID NO: 60833 - protein, 246 aa, Pantoea dispersa EGD-AAK13
MRLLEHADNTSLVLALQNVITNRLTNDDINTILGRKDSLKKYQTMLDNAAHYNEPQWQAFFEKNEWLFGYGLRYKYLKIIQREAHISHTDLNGSNDVITDFLVSDSRFTKIVELKTPETSLFVNRKNRADSWRLSSELTDAVSQILAQKANWEIESQRENYNSDGERIYEKTYDAECILIIGSLDSIDGSEREKEIKKKTFELYRRNLKSIDIICYDELLERAKFIVKSAEIIESAIGSVLEDDLI

SEQ ID NO: 60834 - protein, 412 aa, Paraburkholderia glathei
MLDFRTTKTGVDFDYQPEFGTQHQWVWEEMKSGKSTEVSRVFSFQKADLKNPPTNKTDFTEYVYTFRFGTFEDEYLRIPGSVFSIERDVLVSRELRLKRSVFVAERNVSIMKRLSDLLDNDEPIVIGGGRAGNIPLPVYQELLRKFPTTHELNRYAAARVHTILSQYVDGMKDARGLYESYLDKRSALNGALSAENPPELKALKEQEVLKYRLIHDEIQQSLLTGKNLSEKEWQQRMVSFLLLLFPKYIRVLQNITINDYYSKSGKTSKRYIDIGLVDASGNLDVIELKKPFEDKILRQGLYRGNNIPTAELTGSVMQAEKYLFHLSKWGVDGERALTKAYASELPPGLDIRISNPKAIIIVGRGRIGGKKMTDGQQLDFEIIKRKYANMIDIITYDDLLGRLQNTIYALEH

SEQ ID NO: 60835 - protein, 412 aa, Paraburkholderia glathei; identical to SEQ ID NO: 60834

SEQ ID NO: 60836 - protein, 420 aa, Burkholderia vietnamiensis
MPDKDWPLLATILPNRIITRPIHVNPHAQRYLTPKNGRFTTVIYVDEGGDKLLDDAEAAALRIESRLAWGLFDPPGNGLGLNRDLDPLWQGLSRIQHADVLVISEHPEMHAVDGVVSISTQEVDRLRRAFNRVTTNGRKLIRQTKQGIVHDDVLTRIDPERFRRVVQVNPPLVEVRREGTKQAAARERAERRSNVQAVRKQLGELVTEAPRELMMLHAEIERVTLAKMIEAFKAKLASKLTESHWQTFFEQNKFVLSMAFARPVELTHTQFHAKGSTLTGAGAQIGDFLFKEYGQALAIVEIKTPDTALLQGTAYRGQDVFGPNSELSGAVTQALFQQSELKQRWMTHVNDNPALRQSGVDVVNCVVVAGRLPTDPSRLRSFEVFRNACKNVDIVTFDELLAKLEFLEEQLTPKPEPVPF

SEQ ID NO: 60837 - protein, 338 aa, Burkholderia vietnamiensis
MDDDDVDRATASREAIKKDDPKYKALIGFVRSTLEDIGSKWDEWRIALGLDGSDPQNAAVLEWIDTLADKRDKKAATKLMTSIKNAVVHSDPAKNDEAKKVLYRGAIIGFEKLRLRNQLDKLAQVTDILGAEFAAIFATLDQVEESSYAEITRQRLEIIKKFAEICNDPGTLEKVAHKYLFEHLWLLDPTWDRVTGRAEMEKTLTEELKKKHPDSTGARLDISYRASSGRHVVVELKKPTKTSLDYGDLFQQVRKYKQAVEAYYDDKEPNKPVPPLDIYLLVAKRPNGFSESDRQSLAAQNGRLITYEQLINDARNAYQQYLDVNKITLPLEGILKKL

SEQ ID NO: 60838 - protein, 145 aa, Burkholderia vietnamiensis
MRFGAQSARAELLCEWQSEERKAIKPDFFVVQSNGYADIVEFKLPDIGKKTVTGSENREAFAAWLNSYIAQTRVYATYFDDPNNRRWFEEKYGFKVYKPRRWLIVGRRSDFTSEIWREIISDYRDLEILTFDDLIDGVVAQFYKK

SEQ ID NO: 60839 - protein, 420 aa, Burkholderia vietnamiensis; identical to SEQ ID NO: 60836

SEQ ID NO: 60840 - protein, 469 aa, Enterobacter asburiae; identical to SEQ ID NO: 60037

SEQ ID NO: 60841 - protein, 469 aa, Enterobacter asburiae; identical to SEQ ID NO: 60037

SEQ ID NO: 60842 - protein, 318 aa, Shewanella baltica OS185
MAQIKDRLVRIIRDKPRVLTRAIFWKIPHNTSEDEVFLKLGRYNKPKSWHESETLELDSPKSELTLDSEEFHNLIDFISNNYEPFKQGTRAFLPLDNPYDLSNAEQIKQLLNLPDKRGMLEFLLANEVIPEDLELGLEHARKVRALDEFQYLLESDFTENVWQNWFEKNSWVLGSDFVKVLDERAIDTHNISDFLMESYDGFLDIVEIKRPEGSLKFWSTGLDHNNYYPHSDLIKAITQSQSYIHEVELEANSVKFMERVGYVKTIKPRCTLIYGRSNDWNKEQQQAFRVLNSSYHNLTIMTFDHVLERAKRIIGKRG

SEQ ID NO: 60843 - protein, 332 aa, Streptomyces roseosporus NRRL 15998
MSPAGSLIFFMHTSKSTAAGDTPVTGCRTVLRDDLEAPVRQLAQPAPPGQFGQLAAQRLQSALHLDVEAQLDADVLDPGRAACFTHDAHDLLVVRRQRVLAHARLALRDGQMVFRAAELQRRAVGLDRLRAVAEDRTATEHDLQAALEGQRWIFGGRFVGEAARRRLVPGDEIDIPLIRGDGSLHIVELKRAMSLRKPLVKQHRGAWVPAADVHDAVGQEINYLVGLDENRQKIRRELGIETRRASAVVLIGHPAVQPDVPEQDINEALRTFNSHMSRVEVLTYKELIDNAERSLGSQEAGSPAASSPAEGRSRKPSTDQRLLLMRLDRRGT

SEQ ID NO: 60844 - protein, 322 aa, Streptomyces roseosporus NRRL 11379
MHTSKSTAAGDTPVTGCRTVLRDDLEAPVRQLAQPAPPGQFGQLAAQRLQSALHLDVEAQLDADVLDPGRAACFTHDAHDLLVVRRQRVLAHARLALRDGQMVFRAAELQRRAVGLDRLRAVAEDRTATEHDLQAALEGQRWIFGGRFVGEAARRRLVPGDEIDIPLIRGDGSLHIVELKRAMSLRKPLVKQHRGAWVPAADVHDAVGQEINYLVGLDENRQKIRRELGIETRRASAVVLIGHPAVQPDVPEQDINEALRTFNSHMSRVEVLTYKELIDNAERSLGSQEAGSPAASSPAEGRSRKPSTDQRLLLMRLDRRGT

SEQ ID NO: 60845 - protein, 344 aa, Streptomyces mutabilis
MDWDEPAYFDRRPASSGRVSYCDALTIRDNRSVSIKALPYFIPHNSSRSELAIKLIREDKRNGEICEISLKEEDLRTLKRHIAQCLSVAEEDDDGRYLVLRTDDLSSQPDVSEDAARALGGALDSRQFARMVARSVDPVTLAKTFSASVRIGELRAAVTELKQNLNDGNTREAIYQDWCERHSWAFGNAYVARDNQRVIGIGDHVDVMMQSTANGLRDIFELKRPDMDVILYDETHKNWYWSSATAKAIGQCHRYLDTLHQMAQSGLYQDRADIAAYHPRAVVVIGRSRGWSDPQLRALHGLNSRMHGISVMTYDQLLAQCETLLRQVTDHAEDQQDLPEEMSA

SEQ ID NO: 60846 - protein, 393 aa, Streptomyces varsoviensis
MQLKHVLDAAVDPDVREALAAARRYMNSGSRAHRRGGKALIQMLEAIRRSAADVGEWQVVRLVQDSLDYAEGRILQPDLNDRYRLFQDGVRNTNLRNGASELLCHQFGRLAEASREYAEEHPDADVGDLIAYFGSLSEDARYLDAPEDRPGRYRVLRGRAEIAVWLERVLRERIDIEDPAEAARRIVASPEAVALLAADTEGEMVLRAKELQRRSSGLAALRKVVEDATASEYALQRALEGQHWIFGGRFVGEATQRRLVPGNEVDIPLIRGDGALHVVELKRAASLAGHLVKKYRGSWVPTSEVHNAVGQAVNYLVGLDENRHRLREELGIETRRASAMVLIGHPSVQPSVPEEAINEALRTLNTHVNRVEVLTYKELVDNAERSLGRASSA

SEQ ID NO: 60847 - protein, 399 aa, Streptomyces regensis; identical to SEQ ID NO: 60610

SEQ ID NO: 60848 - protein, 489 aa, Aquamicrobium defluvii
MAGSEKEDTYTSAPIDAGTHAEDGSFLVLETIPDGKTQYLSYHLSEKAYDRAKAAGADMKLLDDASEPHLLAEYSFETKVLTTYPIWLRSNQTNFLKRKYGTIARISFEDEREMAVDKHIGLFFDLPTGFHRKPFEGFGVDPRIKYLIDAFRNLPGIVGITICEDDQISVNGEDVRLPVHIFDDARLNINRAHDAARDFANGEKMAYLKNLFLPYVVPGYEPDDFERPGIDLQDTVRSALAKRGIPRSRNTNNSAAVRTVMRQVVEIAQDDPVQLFELSEKIQLASLSALIEDMTKEMAKGHREAFWQTYFEENPFILKVLFGLPVVHYTSQATVGGMGLKRKGEKQADYLVKAGMLGNLAIVEIKTTETPLLTKDPYRPPHLYGPHPELTGGANQLVDQKLRLIKSIAAKKEEEEEEPNIQAWSVPCILIIGRLPEKKNEKRSFEIYRGSQKDVLIITFDELLAKLVALHEFLTTKPEEVDEDISKLV

SEQ ID NO: 60849 - protein, 386 aa, Mesorhizobium amorphae CCNWGS0123
MSDDSGYEFFKLRKHAKTYITKVFMHHGLNTERRRYVRMVNEGSDEVHLGEIEGAMCLRLTGNIRKTQVTALVTQDDKQVKRLTFETFKSRAGGWIEAMEKEEFSFRSDEWSRLQSFLAQIKFVDLSNQDTFHIEDISTKAGPKAIIDASDRGILDRIKNMSEGQRTGLLHALQGQLTSEEINILLGRRQGLEEYEKHMLHKDWSETHWQDFFEREQWVFGYGLDYRVMRQFDREMTVGAGGTDNRNKPVVDFLGTFTDYTVLVEIKKPDTLIFRPSRGGRAGTWEFSPEFLGAFSQIIEQKAEWLTFAQTGEHHNKAGDLLTARTRNAKSILVIGSRDEFSQADNDRAANVKRDTFELFRRENRSIDIITFDELLERARFITKSG

SEQ ID NO: 60850 - protein, 484 aa, Achromobacter piechaudii ATCC 43553
MANGKLQEQAESYTDGQVMEPAFQFRSGVADGQEYRDLMMQTFVEEEMQNRRWQSEPENKWHLLARVFSDRIVTYPVFTNPHAQRYLSTRHGRFATVVYERRVVNTLPDSPDALVSDIELALPWRSSNPCTYGLGFIQELDEVWLGLSRFPTLNTLVVARDGEARIDGNTVRIPEEDIDQIRRAFSREARRIRGYFRQSKSIHVRNALLAPLDPERFPPIVHVAKSGELMEVRLDRGKQSKAAGRAARKATVEAVRTNVETLAAEAPKELLELHAEIERVTLEQMIEKYEDMLQKNLPEPVWQKFFERNIFILTMVFARPVRLLHAQFHARGGGLDGTGAQIGDFLLAEKGFAMAIVEIKRPSSPLLREKAYRNREVFAPDEELSGAVSQVLYQQSKFHENWLFHQSRPELQNSRPEAIKCVVISGVLPTNEMQRQSLEVFRNACKNVEIITFDELLGKLQLLLKHLTPHAPPQLTTPEDDVPF

SEQ ID NO: 60851 - protein, 396 aa, Maricaulis maris MCS10
MSNYTERLSRMIDENEHKFFRARQATKTYISKVFSFDTKNPEPVRKIRMVLDGSDELYLGEIEGAMCLRLTGNIRKTQITALVTQDDKKVERLSLLTFKNRAGDWLEAIEEHAFTFRANEFNRLLEFLEAIKFVDLSNEDNFHIEDISTQAGHKAIIDGTDRVIVDRVKKMSRSEREEFLKELRGTISKDEVNILLGRKDALQTYSNHLKMDDWAESEWQDFFEKEPWVFGYGLDYRVMRQFDREMTVGSGGTDNKNKPVVDFLMTFTDYTALVEIKKPSTPIFRKGRGGRAGTWEFSREFTSAVSQVLEQKAEWLSFAQVGQQYNHAGNERLAARTRNAKTILVVGSLLEFNSEDRRSADIKRDTFELFRRENRSLEIVTFDELLDRAQFIVRDR

SEQ ID NO: 60852 - protein, 361 aa, Hyphomonas polymorpha PS728
RQTRRGSMSKVIDVQPSFQFATAKAQHTLRETPAGRHTIKATFFETDRRISVLTIQKFNSASGASREFSFSFVGSEIRELKEFLAGVETVAVDDPRKRHIQDEELHEIVLNRAQINRLVSTDEGLVIDILKNANLRRDFVAVRYRQEQLSIFEKLLEDGTFFEQKMEQHKADKPERLWQKFFELNTWIFGYGLSYQFLSGLDKKKLEQAVSGYDLSGHGKIADAVMKTRGIINSLCFVEVKTHKTELLSADSKRSGVWHPSSNLTAAVAQIHVTVQSALETLQDIVRPKEKNGDPTGEQLFNIAPSSFLVVGSLAQFQSENGTNVDKFKSFELYRRNLNAPEVITFDELYERARFIVSQSK

SEQ ID NO: 60853 - protein, 380 aa, Myroides odoratimimus
MSSRTSKPNYTEIIDNYKLEQLYNHKIENGRFFKIVFANDEKTEIQLASKTFMQIKYLPSRNDIEGLDIIKIVNGKETQKVSFSKFNFAQLELFLNFIHDIDLSTVAERRLKLADNSLDILDEETKKKISTLLQGDEGAEVIQELLDNDIITSQDIVNTGYRKNQLKIFERLLNEKNYLQQYKLNEEDLSNNTKDEIAWQHFFNKNPWIFGYGLDYRYQSILQKEFSASNTDAAGKGQVNADFLIGDNYFTTFVELKTPDTDLFVNTGSGQNRSGSWCLSTKLIYAVSQILEQKAVGQIKLETEPYNSLGEKITQKGYDSKCILVVGNLNKEVEKSQDSSQIKEIKRKTFELFRRDSRNIEIITYDELYLRAYHICYKKI

SEQ ID NO: 60854 - protein, 407 aa, Mycobacterium canettii CIPT 140070010
MVTFGFDVSAEPNEVTYAAGRLPTRTYATRSFEAQFGRDAGHPTRYIYRVFDEVPWDDEDQWEWTSQVVSTTPAGRKQLQLQIARERGAVRKLRIQKVPTNRDATRLETILELDREQATRLIDMLRAVDAIPVQGESSVYVDDQLLRDLFADPTAVTNLYSRDPDRFRTLIESDVEADDVIAVQRRKGVAERMRRWLTEDDEFNAAASETGGPERAWQRLLEANPWVLGIGLGGQLFTAWDQEKLEQTVVGRSITGVGKRVDALLRTSGIIRALAFAEIKHHRTELIDGEYRAGCWSPSKELAGAVVQVQQSVHLACRDIGEYLQDTSAEGELLPSGTFLLRPRSFVIAGTLAQLAGQAGGAVTDKFRSFELFRRNLHEPEVITFDELVARAEWHIKVATRPAESES

SEQ ID NO: 60855 - protein, 367 aa, Bacillus clausii
MFPNILLFTKTEEHFIFELIGAQEKYTGLTVKQHIAKNTNEYLYQFKEDPKQFAQGKPIVTFTGSCHGIVSGKLARRSDEKKFEERFGKIDKQGVRLVIDDKNDGPLISFAEDFLSCYLVDVMLINNQSEVYRVKDILSMMIVSHNYSKRNLTEELEYLLRFPVNYTNELFGIKYCESEDIEKLQLASQFANLFLIPGLRETSIGEFIKLNGSFLKSAFECSDFLYEKEFLWLEGNPDPLEKSINPDLLIKRSDGLYDICDLKTPKLDKKNLTQGGHKRRRFHDYIDEGLAQLANYDEYFTFSKNIDWAYKEYKVRMDNPLLYLIVGNYENLNSEHIREASRHLKDRYRIIDFDTLYSMYINKSLNK

SEQ ID NO: 60856 - protein, 331 aa, Herbaspirillum rubrisubalbicans M1
MKVSDFVHRYPTFVGRRRDGICRVRVFVTEPSSVIALLTDIGDLNSGASVTNSVENICLSLTRGGLVPADCRFVEHYPENSFRGDTFDLVTLGKGNSPGWKAITQAEAESLLQCGAEELKSRIEDSQQLLNAADRIRFEIDPHIDSPWPENHEKTWRRNQIEAGMISKKELADLVESNASEQALQKLLKQDLSIFGEIYADPKEEYICFSEFALDAGRVDFVVFSGRSRMDVTFIEVKGADFHLLNQGHYNKFSSKIEEATDQIRARLRHVIEDIKGFRRSAHQLRIQIENGGSVFNSLLGPEGRLLVDPDKDINIRYVVIGGRTKDDLEE

SEQ ID NO: 60857 - protein, 356 aa, Obesumbacterium proteus
MKILDLVHDFGNNRTSGVGGICRVRCYINKKDIIVLLTDLGALNDGQSVTNAVEKIISSVYEHGVVTQPAIFIEHYERNSHKLDTFDIVNINPKTEWFSISREKVLDLLGCDEDELSERSINNGRIYEKADKIRYARDPFIDSNYIPSPEFISRKCEILNSMIPKSSITQLIESGAKEQEIQRVIKSDLSLIAEAYVGGNEYICFSEYPLADGSVDFVIFTGRSRMDIILIEVKGANFNLVNANNYGSFNHKVRDAAEQIQKRLGLVYRDYESFRKDAHEKRMKVLSGDLIHNAFVGPKSCKQVDPNKDVYVRSIVIGGRTVNDLEESKKRHDYEIHSTPPIRIESWDTWLRRLTR

SEQ ID NO: 60858 - protein, 405 aa, Serratia plymuthica A30
MEIEKFAITCKRALDRHFKKVKYAYDNGYLVSQDGSSADFFYPTTILCAKTEEVFSVELIGISKKIKPLKIKKYSNLSFDKLISYCDKVENSNAQFVFSGSIISLKHMLLTNDIEYLDEKQERFPIVSKFPTKIVGDENAQNLFAFDANLLTASFKDVVVVTCKNNTFRARYIYEMLIFKNKIEEEELQQLLLEHLDFSKKGSSVFGAQKIKTTSDIKEVQVSYLHNMILRNEIHETTIGDYLNENIDIILSTLGYTDAIYEPTLYWIEKTPDNTDISINPDFLLQRKDGFYDICDLKKGLVNRKNLTKGERRRRRFIDAVNEGIAQLDNYAEYFTFEKNAEHASEKYEVKTRNPFKILIVGNLENTVDEEVKQALRGRSDLLVIDYDSIIYMFLARITNEAISN

SEQ ID NO: 60859 - protein, 317 aa, Mastigocladus laminosus UU774
MTTAQPLRERIEQFIEGGARLDVLYALLRESVDAGTLDALFGVQRLFEDMYGGMTFNMELKAPAASILVVWGEIGLRSLVEAARRSPTHKNLGIAIEMLASVAAGYPPPVLGALHDTDLAEAVQRSILTTPGLQLAARALLADFILSITDEAEAIGHVASAMWAGSWTDNRLPVQRELFAAISKRLLAVSAPVLDAFDALIRNEPENEPAFQNFLTKHPQILDPLAIRVWPQPDLFGFRSPDYILQRADGTYLVIEIECPAKKLITSGGQLTSEVTHAEQQVADYRRYLIQRFSEIEKYLPNFQEPDCLVVVGLART

SEQ ID NO: 60860 - protein, 459 aa, Leclercia adecarboxylata ATCC 23216 = NBRC 102595
MAKLLPEYFSSEDFNIEIEEIFPNCTEVFYIPRVSELEEAGINSAEPSKYKRKIALFSGQDGFISIFPIYTLTSHPNYLNQKYAQINEIDIEVNLDSAPYTKSEVSECLQLLPAGFIKDIRYGLGLKKEYRTIISAIEEHTESQCLLINKEKTGDTDYECFNLNFYDYDEMRRACNRITERTRKVARITKTTAAYNYIAHRLGNEQKPLPTDNDAISKMLRIKITDCDKQAAMNMVAEDKSVVKQTDSLTLAKLKNDIELVSLERLISSYEDLLSKKTKEDTWQKLFNQNPFILSLAFGYPAIKISDQASVGGKRLTGDGEKITDYLIKNGITNNLALIEIKKPFSDLLNKKPYRGAVYCASTELTGSVTQVLDQCYRLQQNIATIKNNNRIYDIESYAVHCILVIGTMPSDEDEKKSFEMYRRNSKNVQIITFDELLLKLKQLHEFLDNSDEKEEVAP

SEQ ID NO: 60861 - protein, 349 aa, Gordonia polyisoprenivorans NBRC 16320 = JCM 10675
MSIEEYKAGLRRWVRNSARPGIIRHEGMELKTRGRSFKSVTMHYFGSDREAPSGRKLEFQEVPAKEMDFGYDFNNPTKTFSLANDEVDVLRKFLNGMFADEGYYVRTDSKDLAKVLAERLQPGDEGESALADLLESIGGDEDLVRAVAKSNQAGHLAGLIDQERRRAALEELEQLARTPWTSEGEFQKLIQDNPWIFGGRYVGVTQRRSLTVLDQLDVPLINTDGSIHIVELKTACLPRLFRMHRNHWIVGNDVHEAVSQAENYLHQLDTHAANIKMTLKLEVQRAFATVVVGHTEHCTAEGLTEEDASLALRIYNSHLSRVRVMTYDQLISNAKNAMTLGISGSGDGV

SEQ ID NO: 60862 - protein, 417 aa, Desulfotalea psychrophila LSv54
MSQCEQPKYMIKFKELDNKILLCYSSDYPTHNWVYHELDKSGRVTISKVFKFSQKNLSSAFNKEDEEAPVEFEVAVKDGEYYRFPKDILSLKHDLYVHEDIKLERRFFVAERNISIFPKIDNMVNRPIYIGGDEEDAISMPVYYGLLKTFPNTNELNKYVSARISGVLSSYIEINDDYEERYQQYLNKKNGRKGANLQYDFSNLELIKFTSISEKLNSMLEDEVSYTEAQWQEELLQIILLLYPKYIHAFKEAPVRDTYNKADRKIDYLLIDSSGNTDIIEIKKPFDKCIVTTRTYRDNYIPLRELSGTVMQIEKYIFYLNKWGKKGEEKLTEHYKDELPENFKIKITNPSGIIIMGRKKGMTHEQVQDFEVIKRKYKNVIDIITYDDLLERLKFTISQWSKTHNKLIQATGRGMGR

SEQ ID NO: 60863 - protein, 412 aa, Pseudomonas cannabina
MNEEEKTASPAKKITMAFMQEVMNNYLGPLWQYVQQNPNLIKTAPGFLLKPEEIVVYIGQTHIAVEYIGSEIAEKLNSDGLLNLRYHDYSVKKCNLFEKIIGFEYDSTASRVSSMPLPPFSEDLVFPTNKGWEKLTELKWNFAAQNSIMGFNVPSPEPMKGQFTRIVNGMFFDADDSGLRTRHIKWLDFFPIHFDSSDEKFDRIGFNLEEIRKLVEYDAHYSYPMPDDYKYIQLPKINRFIEVWGSSKSTEPHITSHLSKEENKFILTMKFGAKDVFSELICEWQSEKRNAIRPDFFVLQPNGYADIVEFKLPEIDKGFIVGGQNRETFSSWLNSYISQTRVYATYFDDPNNRRWFEEKYGFKVHKPRRWLVVGRRSDFESDVWREIMSDHQGLEIITFDDLIDGVVVQFYK

SEQ ID NO: 60864 - protein, 403 aa, Dorea longicatena DSM 13814
MSIIFERSEDELLLILTPERIDIQDILEILRKDEEWHISRTFTVNITHLRFEDDMLNELHFCVGKVLDEYTVIDRDVIGVDHDFYFANSVKLNKRHFVAYRNISVLAKIDHIVEKDVYIGGSDIKDHIPIETFELLIKKFPKTAELNYYANARIATIVKEFFPHTESCEEKFNKFIERQEKSLSSALQDDIQNAFKENAKIELCQFREVRANLLELLNRSDSVREEVWQKQIHGLLRLLYPKYIAGVREVVIKGVDRHEKRPDFLLVDANGYIDILEIKKPNVQILTKQSSYRNNYVPVRELAGAIQQIEKYIYCLNVWGTEGEKVLQKQLSEKLPNNVMPKVINPQGILLLGRSEQFNQQQKNDFELIKRQYKHIADIMTYDDLIQRIDNILAALNMEIRVE

SEQ ID NO: 60865 - protein, 463 aa, Caulobacter segnis ATCC 21756
MASLRPSVFNSRERSDGGPFLLIEPVEQEEGFSIDVAFTDTPADQRQGEFPVARLLNVSPDLLRIWPLNVRQGRSDYLTPKYGSLESIVVAAKVDRPWSRPETVDDVIELLEGLPDGFAKDFRFGLGLLWEYRSICEGIAEQKLASMLIVHGGDEVTLTPPTFVLGVRRFHELRRQINRISARHQRDARQDKAHLAYQELLHAADPAQFPRRAVALRPDTLSEATRGGRDTMVLSRRDRSAAVRLVRSNIEALAESETSALLSLKSEIEQVTLKQLIDLLAGMLEKNLSEARWQSFLEQNPFILSLAFPAPVLVVQERAYVGGKRLNDRGGRIADFLCASASTGNLAVVEIKKPNSDLVANSAYRGDDVFGAASELSAAIAQALDQRLQLQLTWPALKEAAERADIHGFAIRCILIIGRTPEGRGQRRSFELYRQAMSEVTIVTFDELLSRLREIYGALAENK

SEQ ID NO: 60866 - protein, 365 aa, Corynebacterium terpenotabidum Y-11
MTTTEDPQDDPVKRTPAKTHNHAPTGNDGAPKGGTNEVNLSYGPKVLVKARTSFWSGDADNPRKPSLEIRKHSRSSARFAWDWNNPTWCVTLNEEQITKLRAYLNGDFISERIGHYFWVQVDDQDTAEALQRMVDGEAAVDLDVEKITSAMSLNDDLLTAVLDGDQGRTLMRLKEHDRRSDVLDELEDLIEDPKTVEQDFQDLLQVNPWVFGGEVSRSHALRNISTQDQIDIPIVRGDGSMVIVELKRAKAAQIKKTDHEYPVLSDGVHTAVQQAERYLYVLDKKVNDLQIEQQFDARRATALVVIGVWPDLEDSEKKLFEESFRIYNSHLARVQVITYDSLLANARRLLDLGDESTTTDDGKST

SEQ ID NO: 60867 - protein, 447 aa, Thioalkalimicrobium aerophilum AL3
MARLLPDDFTPEELNIEIEEVFPNCTEVFYLPRSDELEEAGLDSEDTGKYKRKIAFFSGQDRFITIYPIFTLPTHPDYLKQKYDKINEINVELEFGSAPYSKEEVVESLQQLPAGFIKDIRYGLGLTKEFQAIISAVEEHTEHQCLVIGDEPTDDTGYECFHLNLDDYDEMRRACNRITDRARKVARITKAATTYNHIAYRLGVEQKPLPTDNDAISKMLRIKISDTDKQAAMSMITEDKTAVKQTDSITLTKLKNDIELVSLERLISAYEELLGKKTKEDTWQVLFNQNPFILSLAFGYPAIKISDQASVGGKKLSGGGDKITDYLIKNGVTNNLALIEIKKPSSALLNKTPYRGEVYCASTGLTGSVTQVLDQSYQLQQNIAAIKNNNRIYDIETYAVHCILVIGTMPTDDDKKNRLKFTGVTQRMYRSLLLMSCYSNYSSYMIS

SEQ ID NO: 60868 - protein, 532 aa, Ochrobactrum intermedium LMG 3301
MHQASIEGRLMAERKYKVDKVAIRTEDGTKVELWTAPDGDQQLVMVLGKKALEFAEFHRNGIPEPEGLQLPHVLAKYYANERKLVTFPCSTKPNKYVYDPKYDFRSITFENQQPLQLNADTTIVHGLPSGFEPNPMDGFGLYYPLRFIFKVFEQTLGVEDITMCDDEHMSFKDGVVRFPIFKYHFVRTAINRAHRAALDFANDEKKSYLRSEILSELMPGYQIQGSFQRSAYDLDRSLKAALSGTTRLRRSNENAIAAVRTIRSAARSVVKESPAEILELNREIELVTLESLIQLLAEKLDRSLAESYWQKLLMRNPFILKLAFGLPVAIFGEQVSVGGADFKGKGGKIADFLVDSGLLGNLAVIEIKRPSTNLLQANPYREGIFAPSREIVGSVNQVLDQRFQLQQSINDKKIHSKTYDVFAFAVQCIIIAGRVPNDEDRRKSFELFRSNLRDVLVITFDELLHKLKALYEFLQANPVEGASPLDPDTPEAEDEETFSDDVDYEEDKHFEEFIARHADDDEQASRSLQRNA

SEQ ID NO: 60869 - protein, 522 aa, Ochrobactrum intermedium M86
MAERKYKVDKVAIRTEDGTKVELWTAPDGDQQLVMVLGKKALEFAEFHRNGIPEPEGLQLPHVLAKYYANERKLVTFPCSTKPNKYVYDPKYDFRSITFENQQPLQLNADTTIVHGLPSGFEPNPMDGFGLYYPLRFIFKVFEQTLGVEDITMCDDEHMSFKDGVVRFPIFKYHFVRTAINRAHRAALDFANDEKKSYLRSEILSELMPGYQIQGSFQRSAYDLDRSLKAALSGTTRLRRSNENAIAAVRTIRSAARSVVKESPAEILELNREIELVTLESLIQLLAEKLDRSLAESYWQKLLMRNPFILKLAFGLPVAIFGEQVSVGGADFKGKGGKIADFLVDSGLLGNLAVIEIKRPSTNLLQANPYREGIFAPSREIVGSVNQVLDQRFQLQQSINDKKIHSKTYDVFAFAVQCIIIAGRVPNDEDRRKSFELFRSNLRDVLVITFDELLHKLKALYEFLQANPVEGASPLDPDTPEAEDEETFSDDVDYEEDKHFEEFIARHADDDEQASRSLQRNA

SEQ ID NO: 60870 - protein, 316 aa, Ochrobactrum intermedium 229E
MPGYQIQGSFQRSAYDLDRSLKAALSGTTRLRRSNENAIAAVRTIRSAARSVVKESPAEILELNREIELVTLESLIQLLAEKLDRSLAESYWQKLLMRNPFILKLAFCLPVAIFGEQVSVGGADFKGKGGKIADFLVDSGLLGNLAVIEIKRPSTNLLQANPYREGIFAPSREIVGGSVNQVLDQRFQLQQSINDKKIHSKTYDVFAFAVQCIIIAGRVPNDEDRRKSFELFRSNLRDVLVITFDELLHKLKALYEFLQANPVEGASPLDPDTPEAEDEETFSDDVDYEEDKHFEEFIARHADDDEQASRSLQRNA

SEQ ID NO: 60871 - protein, 65 aa, Flavobacterium psychrophilum
MKQHSYDSKCVLIFGNLEQEIKHCNDTEIDIMKKTFELYRRNSKNIDIITYDELYNRAFYICNKK

SEQ ID NO: 60872 - protein, 285 aa, Eubacterium plexicaudatum ASF492
MKLEEKLLEQYFDVIEKNGNTENQIQEFLEENTIFIPMPFLLNHYLHMNCVISKFKLGNEFVTDFAYLTKSSDYWEFVLVELEDAKKKIFTNDKENIYFHSEFNHAYDQITSWKAYVNKNREAILHQIDKLRVPLNENSVRFKYVLVIGRNAEKDNSEKRRAMFAEKSDNDIRVMTYDSLVSQCESVPYNGEKIILSTWKEQGFKIKKLPKQEISTSLFAYLRPEYLQISERDIEILKEQDYQIDIWLSGRALSYNDKYDAASLAERTTNPLTKAVLLAEAKNNK

SEQ ID NO: 60873 - protein, 401 aa, Burkholderia ubonensis
MDDEEQIHHNKLPGKTYISPRIYIDAHEALRIASKVIDSDGLHYATVKREVVLRRTEKGRTEIIAKFLESTRDLRVLTIQAFNGQTGAPHKTHFSFVGEEIPKLLAFFENIASVEFASQDKINITDTELTRLVLSKEQAASLVHDNQDIFSEVIRQEITKEDVVALGYRKRQVATFAKLLSEPIYFDQVKAAKGVTGNEALWQAFFERNRWIFGYGLSYFFVTGFDNRKLEQVVEGHDLINRGKRADGLMKTKGIVSSLCFVEIKTHTTKLLDSTQYRPGCWAPSKELSGAVAQVQATVASAMRSLSEYIRPTDAHGAPTGEEVFNFKPRAFIVIGSLNEFITEHGVNKDQLRSFELYRNSISSIDILTFDELFERCSFIVRSEAERTSGETSPHGTENGP

SEQ ID NO: 60874 - protein, 401 aa, Burkholderia ubonensis; identical to SEQ ID NO: 60873

SEQ ID NO: 60875 - protein, 401 aa, Burkholderia ubonensis; identical to SEQ ID NO: 60873

SEQ ID NO: 60876 - protein, 401 aa, Burkholderia ubonensis
MDDEEQIHHNKLPGKTYISPRIYIDAHEALRIASKVIDSDGLHYATVKREVVLRRTEKGRTEIIAKFLESTRDLRVLTIQAFNGQTGAPHKTHFSFVGEEIPKLLAFFENIASVEFASQDKINITDTELRRLFLSKEQAASLVHDNQDIFSEVIRQEITKEDVVALGYRKRQVATFAKLLSEPIYFDQVKAAKGVTGNEALWQAFFERNRWIFGYGLSYFFVTGFDNRKLEQVVEGHDLINRGKRADGLMKTKGIVNSLCFVEIKTHTTKLLDSTQYRPGCWAPSKELSGAVAQVQATVASAMRSLSEYIRPTDAHGAPTGEEVFNFKPRAFIVIGSLSEFITEHGVNKDQLRSFELYRNSISSIDILTFDELFERCSFIVRSEAERTSGGTSPHGTENGP

SEQ ID NO: 60877 - protein, 401 aa, Burkholderia ubonensis; identical to SEQ ID NO: 60876

SEQ ID NO: 60878 - protein, 401 aa, Burkholderia ubonensis; identical to SEQ ID NO: 60876

SEQ ID NO: 60879 - protein, 401 aa, Burkholderia ubonensis
MDDEEQIHHNKLPGKTYISPRIYIDAHEALRIASKVIDSDGLHYATVKREVVLRRTEKGRTEIIAKFLESTRDLRVLTIQAFNGQTGAPHKTHFSFVGEEIPKLLAFFENIASVEFASQDKINITDTELRRLVLSKEQAASLVHDNQDIFSEVIRQEITKEDVVALGYRKRQVATFAKLLSEPIYFDQVKAAKGVTGNEALWQAFFERNRWIFGYGLSYFFVTGFDNRKLEQVVEGHDLINRGKRADGLMKTKGIVSSLCFVEIKTHTTKLLDSTQYRPGCWAPSKELSGAVVQVQATVASAMRSLSEYIRPTDAHGAPTGEEVFNFKARAFIVIGSLSEFITEHGVNKDQLRSFELYRNSISSIDILTFDELFERCSFIVRSEAERTSGETSPHGTENGP

SEQ ID NO: 60880 - protein, 423 aa, Leptolyngbya sp. PCC 7375
MTQSYSFQKTEDCLLLVYCPRDGNSWFLEKFRNEKSINLGQIYSVSLEDVYSADFYADAHEAPDGHPWANQTIQDALSQYDDEIWELSFIVGDRCGEYYRLKQKIFGTSNDIYFADDINLRHSHFSAYQKLSIPRRIDALLQQDLYIGGAHPDAISFPEYERLVRSFPTRREIFHYTNARITNVLRDFFDRVPDHFQRLDRYVTRHVTVRPATTPTAVAKLELIKYQSILDKLESMLAYEDAYTEAQWQNEIVEIVRLLFPKYLFAFREAPIFDDDRGTERSVDFLLVDALGNVDLLEIKKPRSQTIMSLSYYRNNHVPLRELAGTVMQLEKYIFLLSRSGRKGETRLQDLYANRLPNDFILQIKNPQGFALLGRHEGLSQEQSDDFEVVRRQYKNLIDIITYDDLIRRLQVSINEFARLAQT

SEQ ID NO: 60881 - protein, 416 aa, Streptomyces ipomoeae 91-03
MALEWQLEKVAEEAAGQAVKDAMAAVFEHMNGGPGRGRRGGKELVRLLEEARGTAAGAGEWNVVRMLQDSLDYAQGLILRPDFDERYRLTRDGKRDRISLDYLAKTMWVTHRWMVEEGRDYLAEHPDAGMAEFLEHFRAQGEDALFMEAPEDRPGRWVIPRGRAETALWLERILRDGRIDIEDPALAARDIVTSPETLALLAADDKGQLIIQAAELRRRATGLEELRAVVEDPNALERDLQRALEGQHWIFGGRFVGEAAQRRLVPGDEVDIPLIRGDGALRIVELKRAMGLREPLVTRHRNAWVPAAQVHRAVSQAVNYLVGLDEDRSRIRDEFGIETRRAGALVLIGHPALHPDVPEEEITEALRTFNAHMSRVEVLTYKELLDNARRSLGGSGEEGDEARRTGRVPYPLPPEP

SEQ ID NO: 60882 - protein, 207 aa, Cupriavidus necator
MKRRLDIEAGMISKASVSALVDTPSGERELQRLLKSDLSIFGEAYAKPDDEYICFSEYPLADGAIDFVVFTGRSRMDVILIEIKGAEFNLVNSNQYGAFNHKVTEAATQIQRRLGIIFRELSTFRTDAHTRRLRAERGEKLHNAFLGPYWKLEVDPKKDVNIRSVVIGGRTVSDLDESYKRQDYEARFTPPVRIESWDTWLRRLVRS

SEQ ID NO: 60883 - protein, 398 aa, Acinetobacter bereziniae LMG 1003 = CIP 70.12
MNRIIRFSTFEFNYFEGGLPVDEKLSSTGSVTINRVFSFSKLDKFNEEDQCIKFVFGNLNDDYYTIDRDILGISHDLLIYKDFNFTKKNFIASYNISIFRKIDDALNGKEIIIGGEKEDAISIEDFNNLIKNFPNTTELKYYSRIRILREINDYFGGLSEAEKRLKSNLENRIVRRESDNSLYIRDTFKGYEIKKYEFIYDELIEMLNEAESYSENVWQDKILDLLLLIFPKYIKVIKELNVKDFYTDSKRDITRKIDFSLIDCNGNIDIVEIKKPFEKAILTSRLYRDNYVPKNELSGSIVQVEKYIFHLNKWGASGERTINDKYKDKLPSGLSIKVVNPKAMIILGRDNNFSDKHKFDFEFIRRKYSNVLDIMTYDDLLRRVKNIISMLRSNQNNQ

SEQ ID NO: 60884 - protein, 206 aa, Methylobacterium nodulans ORS 2060
MRRLTAHTINPATARHNLNGYQTNLASRASLGETADIQPFFYNRYDLAAMCSYYFPDIRTVDSIAHEFVIYGDFKADMIIGDSALARYLLVEFEDGLPNSIFNKTPKTAPDWAKRFEGAFSQVIDWLWKLDDMRSTGDFQRVFGTRDASFQALIIAGKGMNLSDQEKSRLRWRVDKLRVDSKAVSVVSLDDLVADVDFWLTKYFGV

SEQ ID NO: 60885 - protein, 207 aa, Oscillatoria acuminata PCC 6304
MKSFEAIEFSPSQCAIQLGQFKNLLQKKKDLSERDDILPFFKRRKDLSALLGSLHPKIYKYDRLAFEYNLFGDFVVDLAIGDSTRKSYCFVEFESAKDNSIFVSKTGKTTPEWSPTFERGYSQIVDWFWKLNDMERTDEFENRFNGKNIKYVGVLVVGRNEYLEPRELKRLKWRQENTRVNSKEIYCLTFDELYEDLSVRLNTYLSI

SEQ ID NO: 60886 - protein, 479 aa, Cupriavidus metallidurans CH34
MEQGRLEVTATFNNNEVLNPSFELSHGVDQGVQYRDLYLQTYQRGANDPNVWVAQPREQWHCLARVYPDRLLTYPVFTNPHAQRYLSPKHGPLTSVIFHRKVDEPLPETADAAVTEIDLSLPWKCFSESTYGLGLVPELDEVWRSLSGIPAITAIGVTRSGTSTVTESIAWITVSDLHRFRRNFQRFKRLAREHVHVARRWDVRNNLLATLDPDRFPHMAPAAAAAPLVEYVRTRGRRADVSERAQRQAAVRAVRQELATIATEAPAEVLQLHAEIERVTLARMIDRYATMLEQSLPEPRWQQFFENNLFVLSLVFSRPVRLLHTQFHAQASRLDGTGAQIGDFLFAEQGQALAIVEIKKPSSSLVQATPYRNREVFGPHAELSGAITQVLYQRSAIQSNWLLHRAEAALRDSQPDAIKCIVLAGTMPSDETQRRSFELFRNACKDVEVVTFDELLGKLRLLLQHLTPSSGTTEDTVPF

SEQ ID NO: 60887 - protein, 471 aa, Pannonibacter phragmitetus
MALGFRQHDPVRDGTLEVDEVHPNYVEVYFVPPEHSLLAAKLDPNKARQYRTKLLDINGQHKFLTIHPITTFGDKSDFLKPKYGQVERITLDRTDIIFPGFDGAVPTEPEGVLDVLEKLPSAFTKDYAYGLGLAKPYRFIIDAVEELSDCTEIVITSDQVTGPDQKDAQLFYISKKDFEEARRAMNSIDNLAQTAARAVKESTAHNILAERLGVPKLEPKAGRHPYRKLFTAVAQGKEELSEEDQNAVIGALSSHAASIAEEQPEKLAKLRGDIELVTLEALIKRYEEMLGEKFVEGRWQDFFNENPFILNMAFGYPVIKVRDQASVGGRKLSGEGEKITDFLVKNSLTNNTAIFEIKTPQTAILNKTPFREGVFTPSTDLSGSINQALDQKYQFQKQVAQIKDNTRLYDIESYAVHCCLVIGKTPDGEDRKKSFELFRRNSKDVEIVTFDELLEKLKQLSVFLRAADEEA

SEQ ID NO: 60888 - protein, 389 aa, Bradyrhizobium lupini HPC(L)
MATDEDYIGGYRLDHIYANEFRDGKGKFFNVVTLDDGSTEVEYIQPFPQTRNRVKLTVTFIRDQNDIKEVTLKKFKHYKNEGWQELPWGSGEPMKFSHFTFEKLMAFLQLLTELDLINLKDRRIGLQEGGSAVDPETVQKLKQLLSQDGGGQIIDELLANGMVTSHDIVNLGYRKRQLDVFRGLLREEGYPDLYRQEHEIKSRQVEKIWQHFLARNEWIFGFGLDYKFLGILQDEADIGSADLAGRDAAITDFLLGSTHFTVLVEVKKPGTPLFDSRRNRAGSWALSNDVIDAVSQVLEQKAAWQVKAEANARKNFDRGGALIDQRTVDPKCILLIGGDSAFSGTPQERELKLRTFELFRRDSRNIEILTYDELFERASFVVNNAVKPK

SEQ ID NO: 60889 - protein, 399 aa, Streptomyces wadayamensis
MTETNWQLVADGLGHLYAGPAAEQYAIASELAFPLAPGTPTPVAAALLRAHLAKPLRLREHPPIDEPEYDYLALVASETDLHVPVLEEIGSRDLLDAWLEVAWARRTVQHLERLRPEVGDIAVTVRRRKPEEDRYGQISSISLNGRMNFRGGLGRRAWPHTVKHLAKVGDADHGELLARAREEVAAENRYPERVTNRELALLDKWKVPRRSSLADWRALQEALDSATEERPMQVVLENHPALLANLITGNHGVWVRPQVRLGDQYVSDFLIASQTSAGMRWHLVELECPTARLTNVGNQRESPTLRHAIEQIQDWREWLKTNLLATREKIPGITIDARGLIIMGREDGTDSAREIRDRRSVNDRIEVRTYDWLLRAARRADSMAWGLLDEETGDLEQDW

SEQ ID NO: 60890 - protein, 227 aa, Cylindrospermum stagnale PCC 7417
MKGLDSFTIDLKKCRFELDEFEKLLLNNSELQESKDILPLFKERLHLSAFIGSYVPDIVRFNQIKHEFSFFGDFRADLVVGDSVNNTYCFIEFEDATKDSIFVNKGRSTSDWSPRFEHGFSQIIDWFWKIDDFKNTTSSRSIFESENIEFYGILIIGRDAFISPLDKARLKWRLNKVLVDSRKVICITFDQLARDIRDRLSLYPLIYEAESEAERTISTDESDRTLP

SEQ ID NO: 60891 - protein, 454 aa, Leifsonia aquatica ATCC 14665
MRSYPGELSSIATSGFRTKLPCMPSTPSPQPRWEQIADNLDSMAAGPTAAQIATADALGIPLSRTIPAPVAAVVIRDYLAPVLFQGLGGDAELPDALGDLETELGLTLSAHLITGSRDEVSAWFSARYMVMTSRGLRALMPEPGDVVAGHSGATERRVISSLSSDGHINFKGRPTARAWPNHLVSVARVGSSEYARAVQEVDASLRNAANYAGASFGNFLPLTEYALDGYTPAPEAIRALEELLESGERLEQPFQDLLERYPALLASVVIGNWKTYVIPQPRLGAEHVPDFLVLGFNSLGPHWVTVEIEAARHKIVNQSGRLSGPSNHAVAQIQDWREWLTHNVAYAQTEHHLHGLTNRAPGLVIIGRDSPSSQRQAARAQSEEDARIAVHSWDWLLRNALARAQNPLFPSQFALANLPKQANSESLRPTPVETSGSVFDDDFEGLNIDDLLSS

SEQ ID NO: 60892 - protein, 384 aa, Pseudomonas sp. MT-1
MDNYQYPKPGKSYFSPSLPAFGNKEKRVRIASKVLPSHDGYEYAKERDEIVLRQKPDASTYITAKFIEDSRKVFVLTVQKFMSESGMPYGSGFSFVGDEISKFCEFLANIQAVKLQHGGTINISDEELRRLSLTSQQAESLVIDNEELFAEVLRHSITKKDVVAIAYRRRQLGIFRRLLDEPDFFEDLKTKKKCKDEALWQQYFEKNPWIFGYGLSYVYSSGLDEKRLEQVVRGYHVAQSGKRVDALLKSKAFASTLCFVEIKTHKTQLLRNTAYRSGCWSPSDELSGAVAQVQGTVSYAGETIFGKLPLTDADGFPTSEEVFNFHPRSFVVIGSLSQLCGEHGVNQEQLRSFELYRRNTFQPEIITFDELYERALHIVEASEF

SEQ ID NO: 60893 - protein, 219 aa, Burkholderia ambifaria IOP40-10
MKLTPAREVYEKLRARDPLKDFFSLWDDVRPSDVETLRHVLNTATREEDIQQFLQKNPSLLIQHLGGGHGRWIIPKQRLGSEHVTDFMIADCDSMGFHWTAVELESPLATMFTKAGNPSATLNHAIRQIRDWRIWLSRNQNYAARPRSEDGLGLTDIDAEVPGLILMGRRATESEDTRHMRRQISRESKIEIHTFDFLLDALTGRLASLDERRNWDAAT

SEQ ID NO: 60894 - protein, 297 aa, Aliiroseovarius crassostreae
MQRLEKRIDQRAKKAESEVKDTTVFNALAEQAGKQPRPFRLGRNEIRQLIQNYAADPDFRDPEAQKALVTELGRSARTFAQQAPEATEQLISELELTRLELAIQEFEELMGKNHNENKWQKFFEDDPFLLSFAFGYPLVCVNGQSYVGGRRIDGKGEKIGDFLYKNSVNNNAALVEIKKPQSPVVKRCRDGVFGPHDELSGGVTQVLDQRYHFTRKFPLHQSDNDWHGENEVADYEIDCVLIVGTMPTDKDQRRSFQLYRKNSHGVRIVTFDEVLEMLKNLLVYLREAKPSKRPEKS

SEQ ID NO: 60895 - protein, 454 aa, Hahella chejuensis KCTC 2396
MDLDQLSDYIIKYISLYRSEYEKFTSTPPEGAGYPRISVSPFISAKEFDVFLANNGVVISEVKEEPQHAWFVAGGPAIKVDTEPTSTPEHIIDTLKENNIKGNIGIYRCVAKDYIPTRIWRGRIKNISESRALTHEKLNITLNLTLVKTDLRDLVSSLTFGALGIIIDNYIINKELNLGEPTIIQKFGFFPADLNSRRFFNYLEIYNYSDEIGWSTRNIKLRISNDLRRDFARALSISADEKVHGTLTLGSLNNWIENYTNRLSKLEKAINEFKGILLFQSDDKEETFHKLIENNPILLDVYGSCISKPQLHYPVDHKSPIGKKYLEPDFIVCYPDQSYKLIELERASKRVATVQGHPRAEVSQAAYQIAEWTDFISEHYNEIRNDYPGINSKCKTCIIISRSQQEKFSNIEDMNRYKGQLIRQFRVDEIITYDDLYERVCNAYTTLTGLSPSI

SEQ ID NO: 60896 - protein, 363 aa, Enterobacter hormaechei subsp. steigerwaltii; identical to SEQ ID NO: 60381

SEQ ID NO: 60897 - protein, 171 aa, Acidihalobacter prosperus
MYLLPGLHETTIGEFLKLHPEIIKSAFKTEHFEYEPYLQWLEHDGTCEDVAINPDLLVRRPDGYYDIYDLKTAALAKKNVTKGGRKRRRFIDYVEEGVAQLVNYEEYFTYPKNAKHAKEKYGIEVKEPKLVLVVGSWENSSPEEVKQAQRRYHNIEIIDYDTFCHLFIGAS

SEQ ID NO: 60898 - protein, 224 aa, Vibrio hepatarius
MIKIRPASVESIFEDWPEHWPKKEHYVSQHDVTEEQYFEFESLVNGKVSETEVEKYFARNPEVLALTAFLFSTGHHATWIYPKLELRPSAGDAKGGMIPDYVISGANSDGVQWFILELKGPRQNAFVHKGKRVYLSADSNKGICQLISYIDIASKSQAYLRDELGLKGFREPRGIILIGTEEESEAEMVREFKAAWNRMHPNVQVISYSRLLRKLKQKVFPNYG

SEQ ID NO: 60899 - protein, 376 aa, Desulfococcus oleovorans Hxd3
MSLPPDSTLDDVKVRIRESVKNPNVGKTEQAVLKEGPRAFRLATLFEIMNPESGEIHHYSLRIDSINRKKAGWFYKPEKSVSLEGQNPNEIERLFRFLRAHLEGKLSVTTGDLHIIRSEEYEKLERLIDLIPNLSSPDMVELVKLIIPRIKDAGDYMPKFIEAFECADPQTLDHVAVATRFVKHKQAYDQLKRFVKSGHASESEFQDLLAKNPWMFGSEYSELLDRRTWTRDDNLDFMLRRTSDNYLEIIEIKTPFDEPLFLRDKSHDSYYTSSKLSPVLGQVIRYISEIERSRDSILSKDECDTLKIRARIIAGRDGSPNHQEALRNFNAHLHRIEVITFNQLVRIAGRVLNIFEDDSFSFEACTEDSVNEDIPF

SEQ ID NO: 60900 - protein, 490 aa, Pseudomonas mediterranea CFBP 5447
MPSMRPSQMTFQSRTDGGPFVEFLLFDNEGIPTDDVLVAERGEVYFSDLTEDFETPETWHQILSVSPDEICIYPIHQRGRSANYGTPKHGPIDQILLARPKAHPYRIPTNRDELEGLLSSLPDGFAKDWQIGLGLLWEYRFIIESISDIGDIHTIVIHGEDGSDDAKIHGSSYYLGIDRYSELKRSLDRLSQRHQRETRSDKQLVCYTGLAHAADPIRNPERTKKLPANVLTDLIKLGRGRSQLSTADQKSAVNLVKDNAGAIAKKTPMILLDLKADIERVTLGELVERYKNLMSADAKEDKWQQFLADNPFILDMAFSYPVKVVCERPYVGSKRLNGRGGNYSDFLVAAKSTGNVALIEIKHPQKDLLKTPAYRNDTYGPSVELSGSVAQIINQRASLQREIFQLKEDLEEPAHAYAVPAIVVIGRTPSDRHQRRSFEQYRNALKDVSVVTFDELQRRLEDIHKVLSPSPTASSNLSPSAAAAQDDVPF

SEQ ID NO: 60901 - protein, 63 aa, Corynebacterium atypicum
MSELCSSQGNRIDAKFRSFESFRSNLKSPEVLTFDELVERARWNVELAERQEDAESEVPDFEF

SEQ ID NO: 60902 - protein, 202 aa, Corynebacterium atypicum
MNREGSNKLIDLTRSLASIPVTGEKTSRVDDDVLNRIIADQSELQRLYKRDPKALQALVETETSAAEIKELKNRRDVVSTMQSWLDDHEAFAEAKNVAGGAEKAWQNLLEANPWVLGVGLGGRLCTTWDEGKLEQTVRGANLHTSGKRADAFFASNGLLRSVALAEIKHPDTPLLTRDQYRSDVYGISREFFGAVAQTKKRF

SEQ ID NO: 60903 - protein, 331 aa, Pseudomonas tremae
MIQSRGINHRLSVYGLGFLALEGTPELMGGDRAHQLPLHATNTEGAFKLADSDDELIECYRRLLDDKPPAGRQKEQVVQDFLELHTRFIPTPNLLNHQLHFETILTKFALGTDHISDYCYITRSSGRWRITLVELESPDKPIFNKNEESPVFSSKFHEAISQVQSWKNFIEESKSCVTARFYPLMAMLDNPKSPVEFKYQLVIGRSANKNKNYERKQALHRKEVETEIDIFTYDQLIDYFQVERTKLVMRRAKNDRFELKYMHFHPRKIFAWVGPDTLILSPEQKKELSEAGYEIEKWDNHDLLKYSIKLAESTGRKERLDLVRKVPPLGT

SEQ ID NO: 60904 - protein, 412 aa, Amycolatopsis japonica
MIVNVGPWGEDVDETTYAQGRLPSRTYASASFPISWPNSADNGQPARFVYKVFDPEVETTAELDGEQWLISESPAGRYQVKLLIAREAGNVRELWVQRVPTKGQGKVETKLNLRQPEAGRLVELLRTLECIPADGEQSVRVDDSLVRELFANPESLTRIYREDPSRLRQLISDDESARDVIALSHRRGQLQKFRRLLSDDDYFDAEVGQAPGRRREAVWQRFFEDNPWILGVPLTGQLLTAWNDQKLEQVVAGASVVGVGKRADALLRTSGRIKSMVFAEIKTHRTSLLAASEYRSGCWPPSDELAGGVAQVQGTVHRAVSEIGERLQDVAPDGSDVPGGFTYMLKPRAFLVLGTLDQLVGQDGGHHRDRIRSFELYRRQLHEPEVVTFDELLARAEWHVTMAEDDVEPRET

SEQ ID NO: 60905 - protein, 372 aa, Amycolatopsis vancoresmycina DSM 44592
MPHTDGSRRNVRSDQVTRLLLDCIEEHVADPDVRAGVADLREHLTRSRNRGGKRMLELAGFAHREALAAGDTATADRLDDLIGHATGRLLTNDVTRKYQLYDARETNLHAVDLMASNAHALGAYQAKKYLADHPEATAAELVDHLEGLSELSTKVVEDRERGHYRILRLDTERQVWLAEVLTRRVHPDLDNEVGVFDLSEVELTSLVEAAQLQLRRERLSVIRDVVENPNSTEAHLQQALRGSYWLFGGSYVGEAYRRRFTTGTEVDIPLLRPDGSLHVVELKRANVPLVRTYRSFGLIVDRRVHEAMSQVSNYLTAFDEDRHAIRHEHGVESRRATGTVVIGHPAFQSQFDEQKITETLRTYNAEHARGSP

SEQ ID NO: 60906 - protein, 250 aa, Clostridium bolteae ATCC BAA-613; identical to SEQ ID NO: 60582

SEQ ID NO: 60907 - protein, 250 aa, Clostridium bolteae WAL-14578; identical to SEQ ID NO: 60582

SEQ ID NO: 60908 - protein, 384 aa, Pseudomonas batumici
MDSYQNPEPGKTYISPQLDSFGDKERKVRIATKLIEHPETYAFAKIKNELVLRHKDGAKSCITAKFFEDDRKMFVLNIQGYTVATDKPHNASFSFIGDEIGKLVEFLHHVQSMPLEGRGPKKVTDENLRGLVLSSNQARAMLQDNQELFAEVIKSAVTKEDIIAVGYRKRQLEAFERLLNDEAYFEKIRTSLNCKDEMLWQRFFEKNPWIFGYGLSYIYASSLDDKKLEQVVQGYSISNHGKRADGLLKTRGMISSLCFAEIKTHKTPLLQSRHYRAGCWAPSNELAGGVCQTQVTVSSAVDSIQAKLAITDESGNPTGEEAFNYMPKSFLVIGSLQEFVSEHGINQEKYRSFEMYRRNTSNPEIITFDELYERARFIVTQHDR

SEQ ID NO: 60909 - protein, 406 aa, Methylophaga aminisulfidivorans MP
MITILKAHKALLLLYSPELRPLSEIDQQIEAGESVTVGYCFSFRSQHLLDDHDADQRIFQLGKLEDGYYIIDKNILGLKHDLRLASDLPIERKTFVAHRNISIFRKIDKFINESIVIGGTADGAIPEEAFKSLLKNFPTSTELDHYSGARVAGVIRDYLGTMSDEQTKLDNHLNRKKTVEPVSRIAFLEDYEPRKFQFVRDELESMLKSSDSYSENDWQKLIAEFLLLIFPKYIALLENVHIKDFYSNPNKSTNRYIDLALVDANGTIDVIEIKRPKSNQVVSATPRYRQSHTPASELTGAVMQVEKYLFHLNKWGRAGEKAIFSKHSSELPNNFELRITNPKAIVILGRVNDLNADQRFDFEVIRRKYANIMDIMTYDDLLRRLDNIISMIHHNYSRFSKRGLRQ

SEQ ID NO: 60910 - protein, 468 aa, Pseudomonas alkylphenolia
MYDAESVFNPSFRLVPSLPNEEPSRDLYMETFFNLEEPDAWYPYPENRWHRLARIFPDRIVTYPVFTNPHAQRYLTYRHGRIKTIVYEMKYVQDLPESSDAALTLIDMYLTSRIWNSSNFGLGLIKDLEPICAGLMRVPDLNTLVVTHDDQIKIDRNCARIPERQLDDLRRTFDKANRRLKERIRVAKQWHVRNALLAKLAPSQFPALVQVTSTGEMVEYRMASTKPSPAMERQQRQASVRTVRQNARQIAKDAPHELLNLHAEIERVTLANMIELFEKKLQQQLTEAHWQRFFEDNMFILSLLFARPVKLLHTQFHAQMSGIDGSGAQIGDFLFRELGQPLAIVEIKKPSSPLMQSSAYRNDKVFGPHAELSGAVTQVLYQQTALRSNWLFHQTRLQGSQPDTIKCIVICGTTPTEPEPRRCFDIFRHACKDVEVVTFDELLDKLRLLLQHLSHDKTNNEGDTGKQS

SEQ ID NO: 60911 - protein, 376 aa, Fictibacillus macauensis ZFHKF-1
MEIVLNSTSKDSAMGTDIILRENSLTRLIFRPQIVNNQKDINAPVNGCFIFQKKKKADMWEDFKDFNLSSLKAYEGIKLELKSEEMLKLMTEADAYYKIHREYGIVQGRSFFTKANSQLQKVIEMFKKDSTLFEALLDENKQELVKQTFEWMANTKNSEDIISRLLEVKGNELDKLNNLIGITNIRKLLKVWHDNSDNTDEEFWQRVFTENSWVLSQIFASPMLLFADKAYVGGKGIGNKGGKVVDFMFKNDLSNDVALIEIKTPNTDLLSGKYRQNIYSIHSNLTGAIVQVLGYKETLQREYSTLRGSSDKDFKVFNPMCVVIAGKMDDLEEQKLQSFEWYRKEMKSVTIITFDELFKKVNLLLDLLSGKQEESN

SEQ ID NO: 60912 - protein, 422 aa, Vibrio crassostreae
MKLQVNQLEFGKLRLVVKSIQTVHEGFVTFGTFGLNQLECLRRSGLDWLVELLTTSLVVNSMLSLEVNLSVGSIGKKQAKSGNVGYSDPVTIHETTRSRIDFVPFYITKSQGVELAGKIITYKKNKTPFGWLPVDEKSVSLQAGSLLKLYEAIKSHVAVKDETEGDFLLIRVNDGTAQLAEHDPLSVANALTAVLSQSEIVKHLENADLSDELANALKGSIRLKDMKSAVNQLRNHLNNQENDEKIYQKWCEEYPWAFGNAYVVNDDVRAISPHDHLDLMLSNVIGGFRDIIELKRPNMEVLNYDNSHRNFYFSSEVSKAIGQCHRYMDVFNDVASKGLADHPEIVAYHPRATIVIGRSYDWIPEKHKALHGLNSRLTSLSIMTYDHLLNQGERLVNLLEPNQNPLADSPPVDCDDWLDFEF

SEQ ID NO: 60913 - protein, 422 aa, Vibrio crassostreae; identical to SEQ ID NO: 60912

SEQ ID NO: 60914 - protein, 422 aa, Vibrio crassostreae; identical to SEQ ID NO: 60912

SEQ ID NO: 60915 - protein, 414 aa, Pseudomonas syringae pv. maculicola
MTTTAVEFEDDGEQLILVYRPRDGTDWVLRRILEKGKVVIKGTFHLSDEHLAAHDQLPFEDGAFIDAGLRNPDYFDDPWIAFKIGSRDGDYFRLDPAILGIDVPVLLSKDAPVTWRWFSTDRPVSIFAVIAELKPSRIVIGGSESDAIPISEYEKLIDQFPTPYEVRRYVQARVGTVVRQYSDARVDAESKLNAYVNKRVKAKGKDLFKPVRQAEIAKYEFLLDQLQKMLDSEDGYSEAAWQKKILQIVCLLNPKYIAAFPEVEIPDTDSETKRFLDFLLVDASGNVDVIEIKRPFAKGLVTSTTYRDNHIASRDLSGTVMQIEKYLRHLNRWGSKGEVALRKQIGDKLPPDFKIKITNPCGVIIMGREKGLTHAQLRDLEVTRRHYKHIADIVTYDELLRRLKFILEQLQAES

SEQ ID NO: 60916 - protein, 432 aa, Pseudomonas syringae pv. maculicola str. M6
MPQFNDLTRELTSFIGGTKLGGIRVFHDFSWADKFDRKTFKNGLRLASLIKSDCPLASIPSLILLSGPSVTEGIISEPPNYALVINIDSYIASATPDAAAAYFTLRRSADTRLEITTVLARDSALRDDVVINHLTSSYVMRWIGANPTRAAEIRSLLDHAERELPPANTNLADPAQAVELLNRLEAVPETLVAAMLAVLTRLANGSAEHQNTLLQLILGTTEGRNIAAFEMGNRIAERIQDIRDALRAYEALINNSTTTETDTHEFIIDNPWLLGSDYIKTRHEQPLSRGRVDSLLEKYDGHHDLMELKSPNHRIIISTSEGATASSPTQFKLSLELSNAIAQVSRYLFLLDRDNQFLASEYGIQNAKHPKAFILIGKSSDCSQSELDTLQQLNKSLHRIEVLPFDTLIIKCDAMLAYLERATGFSDTLVEL

SEQ ID NO: 60917 - protein, 434 aa, Pseudomonas syringae pv. maculicola
MHMPQFNDLTRELTSFIGGTKLGGIRVFHDFSWADKFDRKTFKNGLRLASLIKSDCPLASIPSLILLSGPSVTEGIISEPPNYALVINIDSYIASATPDAAAAYFTLRRSADTRLEITTVLARDSALRDDVVINHLTSSYVMRWIGANPTRAAEIRSLLDHAERELPPANTNLADPAQAVELLNRLEAVPETLVAAMLAVLTRLANGSAEHQNTLLQLILGTTEGRNIAAFEMGNRIAERIQDIRDALRAYEALINNSTTTETDTHEFIIDNPWLLGSDYIKTRHEQPLSRGRVDSLLEKYDGHHDLMELKSPNHRIIISTSEGATASSPTQFKLSLELSNAIAQVSRYLFLLDRDNQFLASEYGIQNAKHPKAFILIGKSSDCSQSELDTLQQLNKSLHRIEVLPFDTLIIKCDAMLAYLERATGFSDTLVEL

SEQ ID NO: 60918 - protein, 354 aa, Vibrio ezurae NBRC 102218
MAVGSIGKKQAKSGNVGYSDPVTIHETTRSRIDFVPFYITKSQGVELAGKIITYKKDKTSFGWLPVDEKSVSLQAGSLLKLYEAIKSHVAVKDETEGDFLLIRVNDGTAQLAEHDPQSVANALTAVLSQTEIVKHLENTDLSDELANALKGSIRLKDMKSAVNQLRNHLYNQENDEKIYQKWCEEYPWAFGNAYVVNDDVRAISPHDHLDLMLSNVIGGFRDIIELKRPNMEVLNYDSSHRNFYFSSEVSKAIGQCHRYMDVFNDVASKGLADHPEIVAYHPRATIVIGRSYDWSPEKHKALHGLNSRLTSLSIMTYDHLLNQGERLVNLLEPSQCTKNESNSIDNDDWLDFEF

SEQ ID NO: 60919 - protein, 403 aa, Streptomyces sp. C
MATFRSGFTLWRMVQAARELTEHAGVQRRIDAVLSIMGGLGGTYGKGRPLVDGLEDVAQEALLHEDIEFARRFQRFAAYARGELFLDILENYYDEEARQRSEKYMRRMAAMGAERAVAALDVLCDENPAATATDARALFHGIARSTDYLGLGTGEGGIQLSTKYLKRLQEYGRMEIVLRNLPRPASAEAARMMGDVLADADAGLLAQLLELKARRAGLAALRAAVDDPDSSERALHACLKSQEWIFGGAYVAELTRRQYTPDTILDIPLLRGDGSLHVVELKRANIKDLVIRPSGHLMLGSAAHHAVSQAQNYLRTMDENRQTILAQYGVDTRRASATVVIGHPRYVNGSITSQEIAETLRTYNTHTARIEVITYETLLDSAARMLALSSAGQNPGTHEEPAA

SEQ ID NO: 60920 - protein, 460 aa, Halomonas anticariensis FP35 = DSM 16096
MLMARLFPNDFSPEDLDIEIEEIFPNCTEVFYLPSQADLDLAGRGSEAPRQLRKKIAVFNGKGGYISVYPIYTLPTHPDYLNQKYPQIEEIRLLFDIDIVPYTKDDVLSALEGMPAGFVKDVRYGLGLIKDFRFIISAVEEQTKSKVLVLCDEETRDKDDGRFCLSWGDYDEMRRDCNRITERARKAARISKSAATYNRLAYLLGNEQKPLPIANDSISKMLSIKISDTDKQAAMNLIVGDKSAIEQTDTVTLSRLKNDIELVSLEVLIKKYEELLSKSAREETWQKLFNDNPFILNLAFGYPAIKISGQASVGGKHLSGDGEKITDFLLKNGVTNNLAIVEIKKPSSMLLNKTQYRGAVFSASKELTGSVTQVLDQCYQLQKNISTIKVDSRIYDIESYAIHCILIIGTMPTDENQKKSLEIYRRNSKNVQIITFDEMLVKLKQLHCFLSDDDNSGVAQ

SEQ ID NO: 60921 - protein, 348 aa, Rhodopirellula baltica SH 1
MQIIYIHPGIEKYVRDLGYSEDAVAKTIAEPSSQESVDFTQVPDRYRRQQGEVCSLRYFGSEVVCVTYNIVGGAYEICDFFCLPRKDLPDGDIPCSLARTVFYERFAPSILEWIPVPDLPRVLGRARGKALEYLLEFRAAKSKDVLKLPVIKAIKAPHLEPRSQREKKRGYADILEGYCDEFRDLIEKSPKEETIHQWLANPQHMIFFGTDAEMVWSKIKFGTSFVSDFIVKRDELPYLMIEIEDTSKLFNNDGKRSKRYKDAIDQVQDWMGWLARGNINTFKDENPEMELFTSPHGLVVMGRQSNSNSKKDVRDRWEQDKSKANPQVLNYDEVISRVRKFASRLRKS

SEQ ID NO: 60922 - protein, 361 aa, Rhodopirellula baltica SH28
MPLEFKLEQRLAGFTATSARKDEHVALVSRELLGPQDSDLSDRLDKLQGCLFSKIPSLPAPPRIGDLIVIINHDLTGIAYVDELSLIATIKAARPIEKGQAVFIKDIAKVEAVHLDTAVPDDAAIVVVRSNGWKRSLFFDFGPLHEDNGNRTYDLDKALGQQMTLLFGLPASNAAISTGQARLEGMKQSLDQLVDLLSDQCDDEDTYQELLTSAPWMLGASYSEVVRHQKMDDANIPDFTALRAYDVCHDVVELKQPFLRLFRRDGSFTAAFNDAWNQAERYLDFCQRQRTYLMDQKQLRFENPRCILLIGHDLSVPESEAVRAKESVSRLITVMTYDQLYRHARHFFDVIVAAEDRTYPA

SEQ ID NO: 60923 - protein, 408 aa, Photobacterium halotolerans
MTSKDCVDMKQLVMTFLEMHMKEYISPMYHYVKENPELIKTVPGFLMNPRSISVYLGRTHIGVEFDGPEFITELESGSKIEVKYFDYSVEECNLVEKIIGFEFDSTGPISLPLPPYSEDIIFPTNRGFDKLRELKWNFSAQNSIMGLNVPTPSVMNDRFTRVINAFFFDADESGLITRQIKWLDLIPIEFDSSDPEMDSFGFNLSIYKDLVKPDAHYVYPAPDEFKYIQLPKINRFIELWGNKDSSEVDITNFISEEENQFILSMKFGATAIQSELTCDWQSEDRKSIRPDFFVVQPNGYADIVEFKLPHIPKSFVVGSENRETFSAWLNSYISQTRAYVSFFDDPNNRRWFEDKYGFKVHKPKRYLVVGRRHDFKSDVWREIQSDFRDLEIITFDDLIDGVKAQFYQ

SEQ ID NO: 60924 - protein, 287 aa, Nitratifractor salsuginis DSM 16511
MKKLKELIKNKSTERVIQKYLKSNLHLIAEHYASSENEYIIFSEFPIDEGKVDFVIFTDRSRMQIILIEIKGADFPYLTKSNKTSNVIRDAHEQILERFDFINHNYELFRRKVHEIRQEVEKGEIKYNSLLGSNGFLHVDPNKEIKYRGIVIGGYTTDDILESKKRNQLELDSNLKIQFESWDSFLRKVENKNRIKMTNFISTCSNKSFPIGTRVKTKIAWPSVPIGTEGIVDEHYGNGGIMVAWDLPSQPLPHDYKEFNLEKSVRGILRDGFSESETKYLEIIKRN

SEQ ID NO: 60925 - protein, 312 aa, Catabacter hongkongensis
MTNAIEIIVEQLQKQQKIPLQAKIIEHYPACSSFPETFDLISFSSEGYPRWNPISYLTALECLECSDKEFDNYRDDKRVLTEIQNALLGIPQIKQFKYIEPPDITERRLEIENGMQSLKEVKKFLDSYPSEIELADFLKRDMSLFAELYAYPKDEYVCFAEFPVGDGRVDFALFTGRSRMDVYLIEIKGAQKDLRRKNHYGEFRANVQEGRGQLIERKNWCEHHYGEFRKSVYRILNTVNSDNKRPYHAFPGPKSRLSVDSQKDIKMHYILIAGRTSDDLCDSQKRHKEDYAISYDIQTETWDSWINKLIRK

SEQ ID NO: 60926 - protein, 348 aa, Roseivirga ehrenbergii
MGVLENLTEDLKRYQTELAKLLNAIPKEKITELIENIPSDLSMGSMILCSCQDGFLVFIKNQFNHKYSIEYQDEMQKMMTEVFDERSKEIFTFYDPLTLFVSFGHKVQFGTQPKDQFKDNVFVLLVEDIPGSRLYPEYSKILLIGSCFYENGDFNPLEMAERDFQNALSKKNLKSKNRALDVLSKFEVLIDNAQNEEDIQKFLNDHPYIIQPNYESVLIKPKISNKYVADYAFSIRKHGTLDWTFVEIEASSKKIFTAKSLFRTEFTQAKGQLLEWDDYIAQNIKFLKDDYPSLHKPNYTLVFGRNSEIDDYRRGILRSEFGNSSNRNFSTYDDLIENFKALIERLNF

SEQ ID NO: 60927 - protein, 270 aa, Roseivirga ehrenbergii
MLYDRDFNILTENETALSAKAENYKRNNLGKLGELTPKVISKYHEIKPQAMYHYESLFPNNYLHPDSLDDKNELRKIEQEFKNLLNSDISERKILNYINENKHYNLIASLFHAGYTFGHHGAYLFKEFEFPTTYKADYLLVGKNSNGYHFLFIELENPTGSITTNDGAFGLTIRKGIKQVKSWDKWIESNFHSLVLTFEKYRNPRIDLPNEFRALNKTRISYAVIAGRRADFNDNTYDEKRNLFRKENIQVLHYDNLIDSFHLFQTTNNY

SEQ ID NO: 60928 - protein, 339 aa, Kosakonia radicincitans YD4
MSIDHSYLIGSDGVNDLRLNISGLDRESQDISNLKVSIFAYCSTTAAPRFTCQLEIDHLRSLYQHLSQYSVIRERTSVTGNFVEVRNNQQEIMQLLEHAESTSLIMALQHVINNRLTNDDINTILGRKDALCEYQRMFDSTDGHIEPEWQSFFENNEWIFGYGLRYKYLSILQREAHISHTDLNGSNDVITDFLISDSRFTKIVELKTPQTSLFVNRQNRADSWRLSNDLTDAVSQILAQKANWEIESQRDNYTVEGDIINEKTYDPECILIIGTLKDISGTEREKIIKRKTFELYRRNLKNIDIICYDELLERAKFIVRSAEIIEEAIGEALTNNSYL

SEQ ID NO: 60929 - protein, 286 aa, Amycolatopsis rifamycinica
MVNSWTPRPDFSGFDLRPGASRWTCEDTGIGELHRFLSDRFGTPEPSAGPDAPLAAVIRKVQTGEADAGQLAQLAEALADAPNAAGILAAHGAGQVLLDGIQAAKQRDVIAALSEVVRDPAAKENEFQRILEESWWMFGGRFVEKAKRRQLTVLTQLDVPLIRADGALHVVELKRACVPDLVIPHRNFFVVGPEVNKAVGQSLNYLREFDEERNTIQQKLGIECRRAFATVVIGHPLHVPDPRVREQVPETLRTYNAHLGRVEVITYADLIQGAEKAMELAPSAAG

SEQ ID NO: 60930 - protein, 392 aa, Catenulispora acidiphila DSM 44928
MGFRSGFTLVRFLTAAREMTSEDLVRHHIDAALAYTNSDRSKYQRGRPLVNHIEAASRAAAAMDDNALAERLAGCAEYAAGTIHLTLLETRWDPEARASHEKYMRLNLEVGLVRCAEILDEYLKDQPHASGHEMHQWLVHVTGAMGAWTIGEGRLPRVKLPRYSAEHLAWFRDIRLVLNEQPDSSDLTPEIAEQLANVPGAELVARAVQWHKRKGALDRLRAVVEDPASSEKEIHAELKQQAWIFGGRYVDELTRRRLTTFDELDIPLIRGDGSLHVVELKKANQRKLVTSTRSHCAVGSVVHDAVMQAANYLRSLDENRAAILADHGIECRRASATVLIGHPAFVEEAFRANEISAALRTYNTVLNRIEVMTYAELIDAAERSLALNDAEM

SEQ ID NO: 60931 - protein, 396 aa, Mariprofundus ferrooxydans PV-1
MNSKTARIDKWTKRDFIEIPFTSSNPDFTKDDENVSNYLTRVKKRYKGKEDTEEIYNLFSQSGIIKAARELIYNVKNGAPVFHVIGYSFNVSRATLELGHLIDIIIESTDEKEISEEIKNTLAIASIEEVPVYPNIEELAEELSRHYRDMMIEGFEAPDGKGGKMRLKLTKSPGRKIETIHYLNDILLNEPRHPSELTLIRAAVQKELGKLNKANQLISILELAINELDELLKAKKRNENKLQSCLTNNPILFGLEYQKIIPKYRLGSEYETDYALERYSGIIDVLEIESSNLQVFNKNGDPSQYLTHAEQQVMDWLQWIERNHPYARESLPGITRPVGFVVIGRSNKLDKKLKQKLLHRNTMFRGNLEILTFDDVLQKAKTMLNILSGTKSLKKA

SEQ ID NO: 60932 - protein, 396 aa, Mariprofundus ferrooxydans; identical to SEQ ID NO: 60931

SEQ ID NO: 60933 - protein, 394 aa, Mariprofundus ferrooxydans
MLRFIHDNERLLLEYSPDQDIRWVDEKLANDESVCIAKTFIFDSSHLVDDNEVESRTFVLASVQEGYYQIHRDILGLKHDLLISTEIRVDRKTFIAVRGISIFRKIDALIDEQIVIGGSLDNAIPEEEFERLLQNFPTTTELNHYADARIAGVLKEYLGTMTDAQTKLEHFLKRKKTIPVQSRVKALREYEVEKYTYIRDGVKEMLEDANAYSEAEWQKTMADFLLLLFPKYVAVLQNVHIKDYYSNPSSATDRYIDLALVDANGNIDIIEIKKPFENCLLSVRTYRDNYTPKKELSGAVVQVEKYLFHLNKWGREGEKQLNRKHAASSPDGMAIKITNPKAMLILGRDKDFTDEQRFDFEIIKRKYANIMDIMTYDDLLHRLENIIAKFEVTS

SEQ ID NO: 60934 - protein, 268 aa, Nostoc sp. PCC 7107
MSDIAIEFQELLNRDDVTEQNCQDFLEKNTELFYTPFLLNHHVHFSSIISKFPLDTSLVTDFVFLTKSSDFWHIVLVELEHPNKKLFRDDKNKIIPTSDMTEAMSQIHSWQEFIDKNKNEVLRRLNPLILPIPLRYNPIFFKYLLVIGRSEQKSVNQGMRDRLASLCNNDIIICTYDSLISYYKHSPKFKKNVLKLSKKYFEIKYLHEEEPLLFASLLPENLKITPEQKSLLIGRGYDIEDWEKGKLLSYNGKMTCEKWKTYKKKQKK

SEQ ID NO: 60935 - protein, 413 aa, Cyclobacterium amurskyense
MDEEKRIKKNHIETIQFLVNKIGKKYWLPLYLYLKEHPKLLKTFSGFLLYNEKVVFYLGKTHLAIEYFGNERVDKLKESFETSFLLHDYSLIENDFFDEIIGFSYDSSSDSFKPPLPLFLEDLIVPTNRGFDKLAELNWNFDAQNAIYFFNSNGISILKGQFGRIINGLFFDADEKGLKTRHIKWIDFIPLQYDDSGEGHDFFSINFGYYDKLVEQDAHFVYPLPSLDDFKFSKLPQVNRFIELTGNSRTSEPEITKFLEQKENKFILTMGFLAKEIHGQLKCEWQSEKRDPIIPDFFVVRPNGFADIVEFKLPDLDGRPVVGKNNRETLSAKFNSYISQTRNYKTYFEDPNNRKWMLEKYGVKVQKPKRILVIGRRWDFATDEWREIISDYRDIDIMTFDDLVDGVVAQFYM

SEQ ID NO: 60936 - protein, 351 aa, Gordonia soli NBRC 108243
MTDEETLKASLRRWIRGSSNPRVLWRDGIGLKARGKSFKSATLSYFGNNPESPSGRELTLVEVPREEFGPGYDFENATTTFKLRDNEIEVLQKFLNGLLADEGHYVRVGDKSVADALADSFIQSGQNDRTLMNIFAAVSKNPELAMMVSRQPEALALSSKITDENHKDVIDRLDEMARRESPAASEKEFQKLVEKNSWIFGGRFIEPIRRRSVTVLDELDVPLTAVDGSLHIVELKRSDINRLFVKHRNHWIVGKDIHEAVSQVENYLFALDSAGDNIRATLNLDVYRAIGTVVVGHLDQCTTDVTREEAYRAMRIYNSHLSRVRVLTYDQLIANARNAMALGVVGAGDAV

SEQ ID NO: 60937 - protein, 297 aa, Sphingobium japonicum BiD32
MGLPKSLSCELEARLAEFDDLIATPKANENAVQAFFEANTRFMPTPDILNHRVHMNSVIAKFPIGERSTDYAYLTKSSIEWRLVLVELEDSSKPIFKKSSKNEAFSTEFNDAVAQIDVWRDYVSQHPDRLRDKLRPLMVPAPMAQHRLSVRYVLVIGRSAEFEHHDARKMRLASYGAERDLTVMTYDTIRREVAAGYNKPKAVLRANSRGYRLQSAEAVPTIMFAHMKPAELELSDVAEAALRAEGYDIDAWKRNEPLVFNDKWTRDSEPALYESMHPAVQKFIARQKKSGPGGGSD

SEQ ID NO: 60938 - protein, 395 aa, Aquitalea magnusonii
MAFLQELFKNYWSPLYSYLKENPELIKTAPGFLLDHEKIIVYVGRTHIAVEYTGSEVVNELKNKGKMELQYHDYSTRECNLFEQIIGFKYDSALDFSMPLPTFSEDLLFPTNRGWDKLSELGWNFAAQNSIMGFNMPSPEPMPGQFVRIVNGMFFDADESGLKSRRIKWLDFFPIHFDGSDENVDSISFNLVMMNDFVEHDAHYSYPMPDDYKFIQLPKINKFIEIWGSKESTETDITSYLAKKENEFILSMKFGAMKIHSELTCEWQSEERKDIRPDFFVVQPNGYADIVEFKLPYVEKNTVVGSGNRETFGAWLNSYISQTRVYSTYFDDPNNRRWFEMKYGFKVHKPRRWLVVGRRNDFDSNVWREIMSDYNDLEIMTFDDLIDGVVVQFYK

SEQ ID NO: 60939 - protein, 451 aa, Roseivirga spongicola
MAFKKTVQEKLQTKLNTLAQYEAISDNESLYQVGDDVLLQVSDTELVYGKTRFSPTSTSPLWEDNYSVTLVLSHKNLTLVNSNPINPPKGAKNVFEVFKSLGNTIERIYIGHESNSINGNEIYITKALYETINRINREEGKDKKVRVFNRVVPYMNSEFGLDTTEIEVERDYSLLLDKILASGEFTQEDIIAFTDSLESGESSKVVIEKHINKQTEWLIDTIEEILDIDRLTKPKVKEIGSDKFKYTKVSITGPEHLMEKVLSDYGQYSIFGVPALLNTDKYVIHEGSSRSQFDLILINHLGDIEIVELKRPDQYLFDYGNGRGKFYPSKDLAIAISQTERYITAIHKDNDDEYLIVGKKIREFINDEIGNTMFVESIRPKALIVIGSWKKLSKDYDQLSDSVKAKVSKEDYDNDCLQAYKELQHSLKNIKILTYSELLENARTRLELNKE

SEQ ID NO: 60940 - protein, 251 aa, Rhodococcus qingshengii
MSEIIPEDPCDEPNVDDVSLDEDEWAAILQDHKDYEARKARQAEAELSLTEFSVTWDTITPDDVDEFRRALHDAKDERDMQKFLSSRPHLLVQPLAGGHGRWVIPEKKFGDHFRSDYMIAENSSLGFEWLAVELEGPQRQMFNKDGRPNTWLLHALQQIDDWRGFMESNLQYVRNPRHKDGLGLVDIHSNVRGLVIIGRRHETPPRTNATRRRLAATHNVDIHSWDWLVERAQMRSDELEGGRRRRAEESD

SEQ ID NO: 60941 - protein, 283 aa, Methylobacterium oryzae CBMB20
MQLGGDETRRLADFLAASGSGSVPSDTGGYIVMPTKGSPADVIRALQDLTATDRMDALAMLLREASEKPAILGDLVSRLAADERFIEKAAAAMNLAVYRQVLFRLETMIDDPTVKEGQFQALLEEQPWLFGSEYSCILDRRRWTRDEITDFVPRRTTDGRVELIEIKTPLHGKSLFNWDASHKVWAPGVELSRVVAQAENYLEKLDRNRDGILANDREDVTKMRARIIIGRDRDDDQRDALRRHNGHLHRIEIITFDGLLAIAKRVLRYFEDAPAEQCVVLGT

SEQ ID NO: 60942 - protein, 221 aa, Asticcacaulis benevestitus DSM 16100 = ATCC BAA-896
MARFEIKPARWTEEDERRAAAEFPGSCYGNINNLNKDHFRDFQMALEDGNEESIHRAIEANPYLLQYVIPESGHHGTWAYPKRTIRTSSVDGRPGLIPDFLVANRNSLGLYWWIVELKRPDVQFSNARGDGYSTDGHKAIAQCAGYYAHFLNYIETVRSNTGLTHLASPKGIILVIGNSQTETEAQQRCRAEFEGLGDKVRVATYDRILQGATRDRKDWFV

SEQ ID NO: 60943 - protein, 230 aa, Asticcacaulis benevestitus DSM 16100 = ATCC BAA-896
MGKARKLRSTDFERTELFCRQPEIMSLLLPFKLDLQAAEAELSSFEAWFSTVGFVNEKIVVDEIKSRPHMSILIGTIGNVVVPDLYKWELGLGGLYRTDFVVGNNNLRRFLLVEFEGANEFSLFGKKGTAQYRNWSPELEHGFGQTVDWASYHSYHKTDATLESNFGGPIKSANYLVICGRDKGIVGPLEHQRLTYRREHVRVEGIQAQVLTYDEMLVSLKQTLEMFKTV

SEQ ID NO: 60944 - protein, 404 aa, Micavibrio aeruginosavorus EPB
MIKIRKKKNSLLLEYSGDESSWVYEKITNESKVTIRKIFTFKNQDLLAENKPSDGSEHENYNNISFALGKMEGDYYKIEARILGLKHDLFLATDMRIDHKIFIAHRDISIFSRIDELISEPIVIGGNRQGAIPIEAFETLLLKFPNSTEVTHYARSRISMILEDYFETMTDAQEKLKKHLQKKPLSYSLERSLISNIYEYEIQKYEYIRDRIEEELGRKSTYSEDNWRDLMLHFILLIFPKYVAVLRNLHLKDFYSKKDKTTNRYADIALVDVNGNIDIIEIKQPFDNCLISNKAYRDNFLPKKELAGAIMQAEKYIFHLNKWGIDGEREITKKHANILPHGIELKITNPKALIILGRTKGLTAKQTFDLELIRRKYSNIMDIITYDDLLCRLNNIIEKLKNSP

SEQ ID NO: 60945 - protein, 477 aa, Niastella koreensis GR20-10
MARPYPSRTVQPNGELEFNEIKPGFFRAFFTPPIEALPSYVSDPKNYKRPIFDINNTEKRLILYPYQVWGMQPMTNKYYNLVIISVDMENQYIPKTVDIDDFLIGVLPSAFLEDYNYGLGFRKSYRHIATILESFDIKELWITRKGKTDIDIGAKKAFIKRSDLDELCRAIDNIGQRVQKVAASLKRNVVDDLFARLLADEKSESALILNSAQIARKIGISTRLMPGGATKKEQMEAMEVLRMNGKKIVQEQPSELIKLRNDIELVTLDELIARFEVMLNKTLSESHWQSLFDKNPFILNMAFGIPIVKVQGQAFVGGRKISGSGDKIADYLVKNSISNNAAIVEIKTPTTKLMSTKEYRSGVFAPSIEITGAINQILDQIFMFQKEINSLKAASREYELESYSVVGILIVGKSLTSPDEQKSFELFRGNSKNIHIITFDELLTKLKALHNFLTLDRSPKENMTNQSDFIDPEDLPF

SEQ ID NO: 60946 - protein, 394 aa, Leeuwenhoekiella blandensis MED217
MVEIEKIDSKLVLKYYSDYEPTEWLDKKLETLIPFKIKHIFNVGSKSLLKKIENEFQESEYFFEIGELMDGYYGVYREVLGVSNTFFFHKSLDIKLDYFFVKSKSSLLLQIDKHLQEDIYIGGPKETILPIEEFEKLIKIFPTTHEITLYRQAKVTSVLKNYFDYITDKEESYQNYLNNKTPNYGSNLRKTFREADIVKYQTLLEKLKEMLSNEVKYTEHQWQAEIIEIILLLFPKYIAVFDEVKFKDIYNNKTRRLDYGLIDFMGNLDIVEIKIPFDKNIVSANPYRDNHIPNKDLSGTIMQIEKYIFYLNKTGANGEKRLTEKYKDQLPEKLKIKITNPNGMIIMGRDNNLTESQLSDFEIIKRKYKNIIDIFTYDDLMRRMEIMLAQLERI

SEQ ID NO: 60947 - protein, 250 aa, Roseburia inulinivorans DSM 16841; identical to SEQ ID NO: 60582

SEQ ID NO: 60948 - protein, 398 aa, Roseburia inulinivorans
MSEKTIRVKKEENRLLVYYSPSINFDEIVRNIAYGTLIKGTFWVTQDNLVEVNEEEEYICFRIAGTEGTYYVLDKKVFNIENSIYVDKCLDITDKWFITYPHNSIMRRLDNLISKKLYIVESDDGIENHLPGSAFLGLVEIFPNAYEVNKYVNARIAYLLSNYVEGVWKHKESYEKYLEKKETHFSLVDNQCIKLMGYEMYRKAFENLERMLADPEPYSEKVWQEKIYEIICVLYPKYIASFREIEIGNDGRHSKKPDFILVDSSGFVDLLEIKKPNNQKVVSSTEYRNNYVAGRDLEGAIVQIEKYVYILNHEGEARAKKIRDKIAGGLPAGLEIKVVNPQGILLLGRSRGLTKEQLFDFEIIKRQHKNIVDIMTYDDLLNRLKNILKQMEADSNCI

SEQ ID NO: 60949 - protein, 423 aa, Flavobacterium aquidurense
MSDFKGEKLINDLKTKEVYEYVDTENKIKQISREVFKNKDEIIHYPRGFEGGEKYKTIRKFIFRGFNGKLPVGVFKSVTYGWGFTKPLYPFSDYINKCNFEEVIIEKGGKVAFDVANKKLYLSEVSLEILLQSFNVIFKKNKAEIELVLNTNLYNLFPSVISKPEQTYIANALASSLSSWGNSIDEFSDDDKNAIKELFDKLSIGTDFLTKDALAKTKEIVDNKYIQETLKKYKILMGLKTDGDSLEKQWQEFLKDNSWIFSSIFAQPVILYKREAYVGGKNIDNKNGKFNDFLIKNSLSDNVSFLEIKTHKTKLLDSSKYRGDDVYNATKELTGCIVQVLNQRDNFQKEFYAIKGKNKDKQNFETFNSKCVVLIGSTKDLDENQSYSFELFRSNSRDVEILTFDELQNKIESLQKVLNKKNK

SEQ ID NO: 60950 - protein, 285 aa, Granulibacter bethesdensis CGDNIH1
MRTDPEPLRDLRYPIPALGDLGHRVTLEGITEIRLPHHRLLSSKLGSKASRNLGAPHKAIGATGSLDTEELLEAELAKYQLIRDTLRGWLAAAEVRVERDWQQLLMKFLLLIFPKYVAILENVQIADVYSTPGRARRRFIDIALVDAAGNLDVIEIKRPRGGLLAGGDYRENGFPSRELSGTIMQAEKYLFHLSKWGLDGERVLTERYAAKLPPGMSIRVTNPKAIVILGRDPTGGVGGEQAVDLEVVRRKYANVMDIMSYDDLLRRLDNVIASLRSRIDEETDI

SEQ ID NO: 60951 - protein, 285 aa, Granulibacter bethesdensis CGDNIH2; identical to SEQ ID NO: 60950

SEQ ID NO: 60952 - protein, 387 aa, Caulobacter sp. K31
MSDHDDHEFFKLRKDGKTYLSKVFQWSGQTAERIRHVRMVFEGSDEQHLGEIEGALCLRLTGETRKTQVTALVSQDANEIKRLTLQTFKARPGFTQSFVKEEFTFRGDEFERLLGFLNQIKFVDLTNEENFQIEDISKKAGPKAVIDASDRGIIDAIQGLSGNQRAGLLRNLQGSLTSDEINTLLGRKEGLAEFEQQLSSGNWSEASWQDFFEREQWVFGYGLDYRIMRHFDREMVVGGAGTDNQNKPTVDFLTTFTDYTVLVEIKKPATPIFKRRAGGRAGTWDFSSEFMSAVSQILEQKAEWLAFSQQGDHYNKDGTERLEARTRSPKAILVIGSRAEFDPVHGVRDARVKQDTFELFRRETRSIDIITFDELVDRARFITKNTR

SEQ ID NO: 60953 - protein, 414 aa, Gallionella capsiferriformans ES-2
MIKITKQAGSLLLAYVPDRFNSVQWLDEKLRQDGEVTLRRTFTFTTGDLVSQAQQADDEDGAERIFKLGTTQDGYYRVNKTILGLKHDLLLEKAMKLEPRIFVANRDISIFRKIDELIDEQIIVGGENEGAIPLIDFELLVQTFPTSTELTHYARSRISRVLKDYFGTLSDAESQLNSYLAKKKRLVATSRNSILGNFELQKFEYIHSELEGMLKDVDGYSERDWQKKILELLLFFFPKYIAVLEEVHIKDFYSKPDKTTPRKIDLMLVDANGNIDIIEVKRPFDNALLSRNTYRGNHTPRIELAGAVMQAEKYLFHLNKWGQAGEREIYEKRKSELPDGIELKITNPKALILLGRDNDFTGEQRFDFEIIRRKYANMIDIMTYDDLLSRLKNIIVMMKRNVSAPNGDRRDIDD

SEQ ID NO: 60954 - protein, 416 aa, Paracoccus halophilus
MMNFAKTSDGWYFEYQGGADENAWVWTELKNDGSTTISKIFNFVRSDLREPPDDTTDMDDYVYVFDFGKIEGEYVRIPGRMIGSENDVMFPTGTFFKRKLFAAERNISIFGRLSKLLDHRDPIIVGGADPKAIPMEVFEELLRKFPNTYELNRYADARVHTILSTYLDGMKDARGMYEDYLNKKMVVKGGLKLETADLKKLEIEKYVLIRKLINDALENKTDLAEEQWQIYMLSFILLLFPKYIRVLENVTINDYYTREDGKKTPRYIDLALLDANGNLDVIELKKPFDNKILRKGQYRGNNVPTSELSGAIMQAEKYLFHLSKWGIQGERELTKRYAADIPEGMKIRISNPKAIIILGRDTTFGGDMTDGQRLDFEVIKRKYANMMDIITYDDLIRRLDNTIVALGGETVIAKKT

SEQ ID NO: 60955 - protein, 429 aa, Brevundimonas sp. BAL3
MTADNAVMSLLTYDEANDRLVIRPHTTLPGYDFLQPKYDPLLAIELEGFGLFEDWLDESDDDPWNVLDRLPSGFIKEPDFGLGLVKDLRFIPSVIETAPGVTRLIVSKQRKTEIKGSDFIISWRDFDELRKAFNRVHTKAVTLANRDKGILAHNTLLTAAAPELYPEKQRPYEPDTVFKVVGASGGAGLSKSDRRAAVDVVAGQAKALAKDDAPALMHLQREIELVTLEGVIERFSTLLAANRSEQSWQNLFVENPFILRLAFNLPVVAVGDQISVGGTAFSGAGGKIADFLHKNGLTDNLTLIEIKKPSSPLVGSQYRGGVYPPSIDLSGSVTQILDQRYQLQKALPGLKDASHRWDLESYAIKGVVIAGRDLEDKAQKKSFELYRNNLHDVQIITFDELLAKLRHLLDFLSRSPTDAALEAVVLPDL

SEQ ID NO: 60956 - protein, 216 aa, Cyanothece sp. PCC 7425
MITLSPSKLDINQCDQQIHELQSFLTANSEIEETGGNGLQKFFSDRPNLILLLGSWSYGLVPAFYGSEVSLFNEFRADFVVASVSHNKFVFIEFEDAKQDSIFKLKSRGPANTSYEWSNRYEHGLSQVIDWYYRMDDYERTNKFEEYFGYSQISYTGLLVIGRDQFIQQTGLMKRFRWRSSKTIINSRPLHCMTFDQLLAESREKLSTLKADDQLE

SEQ ID NO: 60957 - protein, 405 aa, Actinopolyspora erythraea
MSGVKIRADAALEWQLELTEQEATAPEVKQAVAEVIAHMRSGRGRNRRGGQALLRLLEQARLRASEENEWDIVCLLHEAHGYATGRILNPDFDERYRLIKDGERNDSLQNFVAGTLNSALKFVSEAGSEYLAEHPEADTSDLLHYVSTLGEDAQFLDAPEETPGRYRIVRGTAELTLWLQRALSERIDIENPKETAQRIAMSSEKVEALAKDPDGQAILKATELKQRSDTLTELRKLVDDPTTGEEALQELLHQHPWIFGGRFVDAATRRRLVDGEELDIPLIRADGSLHVVELKRALRSSGIIKRHRNAWVPTAEVHNAVGQAINYLASLDEHRQRIRDEFGLETKRASATVVIGHPKLHPEVAERELNEALRTLNTHTNRVEVLTYTELLDNAARALGDTPTP

SEQ ID NO: 60958 - protein, 359 aa, Chryseobacterium luteum
MNLREKADYIENHGSFDDLNDFIFELYSKNDIEAIDIIIQLATSNYGGETYKSELQYTALAAILHWGVVGIQKLGIVVMSSPYFSVKKNTVVFLAHISSKSLDQSILIQSRLDCVKFVNVFNDTHKSSDLVLESRKVMIEIITTHKGDILPIEFITALQSYYCAEAQEHIFIALISRWFKFSRSGLSQFYDLINSPDINNEATFHNFIKKNPFLLEPFHAKIWSKPRFGEALVPDFLVQSMDNNYTVIEIEQPGFSIMTRAGELSAQTTHAKRQALDFRSWAIDNRLYADQQFKGIYRPYCLVVIGRESDLNELQARRLRQENESTQGVLRIVGFDWLYNRAKTTLENMLISGFEKNDE

SEQ ID NO: 60959 - protein, 507 aa, Pseudacidovorax intermedius
MASTPEEDSDDDIDGLSEEAGSGPERPESEQECAVSLGVVEIGDQELAEVFAHGELDGEAGVQSERQVLIAHVSADQIIMTPVVAASYRDDFLGPKYRQIRRIRIPGEWEVPKDVYGFDELLEQLPIGFSRHARRGLGLRFEHRLIIEAIEEATDATELLLVEGDAAFISGDTFTLGLRRFERARKALDQIGRRSQRRALEDRRMLAHNEVVHPADAERFPQQERQPQPGEIYKLVQLSLREPTRSQNDRSAATDLVRRDVPQIARENPRALLELRSEIERVTLAQLIERFDENLRRDPDERIWQRFFEEHPFVLAMAFPYPVLLVRGQAHVGGVTMDGRGESIADFLFRQRLTGGVALVEIKTTRTRLRQTNPFRGNVYAAHTELCAAISQVLDQRSELTMNFHARARSPGMEDAHVGHVQCLVIVGRDPDSADKRRSLDLFRHATKDVAVVTFDELLEKLRGIHQLMSPLGAEARGAIRPESADGKAGAVPPAPDAPLAPTAPTE

SEQ ID NO: 60960 - protein, 295 aa, Agrobacterium sp. C13
MESLIKDKYIEGFKELLSKTGRQENAIQAFLEQHTTFLPTPGLLNHRLHLNSIISKFPIGERIADYAYLTKSSDEWKLVLVELEDAGKKLFTQSSKHVGFTAEMNDAIAQVDVWREFWNENRRPVLDSLEYLLVPPGMRRNAVSLECVLVIGRSAEKDNNDARRKRLAALRADKQIQVMTYDTILRAVGAGFGEARAILTKTGAGFRLRSVEGLPNNLFTYLLPEHLSVDPAAEAALRAEGYDMDAWFANYPLIVNEKWPDRGAWKRAEEAGMHPNVVRLLKSSEERRRTSGSAT

SEQ ID NO: 60961 - protein, 244 aa, candidate division TM7 genomosp. GTL1
MINFLQGVKNIDIPQQVYSLVQTADKAFVDRVLFSFNTSEARQLLIDAKKEDVKNLYAAVRHAKNKKALDELQELIAADATELRFQEWFEGNTWAFGVEYIKIYKTSRIGIHSDSDFIAQSLDQYADLIELKRPNTPLLIHDKSHNDYYPSGELSKAIGQAVNYLHAMEGSRAELQEQDGITVLKPRIKIIAGMINGFTPQQKKALRLINNGLHGIEVISYDQVVTRAQKLIAIFSPIIENSDQ

SEQ ID NO: 60962 - protein, 229 aa, candidate division TM7 genomosp. GTL1
MINFLQGVKNIDIPQQVYSLVQTADKAFVDRVLFSFNTSEARQLLIDAKKEDVKNLYAAVRHAKNKKALDELQELIAADATELRFQEWFEGNTWAFGVEYIKIYKTSRIGIHSDSDFIAQSLDQYADLIELKRPNTPLLIHDKSHNDYYPSGELSKAIGQAVNYLHAMEGSRAELQEQDGITVLKPRIKIIAGMTNGFTPQQKKALRLINNGLHGIEVISYDQVVVTYH

SEQ ID NO: 60963 - protein, 99 aa, candidate division TM7 genomosp. GTL1
MLKIFTQPCGTPKIKALDELQELIAADATELRFQEWFEGNTWAFGVEYIKIYKTSRIGIHSDSDFIAQSLDQYADLIELKRPNTPLLIHDKSPKNYGIL

SEQ ID NO: 60964 - protein, 233 aa, candidate division TM7 genomosp. GTL1
MTLCEVTLIKKDDKFTPRLRFWKKNRQSGKQATAKADETNYRLIKAGVALDDCHENFWLLINFLQGVKNIDIPQQVYSLVQTADKAFVDRVLFSFNTSEARQLLIDAKKEDVKNLYAAVRHAKNKKALDELQELIAADATELRFQEWFEGNTWAFGVEYIKIYKTSRIGIHSDSDFIAQSLDQYGKELLCSKLGFFAMFWWGYFEEGCWRFAQAPEAQYPLEGRMGWLKNPAI

SEQ ID NO: 60965 - protein, 358 aa, candidate division TM7 genomosp. GTL1
MVDSLYSYDPTEFFVGKDDFGKLTVRDSGTNGFHYFYSQPRGLIKQFVLEVKPKVMTLCEVTLIKKDDKFTPRLRFWKKNRQSGKQATAKADETNYRLIKAGVALDDCHENFWLLINFLQGVKNIDIPQQVYSLVQTADKAFVDRVLFSFNTSEARQLLIDAKKEDVKNLYAAVRHAKNKKALDELQELIAADATELRFQEWFEGNTWAFGVEYIKIYKTSRIGIHSDSDFIAQSLDQYADLIELKRPNTPLLIHDKSHNDYYPSGELSKAIGQAVNYLHAMEGSRAELQEQDGITVLKPRIKIIAGMTNGFTPQQKKALRLINNGLHGIEVISYDQVVTRAQKLIAIFSPIIENSDQ

SEQ ID NO: 60966 - protein, 134 aa, candidate division TM7 genomosp. GTL1
MQELIAADATELRFQEWFEGNTWAFGVEYIKIYKTSRIGIHSDSDFIAQSLDQYADLIELKRPNTPLLIHDKSHNDYYPSGELSKAIGQAVNYLHAMEGSRAELQEQDGITVLKPRIKIIAGMTNGFTPQLGEV

SEQ ID NO: 60967 - protein, 267 aa, Ruminococcus sp. 5_1_39BFAA
MNLYKRDYIKSVPTKQEMQLYEGILCTERKAVGDRGFGKINHRRLYPAAVRHYDSLFPNNHIELFDFQNEGNMEQLNEEFCALIHDANTNGRNVLRFINHRPAYHIIAGVFKYYNFGHHDAYVFPEFALGKYIADYLLIGKSSGGYEFVFVELEHPNGRTTLKSGHEGETFRKGTYQIYDWKAEIEAHFSASFVTITKYSNKSSLPKEFSEYDSSRFHYAVVAGLREDYNEATYRDRRNKVTQQNILTLHYDNLYDKACELETAQSF

SEQ ID NO: 60968 - protein, 250 aa, Clostridiales bacterium 1_7_47FAA; identical to SEQ ID NO: 60582

SEQ ID NO: 60969 - protein, 435 aa, Rhodobacteraceae bacterium KLH11
MCLGYQAFIALHDGVLMISFEVKKRTVVLEYEPELGSPAWVTRDLKQKGKVTISRVFKFLPGDLLGRFPESFDKDENETVLRFRFAKKEKGYYRVLGRILGIQNDILLAEDDFAIERKLFVAERNINIFKHVAKLRPSGEEIVVGGSQANSIPGEVFRNLLAKFPNTGEMNRYARARVETVIGDYFDEMGSARDSYEAYLSKKKSTISNEPLPQDEILQAEIDKYIYLCDTIRNWLKSETHRSEIDWQKMIIKIILLIFPKYIAVLENVKIADYYSKPRGQKTDRFIDLCLVDAAGNIDVIEIKKPFDNGVLGKRCYRDNYVPTRELSGSVMQTEKYIFHLSKWGIDGERQLTKEYKRELPEGMSIRITNPKGLIIVGRDGSTGSQEGMDANQLFDLEVIKRKYANMIDILTYDDLLRRLENIIASLTKRKVDAN

SEQ ID NO: 60970 - protein, 284 aa, Candidatus Desulforudis audaxviator MP104C
MIVSGPPPISWGDYSGAIIRQWHDILSSEDASDERILQGFLEENPCLLPGPFGWPESGHYPFPAALISQPPLSGLGTKIPDFMWLATNSGYLHPVLIEIETPTKRWFTARGGQHSDLTRALDQLAEWKTWFNNGANQRLFLEYYQVPSTLHRSRTFHPFYVLIHGSRAEFEDRPELASKRAQFARDDEYHMTFDRLTPNPKAQDLICVKKTNHHYYSALAVPPTFILGPALAEYHLNIRDLDGAIKKGRWITEERKDFLISRLPYWAEYARGGSKGIIHTGDWE

SEQ ID NO: 60971 - protein, 385 aa, Mesorhizobium alhagi CCNWXJ12-2
MSEDDAEYFKLRKEGKIYLSKVFTHGAVNEQRRRFAHAVFEGTERAVLGETEGALCLRLTGDQRKTQVTALISQDDAGIRRVTLQTFKSRAGGWYEGYEKEAFTFRSDEFERLLEFLRRLKFIDLSNEERFQIEDLSEAAGPKIITDAFDRALIGKIKKLDANERERLFRSLHDNLTQEEINLLLGRRQALEQFDATLSSGAWSETEWQDFFEVQNWVFGYGLDYRIMRQFDREMVVGAGGTDNREKPTVDFLMNFTDYTVLVEIKRPDTPIFQTQKAARAGTWRFSTDFMDAISQVLEQKAEWLNAAQSGEHFNKAGTSRLEARTRDAKTILVIGNRAEFGRSGNVREANIKRDTFELFRRDTRSLEIITFDELLERANFIIKE

SEQ ID NO: 60972 - protein, 262 aa, Desulfosporosinus acididurans
MMITDAVFQELTEEELELYEEYKVKSSKIHRAGLIYNYPDKVRFCTELFPGNYLDEKVLKRRDELTEMCNQFLSLLNNTQTGERDILNFIRDRRAYHLIGSIQKKNYNFGHHGTCVFPEFQLGSSYQADYLILGKNSDGYHFVFIELESPYGKISIGSGHEGEVIRKGINQIDDWDRWLDGNFSSLAEIFEKNKHPHFDLPKEFYKFDKTRVEFVVIAGRRKDFNENLRWKKRKLAEDKKIVLMHYDNLYDYAIEAIGANTY

SEQ ID NO: 60973 - protein, 295 aa, Agrobacterium sp. LY4; identical to SEQ ID NO: 60960

SEQ ID NO: 60974 - protein, 295 aa, Agrobacterium sp. TS43; identical to SEQ ID NO: 60960

SEQ ID NO: 60975 - protein, 295 aa, Agrobacterium sp. TS45; identical to SEQ ID NO: 60960

SEQ ID NO: 60976 - protein, 418 aa, Modestobacter marinus
MSGGFDPFESPGGNENIAVTSAQGRIADRTYATASFSVNHPQSRDFGEPARFVYKVFDTDGASELTSEGDQWTVSETTGGRVQIKLLVAREAGAVKELWVQKVPANGSTAGLKTLLNLKREAAGVLVDLLKNLELIPVEGETSVRVDDSLVRDLFANPASLVEVYKRDPDRFRQLITDDETARDVIAISHRRQQVERFRKLLNEPGYFRSEKAALPGRGTEHVWQNFFEQNPWILGVTLAGQLFTSWDSERLRQAVTGRSIGGVGKEADALLRTAGRVRAMVFAEFKNHDASLLDKEYRSGCWSPSQDLAGGVAQAQGTVHRAVQEIGDRLADSAEDGSDVPGRFTYLVRPRSYLIIGRLDELLGVSGGDHQDKIRSFELYRRHLHEPEVITYDELLARAEWFVDNTAVDGSAQPVDF

SEQ ID NO: 60977 - protein, 393 aa, Hassallia byssoidea VB512170
MSVFSQIVDFLPEKTELMVLVKPSEDVDEELKRLTVREIKVQPKKAGVYVPISLDELLKIKFSISKAGKLSRDLERCKFSTPVLPNEQLKSLNQTYQEISRLFEKNRLAPGGKVYDNIYFKDKDDCWKLLEILRDRIYQPFEDEFEKQQRIINEKDDVYVRPLVESENLFFLELEQKDKRIDVLQSQNKNLQEQSQEFKTKYEKSKLFAYQQKLDEFKNRLKSDYPETSGTDSWQEWIYKNNWLFGIQYGSSIAHPQVGFRSILDYLFPTPDGFIDILEIKKPSHDVIKEDKSHPGAFKWSSEVNEAIGQVVNYLHEIELHQLEIAKKLKQELSLELSAIKPRAFILIGRSDDWNEKHKEAFRRLNHSLHGIEILTYTDLLQRGENLMKVYAD

SEQ ID NO: 60978 - protein, 245 aa, Burkholderia lata
MKGFKQFSFDKTLLRTECDILKNTLKKGQNLSLDEDAHLSPIFKKSPNLVSIIASAFGGVADPNLIASEYWILDKLRCDFAVANFRHKKFCFIEIEDAKQNSIFVERKPDQFNGLMGKSPYFDWAQRFEHGTSQMVDWIRILKDEEKTDNFRAHFGSSNDFEAEFVLVIGRDEFLDDNQRQRLAWRSKNVLTAGHKVKSITYDEVVSEAEWELDTYGPAADADASIADASVAVALDGPLKDGGSA

SEQ ID NO: 60979 - protein, 401 aa, Burkholderia lata
MDDEEQIHYNKLPDKTYISPRIYIDAHEAVRIASKVIDSDGLHYAIVKKEVVLRRTEKGRTEIVAKFLESTRDLRVLTIQAFNGQTGTPHKTHFSFVGEEIPKLLAFFENIASVEFASQDKVNITDTELRRLVLSKEQAASLVHENQDIFSEVIRLEITKEDVVALGYRKRQVSTFSRLLREPAYFDQVKAAKGVKGDEALWQAYFERNRWIFGYGLSYFFVTGFDNRKLEQVVEGNDLINRGKRADGLMKTKGIISSLCFVEIKTHTTKLLESTQYRPGCWAPSKELSGAVAQVQTTVVSAMRSLSEYIRPTDTHGDPTGEEVFNFKPRAFIVIGSLGEFDTEHGVNKDQLRSFELYRNSISSIDILTFDELFERCSFIVRSEAERTSAETSPHGTENGS

SEQ ID NO: 60980 - protein, 401 aa, Burkholderia lata; identical to SEQ ID NO: 60979

SEQ ID NO: 60981 - protein, 265 aa, Paenibacillus sp. P22
MSLYSRDYTKLTEEERITWEAMKQDEKIGTGRWRKRSRYREYPKAARHFMSLFPNNFLDVEELREEDRLNHLTEKFLVELDKPDATEASIMRFIKQNQAYFIIGSILKDHNFGHHEAYVIPEFWFGNTYRVDYLIIGKRSGGYEFILVELEHPKKDITIKDGELGAAFRKGIKQINEWKRYLEPNFPTLEESFNKYKHPNMELPREFLKLDKTRIHYTVVAGRREDFDENTYWIQRNMKDNDKISLLHFDNLYDNVTEIIGRSTY

SEQ ID NO: 60982 - protein, 390 aa, Burkholderia contaminans LMG 23361
MDDEAEIHRKKIPGKTYISPAVATAEGTLRIASKVIDSEGLHYAKVKQEVVLRRTEKARTEIIAKFLESDRNLRVVTLQAFNGTTGSPHNTRFSFIGNEIPTLLRFFQDIAAVEFNGPQKVNITDTDLRRLVLSKEQAANLVHDNQEVFAEVVQAELTKEDVVTLGYRKKQLAIFQRLLEDAGYFDQVKQAKHAHGDEALWQMFFEKNQWVFGYGLSYFFVTGFDDRKLEQVVQGHDLLSHGKRADGLMKTRGIINALCFVEIKKHNTPLLDASAYRSGCWAPSSELAGAVAQVQGTVAAAMQRLYGLIQPNDKDGNPTGESVFNFRPRAFIVAGSLSEFVSEHGVNTDKMRSFELYRNSIAGIDIMTFDELYERSKFIVEAAAMPTSSS

SEQ ID NO: 60983 - protein, 256 aa, Citreicella sp. SE45
MAASQSALPVRKFARDRTPRRKRVQKMSASAVRPCRFRVCGEGPVPAHTYGGMRCRGACEAWVEDGTWSEREWQDFFDREPWVFGYGLDYRIMRPFDREATVSGGGTDNRGKPVVDFLMNFTDYTVLVEIKRPDTPIFRAASGGVGGRAGTRAFSAEFTGAVSQILEQKAEWLAFAAGGEHFSRDGTRRLEARTRNAKTILVIGSRREFEAAGDLRAAQVMRDTFELFRRETQSIDIVTFDELLERARFITRDGRS

SEQ ID NO: 60984 - protein, 343 aa, Butyricicoccus pullicaecorum 1.2
MQSSIINRKPAKNNEQIEYCEETLLHKSSQSKIALVPFFIRHSDPNQERDLSIKVIHYKKAGPAYKQDCEINLNPTAAGMLKDKLNELFAVRRVPEEGNFLVIRMGSGTKVDLNGLDSHDVAKAVISILENEEITKSIDAVDFSDDLAFAFRNSIRVKGLIKAMQELEEALETEDSEQYYQEWCEENGWIFGNQYVMKDDERKISRNDTVDLLATSVISGFRDVIELKKPSFTVLNYDSSHDSYYFSAEVSKAIGQCHRYLDVFSEDAANGLRDNPEIVAYHPRATIIVGRSNTWDQPKHRALYGLNSRMNGVTVLTYDHLLSQGKRLIEILRNDESKHDFNY

SEQ ID NO: 60985 - protein, 419 aa, Sphingobium lactosutens DS20
MIRFDVKRRSVIFEYEPEFTSAEWILNELKTHHEVTLSRGFTFKDDDLIEGPVDVAEDEIGEPVFRFRFATRRSGYFRIPGRILGIANDVLIDEGITLQRKLFIAERNVGIFRRLAKVIPDGAEIVIGGDREGGIPEDVFRELLDRFPNSGELDRYASARVETIIGEHFDGMKSARDQYETYLSKRKSSVTDAPLAQDHLLQAEVDKFVYVRDTIIAWLRSADSYTERDWQKMIIKIILLIFPKYVAVLENVEIADFYTSPDRTRRRYIDLCLIDAAGNLDVIEIKKPFDNVLLSKSLYRDNSIPTRELSGSVMQAEKYLFHLSKWGVNGERELSRRFASNLPRSMQIRITNPKAMIILGRDCGPDGQHALTDRQLFDLEIIKRKYANMIDILTYDDLLRRLENIITSLVKRKAGTALG

SEQ ID NO: 60986 - protein, 373 aa, Photobacterium leiognathi lrivu.4.1
MERVSLTSTSWKTAVAEPIEIRLKDTVRLVFVPTVVDNQKDKDACVKGHFVYQKKKKLDSWEDVREINLSQLKPAEGVKLELKSAELLFLLKKLADLYRIHRQDGIQRGSNQYVKLSGALEGLCNATDEDLRQFVELSSDNAIGTFKRIAKWLSSVEHSDKVVESLESLSADNIKQLNVVAGLTVLKKAFEVWINNQYSTDEEFWQRELTSNSFVLSQIFSFPVVVVKEKAYIGGKTFTNQGGNIVDFLYKNQMTSNPALIEIKTPSTQLISSPYRQTYNMSKELTGSTSQVLNYANSIIQDYYSVVGHETSIFGAYKPTCVVIIGNTSELDSPEKRKAFELYRNNLKDVQIVTFDELYGKVNSFIKLLENGN

SEQ ID NO: 60987 - protein, 319 aa, Propionibacterium acidifaciens F0233
MITFIDNEDEFLLRYSSEYYSIEWVDQQLRNDGEVVISRVFTVRIQDLRKSDDDPFEENRVFAIGDIKDGYRRVRSAVLGLDHDLLIAASMKLKRSYFITERNISVFKALDEVAGRQIIIGGARPDAIDEADFIHLVKEFPTSTELKYYTQARIERVLQTYLETRGQAEERLIQYMNRKEKRTRGYRSTDFTRLEATDELELEKFIYTRDRFNEMLKDADAYSETDWRRQVAKLFTLVFPRYISVLEEVNVKERYSTLGGLANRYIDMLLVDSNGSVDILEIKKPFSRCLVSKRTYRDNHVPVRELAGAIVQCEKYIFT

SEQ ID NO: 60988 - protein, 92 aa, Propionibacterium acidifaciens F0233
MGIKGEHDIKSRYKETLPDSIHIKITNPRAYILAGRDSNLSNGERFDFEFIRRGNKNIADIITYDDLLRRLNNIVNSIEKRLEKQGIKSLNE

SEQ ID NO: 60989 - protein, 353 aa, Pseudomonas chlororaphis O6
MELSGEGNVMSIDDKLFEEVMHSLKLARDLREARTIDSNAISDALAFKLSRHFDPEGDMEESLGDLLESVNEQNKQAVQDALGGSHSFELFKSELEKNPEFKKAIRNGQQAKESIEKLIEYMKENYLDNDAKEFASLCVNAFTDINSMLLEQDVVPLIKRGIYSEDLASAIAVWQDSATEKADNEQFWQMELSARKGILERLIGGYALFLQREFHVGTTNAEGKGSKRSDFALIDGLNNNLTLVEIKTPNTKLLGSTYRGTYPLSSEVSGTISQVLNQRNELIMNFYSKRYNSESVFEVFSPRCFVIVGNLKSLGGDKEKLKAFEVQRQAVAAHVTIVTFDELYHQFSTFNQI

SEQ ID NO: 60990 - protein, 414 aa, Pseudomonas chlororaphis O6
MNKPAVEFQSVGDQLHLIYRPRDDTVWVYNKFQRGEELVIKGTFHLTRDKLVVDDAGPVDDEKARELDPEGMGVLDEMSMVFRVATSHGEYFRFDHDVLPIGVPVLLSKQARPTWKWFSAERKVSILAVVASLKPSRIVIGGAELDAIPLADYERLVDQFPTPHELRRYVQARVAAIARQHTDAIVDAEAMLHAYVNKRVQMKGKDFIEPFRQADIAKYEFLLQRLEQMLDAEEGYSEAAWQQEILQIVRLLNPKYIAAFTNVPVLDSDSSTRRYLDILLVDASGNVDVIEIKQPFDKCIVTSSVYRDNHVPLRDLSGTVMQIEKYLRHLNRWGTLGEVALRNHFGDKLPPGFQIKITNPCGIVIMGRDKGLSSAQIRDFEVTRRHYKHIADIVTYDDLLRRLKSILNQLKTGI

SEQ ID NO: 60991 - protein, 284 aa, Pseudomonas chlororaphis subsp. aurantiaca
MLEEKVEQKVHEVFGGQVSNKEFSKKCSSDPVFRRFITATIRARKSLSDLIDYIDDEEPDLPALSLVGQVVEAIEDFNNVVVTDDVLPLIERGIYASDVARALEVWATSRESKKGDEGFWQEEFESRKGVLERLLGGHAVLLQREFHVAGTDTAGAGGLRADFAFLNKTNNISLVEIKAPDTKLLGSKYRGTYPLSKDVSGAISQVLIQRNELMKHYFQKQHRAPVSFEVFSPRCFLIAGNLDSLEADPVKLKAFEVQRQAVASHVNIVTFDELYQQFATFNQM

SEQ ID NO: 60992 - protein, 490 aa, Pseudomonas chlororaphis
MPSMRPSQITFQSRTDGGPFVEFLLFDNEGIPTDDVLVAEHGEVYFSDLTKDFETPETWHQILSVSPDEICIHPIHQRGGSANYGTPKHGPVHQILLARPKAHPYRIPTNRDELEGLLSSLPDGFAKDWQIGLGLLWEYRFIIESISDIGDIHTIVIHGEDGSDDAKIHGSSYYLGIDRYSELKRSLDRLSQRHQRETRSDKQLVCYTGLAHAADPIRNPERPKKLPANVLTDLIKLGRGRSQLSTADQKSAVNLVKDNADVIAKKTPMMLLDLKADIERVTLGELVERYKNLMSADAKKDRWQQFLVDNPFILDMAFSYPIKVVCERPYVGSKRFNGRGGNYSDFLVAAKSTGNVALIEIKHPKKDLLKTPAYRNNTYGPSIELSGSVAQIINQRASLQREILQLKEDLEEPVHTYAVPAIVVIGRTPSDKHQRRSFEQYRNALRDVSVVTFDELQRRLEDIHKALSPSAPANSNLGPNAGAEEDDIPF

SEQ ID NO: 60993 - protein, 273 aa, Clostridium sp. ATCC BAA-442
MVYRLIVVKLRKEAAMDTITTQSKGSNFVEVKDEFVLDETERTRTVFKAAMHSGGIRRDIIRYRKNSDGTCEELIPVNFNSLHPDDGIKITLPTDAIRILFEKLKELEVILQKRGIRYGTHDFTIADASTLVINNKNKATIIRKLLEADLGEEVWNQLTQNNPDIATRLAAAKLHEDRIISLRTFEQMLSDEKLTENDWQNFFEENIWIFGYGLRYQILRLIQAQPNYGGATVSGMGGQRGDFLTATEAETKFTCLRVCLKNAAYPIGGSFAL

SEQ ID NO: 60994 - protein, 274 aa, Anaerostipes hadrus DSM 3319
MKQGEYMRLQERDYLEGLTEKEQEKYREILEEEKRRAGGFGRVYMFREYPKAVRHCLSLFPNNYLDINNLQNEELLKEKNQEFSKIISDNECIERNITKYINKNDGFHIIGSILKCGGYNFGHHDAFLFPEFQLGSSMRPDYLLIGKSSGGYEFIFVELESVYGRITTKDGQLGECFHKGIYQVKDWSRWLQANYDSLFGKFKELKNREECLPEEFIEYDESRMHYVVVAGRRSDFNDLTYRIARESFLKENIKLLHYDNLIDFSNSIVGELSY

SEQ ID NO: 60995 - protein, 493 aa, Pseudomonas bauzanensis
MEDEVAGSEKEDTYTSAPIDAGTHAEDGSFLVLETIPDGKTQYLSYHLSEKAYDRAKAAGADMKLLDDASEPHLLAEYSFETKVLTTYPIWLRSNQTNFLKRKYGTIARISFEDEREMAVDKHIGLFFDLPTGFHRKPFEGFGVDPRIKYLIDAFRNLPGIVGITICEDDQISVNGEDVRLPVHIFDDARLNINRAHDAARDFANGEKMAYLKNLFLPYVVPGYEPDDFERPGIDLQDTVRSALAKRGIPRSRNTNNSAAVRTVMRQVVEIAQDDPVQLFELSEKIQLASLSALIEDMTKEMAKGHREAFWQTYFEENPFILKVLFGLPVVHYTSQATVGGMGLKRKGEKQADYLVKAGMLGNLAIVEIKTTETPLLTKDPYRPPHLYGPHPELTGGANQLVDQKLRLIKSIAAKKEEEEEEPNIQAWSVPCILIIGRLPEKKNEKRSFEIYRGSQKDVLIITFDELLAKLVALHEFLTTKPEEVDEDISKLV

SEQ ID NO: 60996 - protein, 250 aa, Lachnospiraceae bacterium 3_1_57FAA_CT1; identical to SEQ ID NO: 60582

SEQ ID NO: 60997 - protein, 258 aa, Lachnospiraceae bacterium 7_1_58FAA
MDTITTQSKGSNFVEVKDEFVLDETERTRTVFKAAMHSGGIRRDIIRYRKNSDGTCEELIPVNFNSLHPDDGIKITLPTDAIRILFEKLKELEVILQKRGIRYGTHDFTIADASTLVINNKNKATIIRKLLEADLGEEVWNQLTQNNPDIATRLAAAKLHEDRIISLRTFEQMLSDEKLTENDWQNFFEENIWIFGYGLRYQILRLIQAQPNYGGATVSGMGGQRGDFLTATEAETKFTCLRVCLKNAAYPIGGSFAL

SEQ ID NO: 60998 - protein, 250 aa, Dorea sp. D27; identical to SEQ ID NO: 60582

SEQ ID NO: 60999 - protein, 227 aa, Stenotrophomonas daejeonensis
MPYQRSPLFHKHYEHYNLPPYGNFVEQNAVTIAQVEQYDRLIAERSGETVLDHYIRDNKELLVNALDFVSTGHQGSWVFPQQQIKTALRGEGTGLIPDYLLCGKSSDGLAWWVVEFKGADEQLFTTGKDGRVSFSATANKSILQLLEHIDFCNEHQSALRDQLKLTDFREPRGMLVIGHEKELEGDERLRKLKAAWNRLVGGRLEIRTHDALVRAARHKAEFHRNFG

SEQ ID NO: 61000 - protein, 265 aa, Paenibacillus sp. D9; identical to SEQ ID NO: 60981

SEQ ID NO: 61001 - protein, 547 aa, Pseudomonas sp. 2_1_26; identical to SEQ ID NO: 60009

SEQ ID NO: 61002 - protein, 470 aa, Afipia sp. 1NLS2
MKLSLSEVHPGCVAVTCEADRETYRSLNPDYSPSDPLPVKEILWFDATKSTIIIRPISTYPSNRYFEAKYDQIEEIVLEGFDVNLPEDENGVHEALFYLPTGFIKSIDGGLGFPKEYHSIIDSAEEIDGVTSLVITKRGPTRIDEPCFYLAYREFEKLRLTLARITRGYQREGRIDRAIEAHNALLTTLDAHRFPARQRPLKKDAVFKLLTDRDPAKSDLSKGDRAGMISALRSSAPALAAEKPQVLYELQRDVELVSLDVLIVRFREMLEKKLPESAWQELFASNPFILSMLFGYPIVEVLGQAHVGGTALTGRSGKIADFLIKSEGTNNAALVEIKTPRTLLLGKEFRGGVYPASNDLTGSIVQVLDQRYQFQKNIAQIKDATDISDLASYAVDCVVVAGTTPASKAEQKCLELFRRSMKDVQIYTFDELLQKMVRLRDFLASDEPSAEASEPLGPSCLPPPPEPIEV

SEQ ID NO: 61003 - protein, 215 aa, Leptotrichia sp. oral taxon 225 str. F0581
MKKGKIMTWNIEEVERNLEKAFDENSEQKLLDLLKKNTFLFYELVERKYTMQPIFHEVEFGNKYRCDFLWLSDRSDYPQWVLVEIEKPQGTLFNQNKSVSNYLKKGIEQVDNWRRYFAQYPSEKERIFKAKNLKFRYILIIGNKEEWEKTEFSKNWRAYNDEKIEIRTMDVFKRAIENLKKNPKEFFCFEENPITKNSKELEKYIEKNSFTRFLG

SEQ ID NO: 61004 - protein, 495 aa, Propionibacterium sp. oral taxon 192 str. F0372
MARFGNDQTNIGHLDVRTVGEGSRVVAFFVPTELPHEESSARRRLAEGVKLVEFDAETGILKIHPINTLQGHGDYLGPKYTRVHTLTLNVALLDHYSSGLFDSSELFDSSGLFDSSGLFDSQLDDHDGDYQLELESIFEALPYGFVKDFNYGLGLLKDLNRIVRLVEDNTACDEIVFVDGRSAAVDHTEFHLGLARFADIWAEIRRISDRGIRATARVKDAFVHNNLSADLDLILAEPSLGRHPNSRTIAKAASGIEELSTVEREALVDTVASESASLAAHSPQKFQRLKRDIELVSLDRLIKTYEDSLSQNKPESYWQSFFDDNAFALQQVFGAPMVSVRSSANVGGTGLSGSGDKIADYLFKNSLTNNVALVEIKKPTTQLLEGREYRQGVFGPSKELNGAVAQVLDQAYSLTKNLTSLKESSRQWDLESYAVSCFVVAGRTPLASDPARQKSFELYRANSRSVTIVTYDEILERLRLLREFLTPASPSAEEV

SEQ ID NO: 61005 - protein, 421 aa, Pedobacter ginsenosidimutans
MMAKTNALVAAEYERATTTTKKVYYFKDEEYKIDQISKEVYLNEDTEIHYPTPFRGDDKYKTIKKFVFKGFKKKLPTGVYKVSTFGYGFTKPLSPVVAYLHANHDFTEVVIDADGNDQMDVKGKRLFISGASLQKLYATFSAINGKHKEEKERAAVQELNQLFPTVVPAPVKRYVAGTLSEWGSSIAEFNDADKNAIKDLFDKLTLLPNFFSETNLIKTKEIIDNKFIQSALVGFDALLKATSDTPTLEKKFQTFLKENSWIFSTLFAQPVILHQDEAYVGGKNYKNKNGKYSDFLIKNGLSDNVSFVEIKTHLTELVDKKPYRGDDVFALSKELMGCISQVLNQRDHFQKEFYAHAYKTKDVETFNSKALIIIGRLSVLSDKQLHAFEMFRNNCKDVEIITFDELYRKIESLLKIMTGKV

SEQ ID NO: 61006 - protein, 371 aa, Aggregatibacter sp. oral taxon 458 str. W10330
MKILDFVFDFGKPSFNGTGGLCRVRTYVAKDSKPVTFLTELDKNDGQSVTNAVEFIIDKLILDRGFNEHVFIEHYERNNDILFHDTFDMVFIENKKPKWNQLSKIEVENLIGKDDFTDLKNDRSSKNERILEQADSIRFKRNPWIDSPYQKSNSFIQRKLSIEKQMKSKNDLIKLIESKCIEQDLLAFLKQDLSFFGEVYSNPEDEYIVFSEFPIENGSKDKNGSIDFVVFTGRSRMDVILIEIKGANFNLFNQNGYCQPHADISKASQQIRDRLHAVYYENMPSFKKQCHIFRDEAENGKSTFKNYLVGAEGKLLVDPNKEIKIRTVIIGGRTQDDQKESLERHKFERSQTIPITLESWDTWIRKLKREN

SEQ ID NO: 61007 - protein, 191 aa, Leptotrichia sp. oral taxon 215 str. W9775
MLRDKLDEKEEEIHNYLKKNEEILKKGFGKWTHNKVISKLTLGSDYEVDFIVISYQSATLEISLIELKRANVKIFNKDKTYSKDLNKAINQITAYEEWIIKNEKKFKEELTKRINSDSENLFDQFEIYISKYIVIGRKEEGKEKENKKRAYIHKMQNIDILTYDRLIKIEEEKHSTRIGEKLIEEGLSQNG

SEQ ID NO: 61008 - protein, 403 aa, Lachnospiraceae oral taxon 107 str. F0167
MNVNEILNGISKIYWKKMWKYISDNEISPKDVNCLILNPESIIFYFGEKYIAIEYCGNQFLSKISNEHSTVVKVRDYTKEHLTNKQFLDKIIGFEYDGTSSVHFSVTSGMYEDLVVPTNKGIEKLLDLKWNFEAQSSIMGINTNGLDIADNQFVRLINCRFFDEHNGDLKTRIIKWIDFIPCVYEEPKEGDFDIINVDIKIFDRLWKSDLKYKYPRPNDFKYAKLPQINKFIEIFSDSKYSEPEITGFLAEEENKFILRMAFMGTDIYNEVICKWQSEKKEDLRPDFFVKRANGYADIVEFKLQNVRSKTIVGRANREHFSSEINTYIAQTRKYCVYFDDPNNRNWFEREYGYKVYKPRRYLVIGRRNDFASDEWVEIKSDYSDLELITYDDLVDTVMSQFYG

SEQ ID NO: 61009 - protein, 450 aa, Rhodococcus sp. JVH1
MVRYSSDQDIKAELDVRRRDNEVDGFFVPLDTPTDDPGASNGVRILNFSGDSSELRIFPINTFPDKEKYLQSRYPVIRTLTIALPDIDIDDVDFTEILEYLPNGFRKTYKSGLGLLKDCNRLVRLIEEHTECDEIYFMGGTTVAVDGKQLLFGLDRFEAILSEIRRINSRGNDGAGRVKNAFVHNELASTFGLEPAVYSLGRHPVSQVLTKAAGGVTELTKQEQDALLDTFASESAVLARTRPESFVKLHRDVELVSLDLLIASYEDAMASRKKEGFWQNFFDDNSFALQQVFGVPMVHFQSSASVGGVGFDGSGEKIADYMFKNPLTNNVALVELKKPATSLLTAKPYRGGAFGPSKELAGAVTQVMDQANRLMITFASKKVASRVTNLEAYAVSCFVVIGRTPSSDDEKKSFEMYRGNSRSVKIVTYDEILEQLKILRDFLLPPDKDR

SEQ ID NO: 61010 - protein, 273 aa, Sporosarcina newyorkensis 2681; identical to SEQ ID NO: 60777

SEQ ID NO: 61011 - protein, 414 aa, Bifidobacterium stellenboschense
MTTSIRFIVINNNIILAYSPINGTDWIAERLSNSGIITIARTFSFAAADKYNLEDTPEINDEYDDTAYFKIGTIEGEYYKINAHILELHHDLLISNDIRLERKLFTTVDNISIFAKIDSIIDGPIIIGGSSENAIPKQIFLELLSQFPTRNILRRYSEACIARAISDYIPCKPDTEQRLEAAWRRIRRKTTVPTTPALPSTLTEMETSKFVYIRDTLKAMLADADSYPEATWQTEVSKLFLLIYPQYITLINQVTIPDSISTESSQRRIDMLLVDANGFIDVLEIKKPFAHSLVRRGRYRDNYLLGHETEGAIMQTEKYLHNLVRWGASGEQLLGTKYSSQIPDDMKLNLTNPRGIVLIGRDDLSQEERADFEIMKRRYSDISDIITYDELLKRVDNILFSLNRHTAAPLPTKQ

SEQ ID NO: 61012 - protein, 184 aa, Opitutaceae bacterium TAV5
MSACLHGIVYPNQVISQFKFGTDFVADFVAFGAFSGACCFHFVELEPPGERLFTQNGVAAKRFNGALAQISAWKIFVEKHREEVLRELAKVFSQRELVFGRKGEEPTDTTGMPLYDPCQWIVWDYHIVIGRRDSLSKAELGKKSAYLTQAEVDVMTYDRLLDQARAFDEEPETGMHDRPRARGR

SEQ ID NO: 61013 - protein, 135 aa, Candidatus Brocadia sinica
MIILEPHNLEEPKPSKCAMKWDAYTQIINNEWSNLLSSTQEKESEYQSFFERHPCMLPRPSSLPDAGTEPWIPALISQPILPSYNYRTPDFMWISINSGGLYAILIEIEIPTKPWWTDKGYASSKLTEAQNQILE

SEQ ID NO: 61014 - protein, 265 aa, Kibdelosporangium phytohabitans
MGFATFAQTLVDRITKVREARRQRNLSAAELGRLLAERNVSPTELGRTIAGLADVGGVVSGITSTDEGRLAVDVDVIRRRREAVAELRELVLNPATTEAEIQKMIGRRYWIFGGHYTGVLDRRNAVPLDQHDIPLVCADRSIHIVELKRPGHQLVKPHRNHLIVSNEVHEAVGQCMNYIRALDELGAGLETLHRNELGVVYDYRRVKGTVVIGHPELCATDSVAGEQIEQTIRSYNAHLSRVQVLTYAELVDSAERALQFEAEEH

SEQ ID NO: 61015 - protein, 109 aa, Kibdelosporangium phytohabitans
MVKLHRGFPITTDEVNQACAQVANYLRAFDEDRVGVPTRHGIDARRASATVVAGHPMYDVEFTEQQVDEVLRVHNADRSRTEVVTYKQLIDRARRALELSAPTEVEPAV

SEQ ID NO: 61016 - protein, 211 aa, Acinetobacter sp. OIFC021; identical to SEQ ID NO: 60308

SEQ ID NO: 61017 - protein, 225 aa, Pseudanabaena biceps PCC 7429
MKPLDSFNFDVRRCITELNEFEKLLDKEELREAQDVLPFFRSNLHLSAFIASYVAGIVRFDRIKHEFAVFGDFRADLVVGDSVNGTYCFIEFEDATKNSIFIEKGRSTSDWSPRFEHGFSQIVDWFWKLDDFRNTAQFRAVFDSDSINFYGMLIIGRESFLSPIDKNRLKWRLNKVLIDSQKIICITFDQLARDIKDRLSLYQLSYESDSFTEIDSDLLDIEEDA

SEQ ID NO: 61018 - protein, 420 aa, Bradyrhizobium manausense
MIGFEEDNRGLILEYKVENNDPEWASRRLKDDGEVTVSSGFTFESADLLTAPSKRGAEEPVYRFRFATKEAGYFRIPGRILGCDQDVLIADSGIRLERKTFVAERNIRIFPRIEKVKQPFGEIVVGGSRQDRIPVEIFRELLAKFPNSSELDRYARARVESIVGEVLDGNAAAREKYEAYLARRGSAVSAAPLEQPALIQAEIDKYVMLRDTILAWLAEATSYSEKDWQRLIIKVILLLFPKYVAVLESVTVADFYSKPGTRKNRFIDICLIDAGGSIDVIEIKKPFDDVLLSRGLYRGNSVPTKELSGTIMQAEKYLFHLSKWGVEGERQLTTRYADFLPPGMQIRVTNPKAMILLGRDKRADGTSALADDQLFDLEVIKRKYSNMMDILTYDDLLRRLDNVIASLSRRGGLNTAERSV

SEQ ID NO: 61019 - protein, 522 aa, Alcaligenes sp. HPC1271
MTEEELRRHYLSIASDRRSRRGERTAGKNRLVKGRKGIGKFAGLMAAAVMTLETRARGRLCRITLRLDDLSQVEDIEQLNIGLQSDPCGPELHGTTITLSDLHQGLAYPDANRLRQILLQDYGRQDDFAITIDGKRLDVDDVSGSYSEQEEELPSAGKVKLRFSISDGKSGLRQPGITLRVDGKAVGRPGFFGLDQRDDFPSKLLRKLYGEIEADGLRDHITAGWDAAVENSELLKEVEGYVQPILREAYEQQYRREIQLAQARLQRAILTRLSALPEHKRAFADRAIKKILDKYYGEPESKVEPVVNVLLEAMERSDYRILLEHIAEATPGDVAGVAERLDEFGLAEMAFLVQQATARQVFLDQLDGLARDAATTEAVLHKALERNLWVFGAEYSLFSSNSTLRRQVEDVLGKTYTGDKADKRPDLLLNENLGGQYLLIEFKRPSHALKHEDYVQAIGYRHELAKYLGSPIQVLLVGGSRSSDFPTDNREPNVEARIFSQVISTARRQIEWLLRTAETCSN

SEQ ID NO: 61020 - protein, 384 aa, Acinetobacter sp. NBRC 100985; identical to SEQ ID NO: 60817

SEQ ID NO: 61021 - protein, 406 aa, Streptomyces zinciresistens K42
MAETDWKKVAAHLRELSGEFTPAQRDLADALGVALAPGTPMPVAAALLRAHLTGPLLLKRAQPIDEEEYGYLELVAGEAAIEVPPQDLIDHRDILEAWLEVAWAHRSVIHLERLSPEPGDIAITPGERGSEQVQHDIIASISNSGRLNFRGGRGRGARPHRVTSLVKQDAPHHADLVRKAREEALARDPRPGRVTSRELALLRPWQVTRGPSLAEREALRETLETATAERDLQEVLQRHPALLGHVLTGNHGTWVRPEVGFGNHYRADFLIAGRTSAGLQWVLVELESPNARLTNRGSGRESPTLRHAVDQIRDWREWLSTNLLQARTPRVDNGLSLPGITADARGLIIIGREDDTEDSAQVRRRLFTDSRIEVRTFDWLLRAAEQADSRLLGLLDLESGDDTEDW

SEQ ID NO: 61022 - protein, 228 aa, Methylobacterium sp. GXF4
MQGEALLALLRQTTDRPNVLRAVLEHSAAHRDFLTRAASALNLAVYEAAVADLERLVATDAAESAFQSLLAANPWMFGSEYARLLPNRTITVRQQQDFLLTRTADDRLELVEIKTALGGDPLFAYDKAHDVFYQKADLTRVIAQVQNYIADVDGTRDLVLRKFTIDAYKVTARIVIGRDGDEKQMEALKRTNAHLHRIEIITFDGLVRIARRVLAHLGGRGDAPTSAS

SEQ ID NO: 61023 - protein, 484 aa, Achromobacter sp. LC458; identical to SEQ ID NO: 60850

SEQ ID NO: 61024 - protein, 268 aa, Bacteroides reticulotermitis JCM 10512
MLQINKKYNWFSLETENSTIMSALVERWKNTLDSNLKESVFHQFIHDHAGFFFGNDNCYLTISKLKLGCDYETDFVNVIDQRSNGIIYELIEIEKPNSKLFTTSGVPAKDLSSAMQQIRDWKRFLIENKAWFKKYLPSQTTRVINNSGVIFTIIIGRRSENALEIEKRNQIANELRINIRSFDYLTDLLERRRFFNDACLDVNSELWLENQIENPFYKAINDSKWRKFCSTKFNWTHFYKNNCEEIIKIRDYNDLIHDFLNSSISVEK

SEQ ID NO: 61025 - protein, 412 aa, Formosa sp. AK20
MLEIRKKSKYLQLIYAYSDSGFSNDDWVINELKKYNYVGIAHRIFNLIPEYLAKKSRYNLSTQEFILEIPDVVFNIAELKTIQEGKIKDEYFEIYPNVLVRDRRILLHKDIEPDISLFIAETNISIFKQIAELVDGDIIIGGKINNSIPLEEFYGLIENFPTSYEKKLYAQARISSVLKNYFEKVKDSEKIYVKYRNKKPSNKGINLKKIFEDYEVNKYQTIYDKLLSMLEDEENYNETTWQLEIVDILLLLYPKYIAVFREVPVNADDLTTKSLDYLFVDANGHVDVVEIKQPFDHAIMTKGKYRDNYIPLRELSGTVMQIEKYIYYLNRWGKRGENFLINKYKDELPKGFKIHITNPKGFIIMGRENNLTNEQKHDFEVVKRKYKNVIDILSYDDLLNRLKLTIKQIKLR

SEQ ID NO: 61026 - protein, 454 aa, Leptospira mayottensis 200901122
MAKWKLTYEALEFIGRDGAGWPIIDLISDSYNVEDNSIRRVSVNAKNIVLNTLPKNIVGVRVFDIERIDEMTGKNYFESYQIEDLNFELEESDAKKLRKIQFDLLSIDGGSLDFDYLRLFNPDLFVMNLMDVKAFFVDGYGVLSHEEGALVLENLNNFYNSFTSDQINVLRINPKSVSYDENKLIRRFLGQDRQVVDSSSKQNYVKNGSKVNLKFLEEKIKDSEIISDIIDWIVENEENPELLKNFSKLTPENLSKLNTLSGIVTLKNCLLRWEENLLHSSEDFWQKEFEDNSYVISQLFTSPVTIMKSKAYLGGKSIHNTGGSLVDYLFVNKLTKNTSIIELKTPATRLLGSNYRSTIYNISAELSGAIVQLSNYKDELLKNYYQLANLNKGIFHAYDPSCILIVGNFATELDSEEKVKSFELFRQQLQNIQIITFDELFEKMRLLIHSLEGS

SEQ ID NO: 61027 - protein, 454 aa, Leptospira mayottensis 200901116; identical to SEQ ID NO: 61026

SEQ ID NO: 61028 - protein, 379 aa, Flavobacterium sp. CF136
MNRKNRLSKWKKDEKYPLAFESPMDSDFEEFLNKRNNSQADKKVSLGSNFDLMKMTRELIFDIKKGTPIFHYICPMLETKGLQLTYNHLIDSVFEGGKKDIERDVINTLGLAVALEVPIYPNNEKVEKELSYYYQKLIENGFTAPDENGNDVKLVPINSKKMEDFKIDKFSKIDLTKFWSPTDLLILKEVIKDEFLKLNNAHRTLTMLELAINQLKNLLDTSERNENSLQKCLTENPILLGLEYARIIPKHKLGSEFEVDYALEKFNGLIDLMEIESSTLSIFTKQGNPSSYLVHAEQQVIDWLDWIEKNNSYARNGLEGLISPKGFVIIGRNSSLTDKTKFSLIRRNKAFNGNISILTYDDVLAKAESLRDILKTEKN

SEQ ID NO: 61029 - protein, 386 aa, Flavobacterium sp. CF136
MEYYPQDGVRWINENFNKDEDLIIKKTFYLTNQDMIPTDDSPDGDSMEFLIGELENDYYKIYKRVLAADNDILFHKSIDIRIKHFIVNSNISVLLKFERLAGQQIIIGGDKENAVAENIFNDIINSFPSRTEQNHYVNSRVTNVLSQYLDGVKDSGKAFERYLERRNKIGNLNTLSSIRNYEYEKYLFILAALKKMLADSENFSEKDWQNQIIEIILIIYPKYIKCFSEVAIKDYYTNPSKPTTRSLDLMLIDANGTVDVIEIKKPFNNCVVTKRTYRDNYTPMKELSGTVMQVEKYLFHLNKWGAQGEQVLNQKYQHDIPSGMRIKITNPKGLIILGRNDNLCDEQLFDFEIIKRKYSNVMDIITYDDLINRLENILQKFKNDCT

SEQ ID NO: 61030 - protein, 456 aa, Chryseobacterium sp. CF314
MKRVFLKKPIEKLLTKLKKLEGVSDVVKKRNKYYVDGNLLLTVTKNELIYSKFRFRPNNIDKVLEVKHLDSVRIFINHDTLNILNINILNPPNNVNKIYSVFKEIEEISIRNITIGDSNRIENENLYINLETYNNIIKIDNEESVEKSQKVFNRFIPFLKSEFNFLTDKINSNRDYNLLLKEIIASGEIDQEDLVSLSDQLESGSKNQVVIEKQINKQTKWLIDTIDDILQKDNISISDAKVIGNKEFGFLKTSITGPEHLMEKILSEYGQYCLFGVPALLNTNKYVQRKGRSRSQFDLILINHLGDVEVVELKRPDKYLFKYGGGRGKFYPSEDLAIAIAQTERYITNFHKDNDPEYKIDNKTLREFLNDKIGDTLHIETIRPKGLIIMGSWKNLCPDYEKLDEKIKKKIKKDDYVNDSLQAYKELTHSLKNITILTYSELLENARTRLELDSQK

SEQ ID NO: 61031 - protein, 364 aa, Polaromonas sp. CF318
MKLLTDAKLVTESGGKRELDAVLGRCIQEHSVEALLSLQLLTRDDYGGFTMKTEMKRAAALCLLTFGERGITSLVEIFEQEPRFSNATLILQILSQLASGEYPSLSSDLPLDLAELVTTHLPPIASISQFAETMLNKVVLSITDEDDLNSWVGVTLQMSFAFQGRNNFSSTRKLLSAMALRTLTVGIPIIEQFEELLRASPNDEPALQHFLESNPLLLDPLAVRVWPRPDLHGKKEPDFLIQRADGTYLVIEIEIPSKSLITLSNQVSAETSHAIAQALDYRNFLQIRYQSAQQTFPDFRVPDALVIVGMENSLNAEQLETLRRENEARTNLQIIGFDFLARRARTMLGNLTHGRVSIERFRLF

SEQ ID NO: 61032 - protein, 380 aa, Acinetobacter sp. CIP 101966
MTTMYTLEEDFLFLPRDVEIAQTSLINTLYNHIHKQNLRFLTTYIDETDTLHIQTTHRLKFQITCVKNNINSFKITKFDRTKEVETLTFSKVTITNIINFLELISSLDIKDIDQRKISLNQISKTDIKNSISQLIQSTLENKDQAELLTSFLNNGLITCQDIVNTGYRKQQLDVFEKLLYEPDAITEYQITNQLTSFSEEKTWQHFFEKNEWIFGYGLDYRFNKILQREAHLNPSNLDGSNSVIVDYVMADNRFTTFVEIKRPNTPLFKSQKLRGNCWRISNDLYEAHSQILAQKICAQTKFETNNAGFCSKGKRIQQGAYDPKAILIIGCWSEIESDSEYIQNLKIRTFELFRRDLRNIEIITFDELYDRAKFIVEHHQ

SEQ ID NO: 61033 - protein, 207 aa, Synechococcus sp. PCC 7502
MKNLQKHVIDPQKCRTEWDDFSNLLTSKPILSEQKDVLPFFKQRQNLSLLICNYFPKIKVPDQYAHEYEIYGDFIADLVIGDSSVHHYLLVEFENGAADSVFRQKGKKATPDWAPRFEGAYSQLVDWLWKLEDMRSTQDFLNTFGSRRATFQGLIVIGKDMNLAVQEQDRLKWRLDKTMIDSNAISSVSFNQLSNDLNHWLKFYYGV

SEQ ID NO: 61034 - protein, 394 aa, Streptomyces sp. SM8; identical to SEQ ID NO: 60608

SEQ ID NO: 61035 - protein, 387 aa, Gilliamella apicola SCGC AB-598-I20
MDSYQNPKIGKTYISPALSDFHNKEKKIRIATKALLSTGGWEYAKEHDEIILRKKTDAATCIKAKFLEDNRQTFVLTIQKFIINDEDTGTPYGSGFSFVGDEIDKFCEFLHHIQSIKLKTNNSFNISDEELRKLTLTSSQAENLISDNEELFAEVIRHAITKKDIVTIAYRKKQLETFRKLLEDQEYFDRVKIMKNCKKDEAVWQMFFEKNPWIFGYGLDYIYTSNLDDKRLEQVVHGFQVSQHGKRVDALLKTRAFISTLCFVEIKTHKTKLLHNIPYRSGCWAPSNELTGAIAQIQGTISYAQESIFGKLTLTDQNGFPTKEDVFNFRPRAFIVIGNLEQFNGEYGINQEHIRSFELYRQNIFQPEIITFDELYERAKYIIATNE

SEQ ID NO: 61036 - protein, 379 aa, Marinomonas profundimaris
MNDFTPPPLTDEDVILNSKLEHLYNHEFSDGRFFQVIFSDEDETHIKLAARTCLKVVYLKEKDDIEGFEIIKVVSNKEKERVKLSKFNLEQLTCFLEFIKELNFKDVTKRRISLADDELSVLDSETKAKIATLLSGEDGSDVVYELLDNGLITNQDLVNTGYRKHQLEVFDSLLNRNGLAYYKIQIGKPNTKDETAWQHFFQANEWIFGYGLDYRFQGILQKEFHASTSNAAGKEEVIADFLLGDKKFTTFVELKLPNTELFNKSKNRSNCWSLSNCLIDAFSQILEQKASGQIKIETSKEFIGDNYEEITQHSYDSKTILLMGSWSQIDNDPTGIKRIKEKTLELFRRDSRNVELVTYDELYERARFIVHNENHSKRS

SEQ ID NO: 61037 - protein, 317 aa, Acinetobacter sp. NIPH 2036
MSLSDKKLTILRDKQTVITRAIFWKVERSDCNEIHLKLGRYKKPKFFLDSQSLENETPKSELTLDHEEMTNLMNFLQAHYEHFKIGEKEYIPIPNDINTQAKVKIQQLINNIEISDLIEILIENQIDRHDLELSISYTNRLKAIDEFNQLLEYDETENVWQKWFENNSWVLGSDFVKTIDERSIDTRNISDFLMQSYDGFIDIVEIKRPDGNLKFWQSQLDHGNYIPHSDLIKAITQSLTYIHEIEQESNSVKFLERTEHIKTIKPRCTLIYGRSNDWNKDQIKAFRILNSSYHNLSVITFDHVLERAKRILGQKNL

SEQ ID NO: 61038 - protein, 385 aa, Streptomyces rapamycinicus NRRL 5491
MLDLLAPGLTPEQGERLTRPAYKQDFREREEAICDGSSWKLERRQHFEEQGSPSRDALRRGDWDEALRLLADRCDNLAAAAQGVRIVARGTVKWYNVEKGYGFIAVDNGADVFVHYSAVDMGGRPELKEGQRVEFEISQSDKGPQADEVKVETGPEPDAPGESREVLGIELLDGKLKFVSVQPDGSVKFFDSPGQLHNLLYVASMEAAGWKSLVRELEELINSPNTSEQDLQKFFEKNPEFLTGDAYEEAHPHVVLQRENDGPLIPDFALKPRNSAALCDLLELKLPKAKLLRVSKNRVRLTSAIMEACAQLREYQSYFEDVAKRVAVEKVYGLRFFRPRMMVLIGKRSEYSATDLRNAETDVPNLDIVTYDDVLARARARFRRR

SEQ ID NO: 61039 - protein, 192 aa, Pseudomonas sp. ABAC61
MGVQAVSDKDRRIILASQLQNLYLLPGLRETTIGEFLKLHPEIIKKAFDTQHFEYEPSLKWVEHDGFCTDNEINPDLLIKRKDGYYDICDLKTAKLEKNRITKADRSRRRFIDYVAEGVAQLANYREYFQYPKNAALAKEKYGVEIKNPRLILVVGNWDNFNEQEVAQACRQYENLEVIDYDTISQLYINSE

SEQ ID NO: 61040 - protein, 389 aa, Nitratireductor pacificus pht-3B
MTGFSEEEIFHKSRTDKTYASPAFPDFLGRKLRIANKVIDGRPGFEYAKVKDELVVRETAGGRFQIKATFLEDDRAFRSVTIQKFTSKGNPREYFAFGGREVAALLKFFADIKRVHFPDEGKLNILDSDLEQLLLKPDQLRRVAADNQELLAAIARNEITNEDVVALAFRKKQLKTFERLLSDDAYFDACVMQHGKGPEALWQRFFEKNAWIFGYSLSLINFGPLDDRKLEQAVSGRDLTGPGKRVDALLRSRALLSTTAFVELKHHRTDLMSADQYRPGIWQPSKELSGAVAQVQGTVAAALERWSTSERLSDRDGEATGETIYTMEPRSFVICGRLGEFEGEHGVNERKFGSFERFRRNLIRPEVITFDELYERARLIVQASEPAAE

SEQ ID NO: 61041 - protein, 398 aa, Paraburkholderia udeis
MTDEAEIHRNKQTNKTYISPTIETMEGKLRIASKVLDSEGLQYAKVKSEVVLRRTPKGRTEIIAKFLEDERELSVVTIQAFNGETGTPHKTYFSFISSEIPKLLTFFENIAVVEFKDSERVNITDSELRKLRLSKEQASGLVHDNQELFAEIARSALTREDVVALGYRKKQVAAFHRLLHDPTFFEQAKRSKDVRGNEALWQLFFEKNQWIFGYGLSYFFVTGFDHRKLEQVVEGHDILNRGKRVDGLMKTRGIVNSLCFVEIKTHETPLLDNAAYRPGCWAPSKELSGAIAQVQGTVSVAIQNLGNLLRPKDETGDPTGEEVFNFKPRAFLVIGSLDEFASEHGVNSDKVRSFELFRNSITGIEILTFDELYERSRFIVESIPGSAGTSTFASPDLE

SEQ ID NO: 61042 - protein, 250 aa, Lachnospiraceae bacterium M18-1; identical to SEQ ID NO: 60582

SEQ ID NO: 61043 - protein, 250 aa, Dorea sp. 5-2
MKSIHIFDVFTPTDEQKEAINKKRGGHYRRGKNKEMDYFIECATSLFPNNHYSRFTPIHDTTKEFYQLITSPDTTERIVLNWIASNRAWNYLFGLLRRYYRTGHHDDNYIFPEFKIGSSYVADYLLIGSSSDGYQFVFVELEAPNGRITKEKGTRFGEVLNKGIEQVRDWQMYIAANWNVIVTELEKHSFQNKKLPRQLYKYSPYQVYYAVIAGLRKDFENIRDRKLQLQNENNITLLHYENLIDVANEN

SEQ ID NO: 61044 - protein, 265 aa, Anaerotruncus sp. G3(2012)
MNLYSRDYRSITSSELEKYQAILKLETEGQPIGRINMYDSYPTAVKHYLSLFPNNHINLCDMKKQGDLQVLNDKFKAIVHSENALELDVLRFINKTPAYHIIGSIFECGRFNFGHHEAYLFPEFSFDGKYRADYLLIGKGSGGYEFVFIEFEKSNGRITLKDGNLGEVFRKGINQISDWQTWLDANFQSLGKYFEGIKGKGELPEEFLKYDTTRMHYVVVAGLRSDFDEKTYRLQRDKLKKEDIKLLHYDNLCDSADRLLDMRTF

SEQ ID NO: 61045 - protein, 317 aa, Janthinobacterium sp. B9-8
MAKVSGQKFTVLKDKKTVVTRAGLWKVPHNTSDDEIYLELGRYNKPKDWTSTEVAELDDPKSELTLTGEEFSNLISFIQENYEPFKSGTKAFIPLDNPYDISVADQIRQLLNLDDRQRMLDFLIKNDVIPRDLEIGLAHAKRSRAIDEFNAMLELDLAEHNWQKWFEINSWVLGTDFVKVLDERTIDTANISDFLMQSYDGFLDIVEIKRPEGGLKFWQSSLDHGNYIPHSDLIKAITQASIYIYEVEREADSHKFFERVGGVRTIKPRCTLIYGRSNSWNSEQQEAFRILNSSYHNLTIMTFDHVLERAKRILGQN

SEQ ID NO: 61046 - protein, 357 aa, Acidaminococcus sp. CAG:917
MDNEEITISSTSNITADMTPIVILDETTRTQVRFELQQIDNGKDPEKKLKGKFIYTVANKNTGSFDDIIRLNKKSIKAGESFELALSCKETYQLWQHLTERYKLVEGKLTPFGEVKYVRKDEDYEKLKSILKNKRALAELLATADLSNINFALNVENLKRVKKEIEQNLENDDEVKYWQPFFKDNAWILSQMFNAPFMIMKDCNYVGGKSLNNKHGKFTDFIYQNKVSKNISLIEIKTPIVNLTQATAYRADVHSASQDLSGAIAQLLIQKDELYKEYATLQLNTDSNFEALNVRCVLLVGNYSKLSKSEKKCFEIYRNELRAIEILCFDELLEKINLMLNLFEGKEENDYVDDLPF

SEQ ID NO: 61047 - protein, 325 aa, Clostridium sp. CAG:1193
MIFKPGDGDMVYDESINTVIVYTNSFKEEVVKPSEKTKRLRKSMEKLAKKERISSNEFTNLVSTIAEGVEIIELTERDRNTVAKLIPQLIKEGDIKISLRDVTDINKDRLKDIVQIGRDLLVKKRGVEKKLQIDRDSIGKEFAWQRYFEMYGTYLLFGSIKQQKPEELLQIESALRNKDSKLDILTINRYGFLDIVELKKSDEYLFRLDESHDNIVPTSKLSTAISQVNNYLMLLPYAKEQGELIKGAESATGMLVMGSKEYLMNKDNIQKYCEKTGMSEDLVQLKLRKALRDLNYSYAHIQIVLYDEILDNLDNFINQMEIKIN

SEQ ID NO: 61048 - protein, 332 aa, Clostridium sp. CAG:299
MKEWKNVKLTSKGQEYVEPCELKTGLRSSSRAVFFRNTHQTTGEKIVSLKIARYRKVNGTFYEKQDKSITLSCGEIDKLIEYIQEYYAPLNTGMSEFISVDKDAAELFAKVRDLGIPDAEVVKKLHESGILTENLSVAITAAERNRAVSEFEQAISSGYPESYWQDWFSRNKWVLGSEYLNILPERDIDVTDIADYLMRAIDGFLDVVEIKRPDLPFWTRPDSHGNLCPSSQLTAAITQCLNYLYKIELQSNSVEFMERVEDTKTVKPQCMLVYGRSVDWDDNELKSLRILNAAYHQLHIITYDQLLMRAKLLLGIENETADEEEDFSEWPF

SEQ ID NO: 61049 - protein, 269 aa, Clostridium sp. CAG:81
MLYDRDYRIGLTEAEEQQYEKITGRKFLEKRVSGFGMVNNFMAYPKAARMCKSLFPNNYLDVAELRNQERLKHANEEFIFLLNNKESTERDVLNFIREKEYYHIIGSIIWGLSINIGHHGAYLFPEFQLSSSYKADYLLMGRSSGGFEFIFIELESPYGNITLKDGQLGAEFRDGISQLEDWKRWLPANYNSFGEIMRKYKNNAFDLPEEFYVLDMSRFHYVVVAGRREDFKDKTYIIKRERKKADDIDIIHYDNLVDYADNLIGKRTY

SEQ ID NO: 61050 - protein, 432 aa, Collinsella sp. CAG:398
MSINFFDSGREIWLRYQPYTLDDTILSKLCIDFDREKKLIRYSLDNLPDRLKRARPTTYPDASLRIKRVFTLLQSDLVDDECDGDTLVFKFAYLDNSFPDYFRIKGDIFSCPQDLLVAKGISLDWRMFCVGYERRTSVIKTISSILDDSEKQIIIGGENEKAIPLDEFADLLDKFPTTTSLERYGEALIASYVQDFLDIKKDYQAQLDRHLSRKQHRLSYRLGSPELNKNRITNLSVARQQLQDLLDKNDKVPEELWQQGILDIIPVLFPQYVTVIPKVSIEDRITGRRRVIDFLLVDASGNVDVLEIKRAFQKNKLLMARTYRDNYIPARELGGGISQIEKYIHLLLNWGIDGEKELTKRYSPLLPQGLIIRFLTPRGILLTGGCRFNKTEQRDFDLIRRQYAHITDIITYTDLLKRLETMIDAIPLSDKS

SEQ ID NO: 61051 - protein, 328 aa, Eubacterium sp. CAG:180
MSEIKTSAKGIDYAKPCVLKTKSRVYSQAVLMKIPHEHHNEPDISLKIGRYLFPFGKVQNEKPKSELTLDNEELNALISYISENYVPVNLGSGKYINVSDDDEELINKFKELVEKNSDTAELLIEKGILSDNVFVAATSIKKKDALIDFEKNLGETLPESFWQNWFSENKWVLGSDFAQIIDERNIDTENIADYIMRAFDGFVDLVEIKKPNGLQFWSATKDHNNYVPSTDLVKAITQCLNYIYAIEREANSVKFIEKTKSKVIKPRCILIFGRSNDWNDEQREAYRILNAAYNQISILTYDHLLFRAKNVLGITEDIDTTDDDELPF

SEQ ID NO: 61052 - protein, 362 aa, Firmicutes bacterium CAG:321
MNNFNPKYDDNKKDGKIYIYGKNIKENGDNYRKAEAFCDIGKTYTETQYNIEQQAIEFEIKDKVMLYESDAGQTKYWCWLVETEKGNTTTGLHICRRTSKGKVYDEQEVTLNPHAISILKKFLDEIKLYQEDGINKIQTTNNNFNKILTNDEFLKIVEKNIDCIDDYYMLIDIKKKRQAIVELEEIVKGKHGNEVSIQKFLKRNLWLFGNEYTTFVEEEKINSKNILDGIPKTFENFIDVIEVKLPEVELFRYDQHHNNYYTSSDLTKAIAQTQNYIFELENMTSNNEYQENNNCKIIKPRGIILIGTKKDLNEKETEYLRILNSSYHNLYIITYQQLLEKAKNILSLSQKNNFDLEKQNSN

SEQ ID NO: 61053 - protein, 403 aa, Firmicutes bacterium CAG:466
MSIGFIHENNELILIFSPDNIHVQFIVDKLENGEDWHIYRCFSVKKIHLRKKDLDENELYFYIGTVQEEYTYIDNDILRTEHKFYFSNDIKLDKHHFVAYRNISVLAKIDRVVGQDVYIGGNHPNGSIPVDTFELLIKNFPKTTELNYYAQARIATIVKEFFPHVESHEIKFRKFLERREKSLADTFSSNIQTIFHENAAIELRQFKGIRNNLVELLNREQSVSEQVWQEQIHGLLRLLYPKYIAGIREIIIKGIDQHDKRPDFLLIDANGYIDILEIKKPSVQLLTKQSSYRNNYVPVRELSGAIQQIEKYIYCLNAWKKDGEHDIQKQLTGKIPDLVIPKVVNPQGILLLGRSKDFNSQQNMDFELIRRQYKHIAEIMTYDDLLQRIDNIIAALDQELNAQ

SEQ ID NO: 61054 - protein, 403 aa, Mesorhizobium sp. LNHC252B00
MSYDYDERKWFLERRTDKTIISKRIPGMGPGQHLRIATHIVEGEAGLVFGTIKDEVVLRRTPAGRYELKATFLEDDRSISSLTIQKHLSRTGPHDKQHFTLVGPEINTLIGFLAGLETIPLDDASKVHVSDDVVRDLVLNQAQARRIFEKNSDVFLELAQNEEVARDLVALGYRRKQLAHFDRLLNDNAFFSAERQRLGCRPEDVWQRFFEANTWIFGYGLSYQFLSSLNERKLEQIVRGNTLDGAGKRVDGLMKTRGIIGSLCFVEIKRHDTPLLASSRYRPDTWQPSSELTGGVAQMQATVHGAVEQLGSLLTPSSADGDPTGEALSTSSRDPVSSSVRWPNFNLIVGRISRSFAHSSFTGATPIAQKLSRSMSCWSARGSSWNMVQSRWIKVDCQQGCCL

SEQ ID NO: 61055 - protein, 213 aa, Mesorhizobium sp. LNJC405B00
MAKPYFDDHVFSLTDAEAELAEFKTLLDTNTDLAERDQVLSNFKTWPNLCAMMGQYNIRLGIGDLIRREFRILPHFRTDLTVRRAGTDNICLIEFEGASDRHIFEDSERGIDTWARAFERGFSQVVDWTWALDHYRKTGDYVDAFGGERPNIVGVLVVGRSTSLSTTVRKDRWEWRRNKVKADSFTLTLVTFDELYSDFEMWLGLRKMDRAAS

SEQ ID NO: 61056 - protein, 427 aa, Mesorhizobium sp. LSJC285A00
MQAPEITPMQPQSVLADLVSQLEAPKFAQLMRFMANLPIPRDALELPAAAYGVGDTELLVRKLGQPGSLGTWAATWVYQQAYLPIGFWDEISVVTFLKERLTTAKRDLELHPGSHSILYGSAQQKGDGYYIPEATEAFYYLATNIAVSLSDAAMDTIGDHFREHFGRRFAQFGFATPQSMAEAGPNEVRRFTLDLLNSPSSYYFVAREGRISVVPVTEHGLYLTATGEAATAATATSSLSLSPRGFADLEALVNSRATSEADLQAFFTEHPHFLLGLDDVHCEVRPHIVLASPAGTKLVPDFMVRLEDPSHFALIELKKPTARILTGKGEAGQVGKVAAQAIKQLIEYTDAVRTSSARAELRHSIGAAPFDPYLVVLIGRGSPNQRHVWSSTRAGLPSVQLVTYDFLLERARSSRARNEQALAENSV

SEQ ID NO: 61057 - protein, 381 aa, Vibrio sp. JCM 18904
MFEIPNFKPTEEDVIRNSKLETLYNHTFEKGRFFQVIFSDEKEFHIQLAPRTMMKVVYLKEKDDIEGIKLCKLVSGQEKQVIELSKFNMQQLKTFLNFIQELDLKGGIAERRIKLSDDSMDVLDAETKQKITTLLSGSDGGEVVRDLLSQGMITTQDLVNTGYRKSQLEIFKKLLSSNYLPQYKVDIGKPNTKDETAWQHFFAVNQWIFGYGLDYRFQGVLQKEFHASDTNAGGSEGVIADFLMGDNKFTTFVELKLPTTPLFGTAQNRAQSWKLSKELMEAYSQILEQKASGTLKIETTRDLYADDYSEINQNAYDSKTVLIVGNWAQVDNAAEPPGIKKMKRKTLELFRRDSRNVEIITYDELFERASFIVLNEHRANK

SEQ ID NO: 61058 - protein, 296 aa, Psychrobacter sp. JCM 18903
MDDYQNPETGKTYISPRLKAFGHSDRNVRIASKIIDSPHSYAFARVKDEVVLRHKENAKSYITAKFIEDTRGLFLLNIQGYTVATDNPHNASFSFVGDEIGKLLEFIRNIQSVDLDKPSRIKITDEELNKVLLSNAQTKRILHDNQELFAEVLRSEVTKEDIVAVAYRKKQLDVYEKLLNDANYFNKIKGIKKTHNEGLWQKYFEKNSWIFGYGLGYIFLEGLNDKKLEQVVQGHNVNMHGKRVDALMKLEVSYLTYALLKLKHMKLSYLNLRPIGQGVLLHRKSWQVQYLKYKEQ

SEQ ID NO: 61059 - protein, 112 aa, Rhodococcus sp. EsD8
MVQVQQTVRMAVRDLGDYIEERADDGSRTGTGTFIVRPRSFLIVGSLSQLLGQSGGPIDDKVHSFELFRRNLHEPEVITFDELLARAEWHVKLAEGQAAVADGTGVVDDGVA

SEQ ID NO: 61060 - protein, 469 aa, Enterobacter sp. MGH 7; identical to SEQ ID NO: 60037

SEQ ID NO: 61061 - protein, 469 aa, Enterobacter sp. MGH 14; identical to SEQ ID NO: 60037

SEQ ID NO: 61062 - protein, 363 aa, Enterobacter sp. BIDMC 28; identical to SEQ ID NO: 60376

SEQ ID NO: 61063 - protein, 474 aa, Cycloclasticus zancles 78-ME
MANPIIPDKPRGILLEDEQHPGFYSFSFVPPKEKLRDAGLNEDNPMSYIVPILDVNAQDNYIQIFPINTFATHPEFLKYKYPKLKSITLSNFDFGLATNQGEVEEMLDILPSGFVKDFNYGLGFLKDFKFIVDTLEELDFEHLVIDKDGETSLDEENKIITLKYSDYDEIRKGINRVSYATQKTARKVKRASTYNTLCFFIDDKKFPQKPLDIKDTYIERSIAKASDIRDINISESERKHIIKTVSKNARKILGDDSHSLVKLKNEIELVSLEDLMSNFSEMIGKKLAEDKWQDLFQENPFILNLLFGYPIIKIQDQASVGGRKLSGKGDKITDFLSKNVKTNNTAIVEIKNPHAKLLNAREYREGVFSPSGELSGSLNQTLDQRYKLQKEIATIKENTRNYDIETFSVHCVLVIGTTPEGHDERKSFEIFRRNSKDVDVITFDEVLEKLKQLHEFLTSENLENKEDSSHEQNN

SEQ ID NO: 61064 - protein, 361 aa, Enterobacter lignolyticus SCF1
MYYLTECGTKKVLDEMSTYMQSLVNTFEKLALEDSAASILKLQQYLEIRDAGTYEKHIIPYLACRALIYKGVIGIDKIAEVLPTAPGHIYSMAILSSLLQASEGEHAKFMYELTEESAVLSKPIIEDVRTAAKSVFWAFLDDCRADSDSFYRLINLLHHVQFYSMYELESSSSFKKVVFNIFSNSTLRVSDRKINQLGELISSEFREEEYQKFFTENPAFLNPLASKLISKHKLGNEFITDYVLETLTGDYIAVEIEKPTDCIFTKSNNFTHTFTHAFGQVIDFIEWIEQNISYAQKKLPGISSPSGMLVIGVRTTLNKEQEDKLRRFNKNSNSIEVVTFDDLLAKARTLQANIIHRTELL

SEQ ID NO: 61065 - protein, 311 aa, Agrobacterium sp. JL28
MYTRNVLSGFRGGIQVMESLIKDKYIEGFKELLSKTGRQENAIQAFLEQHTTFLPTPGLLNHRLHLNSIISKFPIGERIADYAYLTKSSDEWKLVLVELEDAGKKLFTQSSKHVGFTAEMNDAIAQVDVWREFWNENRRPVLDSLEYLLVPPGMRRNAVSLECVLVIGRSAEKDNNDARRKRLAALRADKQIQVMTYDTILRAVGAGFGEARAILTKTGAGFRLRSVEGLPNNLFTYLLPEHLSVDPAAEAALRAEGYDMDAWFANYPLIVNEKWPDRGAWKRAEEAGMHPNVVRLLKSSEERRRTSGSAT

SEQ ID NO: 61066 - protein, 341 aa, Microbacterium mangrovi
MQGFDVEDYFTAELIEGLAGELAALFAADSRSGIDSVDGILAQRASEPHSRHYIYAIAADAYRMAGVDGVRALASQVRSNTRGTARAYCLRALWRLANGNLPRVFSKIVRAPVAPEVQAASHVAISDLVVDSLGDLELARTFWGEFSRTDLGADPPLALFYVKLAGESQFTLTDKLVTDLEYLISQDLPEAEYQGFLTSNPSLLDVTAAEVRPLAPLGLEFKTDFVLRRHDGRYIVVEIEKPQDRLFTKGADFTKEFTHAVGQVLDFQQWVAENNPYAAKHFPGITTPDGIVILGRRSELDERRTRKLERWQFNSRAIEVLTFDDLAVRARYVLGSLRSSP

SEQ ID NO: 61067 - protein, 95 aa, Rhizobium freirei PRF 81; identical to SEQ ID NO: 60157

SEQ ID NO: 61068 - protein, 522 aa, Alcaligenes sp. EGD-AK7; identical to SEQ ID NO: 61019

SEQ ID NO: 61069 - protein, 405 aa, Cellulomonas carbonis T26
MSGGSGLDDETFYAQGRRPGRTYASRSFEIGQPESRDYGTPARFVYRVFDVPTESEITVDGDEYTVTDVPGGRYQVKVLLAREAGQIKDLWIQRVPAPGTDGRTSQVLNLKRDDAMRFAEFMCSLASVPMEADAERIRVDDDLLRDVFADPDLLGRLYEDRRDAFRAMITSDASARDVIAITHRRQQVTRFRRLLSDREFFDDEATRLHGPERVWQEFLESNPWVLGVSLGAQLFTGFDSARLEQVVAGASIAGPGKRADALLKTAGRVRSLVFAEIKTHATPLLDREYRPGCWSVSREVSGGVAQVQGTVQRAVAQIGQRLPVTAEDGSEVPGEYTYLLRPRSFLIVGDLGQFIGQAGGHDPAKFTSFELFRRQLLEPEIITFDELLARAEWLVDLAQDARDPS

SEQ ID NO: 61070 - protein, 209 aa, Enterobacter sp. DC3
MGIKMNELIALINTDPEESTVQKFFEKHPASIIGTAYALSNALIAKLPLGVDFVTDFTWVNPRSGPTYVYLIEIEKPSKSIFNKDDSFTQSFNHAYGQVEDWLGWYARNQDAFRDILVPLKSHNDLPPFFAVRGILIYGRDSELSNNRREERWVQKGLSNPFVEVRTYDGWGREKNNTIPPHDILSDYLSTVHYSNRSYINKDLPEVNI

SEQ ID NO: 61071 - protein, 209 aa, Enterobacter sp. DC4; identical to SEQ ID NO: 61070

SEQ ID NO: 61072 - protein, 221 aa, Streptomyces sp. HCCB10043
MVFRAAELQRRAVGLDRLRAVAEDRTATEHDLQAALEGQRWIFGGRFVGEAARRRLVPGDEIDIPLIRGDGSLHIVELKRAMSLRKPLVKQHRGAWVPAADVHDAVGQEINYLVGLDENRQKIRRELGIETRRASAVVLIGHPAVQPDVPEQDINEALRTFNSHMSRVEVLTYKELIDNAERSLGSQEAGSPAASSPAEGRSRKPSTDQRLLLMRLDRRGT

SEQ ID NO: 61073 - protein, 408 aa, Marinobacter sp. ES-1
MIRIFKEQARLLLTYQPDRFNDTRWLDEKLRQDGSVTLRRTFTFTNSGLASIGKPLQIDDDSERVFVLGVSEGDYYKVNKDVLGLKYDLRLDRAMKLEPRTFVANRDISIFRKIDELIDEPITVGGADESAIPLADFDQLLKTFPTSTELTHYARSRIARVLKDYFGTLSDAERHLNKYLEKKSRLVTSSRGGLLETFELQKFEYIHAELKEMLREAEEYQEKDWQRKILDLLLFIFPKYIAVLENVQIKDFYSKPGRATNRYIDLMLVDANGSVDIIEVKKPFSDALLSRHKYRDNHTPRTELAGAVMQAEKYLFHLSKWGCTGEQEIYKKHKNELPVDIQMKITNPKALILLGRDKDFTDEQRFDFEIIRRKYANMVDIMTYDDLLRRVENIIAMMKQRVSEGSAQ

SEQ ID NO: 61074 - protein, 408 aa, Marinobacter sp. EN3
MIRIFKEQARLLLTYQPDRFNDTRWLDEKLRQDGSVTLRRTFTFTNAGLASIGKPLQIDDDSERVFVLGVSEGDYYKVNKDVLGLKHDLRLDRTMKLEPRTFVANRDISVFRKIDELIDEPIIVGGSDESAIPLADFDQLLKTFPTSTELNHYARSRIARVLKDYFGTLSDAEQHLNKYLEKKPRLITSSRGDLLETFELQKFEYIHAELKEMLRTAEEHQEKDWQRKILDLLLFIFPKYIAVLENVQIKDFYSKPGRATNRYIDLMLVDANGSVDIIEVKKPFSNALLSRHKYRDNHTPRTELAGAVMQAEKYLFHLSKWGCTGEQEIYKKHKSELPVDIQMKITNPKALILLGRDKDFTDEQRFDFEIIRRKYANMVDIMTYDDLLRRVENIIAMMKQRVSEGSAQ

SEQ ID NO: 61075 - protein, 221 aa, Candidatus Contendobacter odensis Run_B_J11
MHFQSAEEVRAQARRNDPLNEYFVCWDRIAPEDIASLIVVLDCAKREEDIQQFLQENPKFLIQHLGGGHGRWVIPKQKLGSEHVTDFLIAEKHSFGHEWQAVELESPLKPMFNKNGDPSQYLNHAIRQIQDWRAWLLQNQNYAARLKIENGLGLTNISPNLQGIILIGRRAKLRNGTTELRRQMVADLNIRIHTYDYLVEALQGRLKGLVMWSGEQITDEI

SEQ ID NO: 61076 - protein, 162 aa, Serratia sp. DD3
MLSFLLLLFPKYIKVLENNTIHDYYSDPTKKTDRYIDIGLIDTNGNLDVIEAIVFRLPTSELSGSIMQAEKYLFHLSKWGVKGEKKLTTKYANDLPPGMKIRISNPKAIIIVGRDQIGGANMTDSQLLDFEIIKRKYANMMDIITYDDLLRRLNNTIIALGS

SEQ ID NO: 61077 - protein, 385 aa, Methyloglobulus morosus KoM1
MIELDSYKNPKEGKTYISPSLPSFGDRTDKVRIASKVIESQDSFAFGTIKDEVVLRHVEGGKSYITAKFIEDPRGLFLLNLQRYTVGTDKPHNASFSFIGEEIGKLFEFIQNVLSVTFKNDRAVNITDEELRNIVVSNNQARKLFQENEEVFSEIIKSEITKGDIIAIGFRKKQLDVYSKLITDQEYFENLKKQKNTTTEGLWQKFFEKNKWIFGYGLSYLFLSSLDEKKLEQVVQGHDVAGFGKRVDALMKTKGLISSLCFVEIKTHETPLLQKKPYRSGCWAPSQELTEAIAQIQGTVASAVKSLTQKISLSDEHGNPTGEEAYNYLPKSYLVIGSLGEFTKERGVNEDQYRSFELYRKNITTPEILTFDELYERTKYIVQSD

SEQ ID NO: 61078 - protein, 258 aa, Defluviimonas sp. 20V17
MAEYRVSRSGVVLEYRATLQGNAWIMDELKKGEVEISSAFTFRPDDLLVKPTQEEVENDFLFTYRFRLAVASSGYYFISGRKLDIEQDVLIAKSGVEWRRKLFVAERNISIFKRIAKLIPEAEEIIIGGKREDAIPIEVFEDLIARFPNTYEMDRYAEARVTNIIGEYIEPERDFREQYEAYLSKRKSRRSDTPLHAKELLTTEIEKFQFVRDTLKAWLKAGEKSEDQWQKALLSILPLIFPKYVAVIEKVPIDDRYT

SEQ ID NO: 61079 - protein, 154 aa, Defluviimonas sp. 20V17
IDIALVDVNGNIDVIEIKKPEAGILLRKTPYRGNYVPTGTLSGTIMQAEKYLFHLSKGGPAAEEKITLKFRKLLPPNLRIRITNPKAMCILGRDRKDNGHQVFNEGQSGDLEVIKRKYANMIDIITYDDLLRRLDNILASLKRRKANGLDATTL

SEQ ID NO: 61080 - protein, 473 aa, Blastomonas sp. CACIA14H2
MPSVRPSVFNQRERADGGPFLLIEPSEEDDGLSIDVFFTDTPPDDRTGSYPKERLLNVTPSSLRIFPLNVRQGRDDYLTPKYGHLVSITVSRRVDRPYELPQSVEDVQAILEGLPDGFAKDFRFGLGLLWEYRAIPEAFAGQDKITLMIVHGGEEATLDPPFFILGVRRFHEIRKEINRISARYQRDAKRDKDHYAYHMLFHAADQQVFPRLKKTLRADALADATSGGRDRVELSKRDRRAAVGLVRSNLEALAQSDTDALLSLRGEIEQVTLQQLIGRFREMLAKDFPESRWQAFLMQNPFILSLAFAVPAMVVQGQAYAGGKRLSGRGGKVTDFLCASASTGNLAIVEIKKPATDLLGGAPYRGDDVFAASTELSGTVAQVLDQRMILQRELPNLKEQSERYDIHDYGTRCIIVAGVTPSDRARRKSLELLRNALVGVTLLTFDELLKRLEEIHAALSPSAESPTNGEAPF

SEQ ID NO: 61081 - protein, 350 aa, Hydrogenophaga sp. T4
MNLTEIITRYLDTLDEGIDTLSNHKEGKLSKLPSWVLHKRVIQIGITEDREGIVIKITPDSKLESDSVSISTISNARDINRVIFPMRFEGRLPNKEPQDFFTTVGDMSIVEANNPLAVPVLDNQFMIGWGRSLAFSNSFSVENAKKEAVDMWNAATSNLESRKSYIQETKKVLDKFEAIVRRKSFLERRIHRFINEHRSIFLPEHKTCLFEQRLQLNGETRIADFILGREQGLPSIFIELESPVHEVFTKRGDLTAQVNHARQQVSEWVKYVELAPQSNASGELEFLTGPKERMIIIGKDTDKKDRLIDTKHDGTTVWTYSILLQEARRRMNNRLVSQYKMLGLEPTEPF

SEQ ID NO: 61082 - protein, 481 aa, Hydrogenophaga sp. T4
MVTKSVWQSLGIQDQLEGRITFDCEKHAEGGTNVYFSLMPSPNHQIDNTHRWLLLNVSDGLLTIYPFKSTAGGYEPKYEHIDRIVIGQRRHCAWEEPEDDGDVQYLLERIPEGLEANPLNGLGFSSLDRSIPQSISAAASGVLIFVQGEEKPPYLKDGLYVISELYLKRLVRGLRSISSRHQRQARTEKLILAHNSLLSEMDPSKYPPRQKKLSTESVYELVQVGRIKVGIPKASQRSVVGMVADNAQAIAKNAPDVLYELAAKIERVTLQEMIAKYEDMLTKRLNETKWQRFFEANTFILSLVFTVPTVFVQETPYVHGKRINGKGGRFSDFLMRGQGTGNVALIEIKSPETALLTAYRAEQPCPSTELVGSITQVLGQRRRLTTSWHNLKGEDDGTLSNAELYSPQAVVLIGRTPTTKADREAFEAFRNAMKDVAVITFDELLLRLRYLNEALAAQQALPAPLSTPDSPDETDENADLF

SEQ ID NO: 61083 - protein, 435 aa, Pseudomonas sp. BAY1663
MVQFLWQFGDDALDLSPAGQLLEKESLPNRFDAWDTGWKVSGWIGTARFPKQLDSEDAGNLNGIVVFARGRLFHENILDKLNDGRLYTKYLTGQIEADFLDADDAPDIATSDRQRVQEDDPRYGQLIAFLKSRLTQVEKRWTEWRKKHEVEKAKETSPALAEWLDTLPEGYKKSAETLIAKLSALPVDEEEDRKLMYRHGILAFERMKLRGSTEEFVTSIESADRLLAVLADRDSLEASLYRDIVKSRLDAIRDFQTIIDEDAKERVLQKYLFDHLWLLDPAWERATGSPIMESRLTTEGVLIEDMTEKERLGRVDIAYRTNAGKHVIVELKKVGRKMGLLELVEQGQTYVDKLKKILREQNDVSPNIEVIFVLGKTVNEEASNPDRLKSSMTSISPGSRIVHYDTLIRGAQEAYSAYIEKSKSLDKLEKIVDRI

SEQ ID NO: 61084 - protein, 380 aa, Vibrio sp. OY15; identical to SEQ ID NO: 60463

SEQ ID NO: 61085 - protein, 466 aa, Pseudomonas sp. RIT288
MYDGEAVFNPSFRLIPGLPNQEPCRDLYMETFFTLEDPDDPDAWYPHAVDRWHLLASIFSNRIVTYPVFTNPHAKRYLSRRHGRINTVIYEMKYEQALPESSDAALTLIDLYLTSRSWNSCNFGLGLIKDLEPLCAGLMRVAELDTLVVTHDDHIKIDRNCARIPERQIEDLRRTFYKADRRQKERIRAAKHWHVRNAIMAKLAPDKFPALLQVTSTGEMIEYRMASTRRSQAMEKQQQQASVRTVRQNAKQIAKNAPHELLRLHAEIERVTLANMIELFEKKLNQQLSESHWQRFFEDNIFILSMLFARPVQLLHTQFHAQAASINGAGAQIGDFLFRELGQPLAIVEIKKPSSPLMLSSAYRNNKVFGPHQELSGAMTQVLYQQTSLRSNWLVHRADLPGSQPDAIKCIIICGTTPTEPEPRRCFDIFRHACKDVEVVTFDELLDKLKLLLYHLNSSERNEDAT

SEQ ID NO: 61086 - protein, 469 aa, Pantoea sp. PSNIH2; identical to SEQ ID NO: 60037

SEQ ID NO: 61087 - protein, 469 aa, Pantoea sp. PSNIH1; identical to SEQ ID NO: 60037

SEQ ID NO: 61088 - protein, 262 aa, Desulfosporosinus sp. HMP52
MNLYERDYTKILNQDELKAAEAYKEYHAKKGIKCTADAPERSNPNEEVRRFLWHFHSLFPNNYLYHLEPMKILDLEKESREFKKVIYSAKNENEIQSYIKTNRKWFIPASLYKEYNFAHHGAFLFPELSFGAEYVSDYCLLGRSSDGFSIVLVEFEKANVPFMMQTQNSESESVRKGITQIRDWKRWLDDNREYFIRSMGLEAKGIKIPTSRIYYCLVVSRRDLMDQTAADLRSQLICEMQNFKIVSYDRLVDNILAIANGY

SEQ ID NO: 61089 - protein, 472 aa, Pseudomonas sp. WCS374
MADGEQQHHTRWTDDDVLTPSFYLARRPNENGFSANLYLQIFEQVETGSWRSLPEDQWHLLASIDPGWITMYPIYTNPHTQRYRSPRHGNVHCIIYEASHAHNVPDNIDDALLHIDLNLPGKLFNSCDEGLGLVKQLAPLWRGLRLIPRAHTLVICSDGDTSEEGGAVFVRETEVDQCRRACMRISRAKRRSETSAQLHWVMQEVFAGLVPNLIFTGQRIESPSKGAGAVKSAVTYAARQERRSQLNQVKNSVGLLAQEAPRELYELHAEIERVTLAKMIERYQQMLGQELPESHWQRFFEDNMFILSMVFARPVSLLHTQFHARGSMIHGAGAHIGDLLIAQGRELAIVEIKKPSTPLMQSRPYRNQDVYGPHLQLSGAITQVLHQQGLMRSNWLSHLQDRAMRDLHPDTARCVVIAGTKPTEESRRHSFELFRNACKDVEVVTFDELLGKLQLLAEHLVPAGPKPVPDVF

SEQ ID NO: 61090 - protein, 495 aa, Pseudomonas sp. WCS374
MPSMRPSQYAMQQRADGGPFLRFDNGEARGLSEEELEAIESGEYNENDFRGPTHVYYSDVPLPNNAPGWHLILMVTPDYATIYPIIARSENSEYGKPKYDNIKSIVVTAPLYGDYTYPTDQDELDALLGLLPAGLTKDWRYGLGFHYEYRYILQALNDLEGVDTLILHGGPGNSDAKIKGNEFYLGVERLERLRRSLDRLTQRHQRETTADKKLVCYTGLLHKADPQLHPPRERKLPSDLLANLVTLGSVAPRLSSKDQKQVAKLAQQSVPALAKSAPKTLYQLKSEIELITLGELIEVYRRMLESNASESKWQSFLSEHPFVLDMAFGYPVKMISEQPYVGGKNLRGQGGQYSDFLMAAKATGNLALIEIKHPGQDLLGKAYRKTFVPSYELSGSVAQVISQRSVLQKSISNLTDTDDHDERVYAHAVAAIVIIGRTPSKIGEQRAFEQYRNSLKDVLVITFDEMLGRLEGIHQALTPKPPVAHLPLSDEDLPF

SEQ ID NO: 61091 - protein, 477 aa, Burkholderia stagnalis
MAAKKRQRQTRWYTDAEVMEPSFRLEAGVTENGVEYRDLFMQTFEQDTSEPRRWQSLPESDWHQLARVFLKEIITYPVFTNPHALRYLSPRHGPFRTVIYEKSFGSDLPDSAASAVSHIELALPWRTSNQCIFGLGLTRDLEEIWRGLLSLRKLNTLVVARDGALRVDGDTVRIPESEVDRIRRAFERTTRKMRDVAKQARVTHIRNALLAPLDPKRFPPIVQVNPEGQLVEVRLDRGRQNKDAARSGRKATVKAVRANVETLAAEAPEELIELHAEIERVTLAQMIEKYEDMLQKGLPETAWQKFFERNIFILTMIFARPVRLLHTQFHAQGGGLDGTGAQIGDFLLAEKGFAMAIVEIKTPASPLLRPKAYRNREVFAPDEDLSGAVSQVLYQQSKIHENWLIHRVRPELQDSRPDAIKCVVITGMLLKDEMQRRSFEVFRNACKNVEVITFDELLDKLKLLSEHRKRFPSTVCS

SEQ ID NO: 61092 - protein, 485 aa, Burkholderia stagnalis
MAAKKRQRQTRWYTDAEVMEPSFRLEAGVTENGVEYRDLFMQTFEQDTSEPRRWQSLPESDWHQLARVFLKEIITYPVFTNPHALRYLSPRHGPFRTVIYEKSFGSDLPDSAASAVSHIELALPWRTSNQCIFGLGLTRDLEEIWRGLLSLRKLNTLVVARDGALRVDGDTVRIPESEVDRIRRAFERTTRKMRDVAKQARVTHIRNALLAPLDPKRFPPIVQVNPEGQLVEVRLDRGRQNKDAARSGRKATVKAVRANVETLAAEAPEELIELHAEIERVTLAQMIEKYEDMLQKGLPETAWQKFFERNIFILTMIFARPVRLLHTQFHAQGGGLDGTGAQIGDFLLAEKGFAMAIVEIKTPASPLLRPKAYRNREVFAPDEDLSGAVSQVLYQQSKIHENWLIHRVRPELQDSRPDAIKCVVITGMLLKDEMQRRSFEVFRNACKNVEVITFDELLDKLKLLSEHLTPHEEPPREVTQDELPF

SEQ ID NO: 61093 - protein, 299 aa, Burkholderia stagnalis
MLDQGYIIPPATYIEHYETNDGAFDSFDKVTLTPHANWEKLSRGRVLEMIGDEDVELSDRSSTNPRIVAQAERLLFRQDPFIGSRYPESNEVTKRRLEIIGSMVSKASVEALVQSGSGEQELQRLLKTDLSIFGEAYAKPDDEYICFSEFPLADGSVDFVVFTGRSRMDIILIEVKGAEFNLLNANHYKAFNHKITEAAGQISQRLGIIFRDLNSFRKEAHAIRKRAESGDTLYNAFLGPRSKLGVDSDKDINFRCVVIGGRSQNDLEESIKRQDYEAHTTPRIRIESWDTWLRRLQRI

SEQ ID NO: 61094 - protein, 485 aa, Burkholderia stagnalis; identical to SEQ ID NO: 61092

SEQ ID NO: 61095 - protein, 485 aa, Burkholderia stagnalis; identical to SEQ ID NO: 61092

SEQ ID NO: 61096 - protein, 485 aa, Burkholderia stagnalis; identical to SEQ ID NO: 61092

SEQ ID NO: 61097 - protein, 485 aa, Burkholderia stagnalis; identical to SEQ ID NO: 61092

SEQ ID NO: 61098 - protein, 326 aa, Burkholderia stagnalis
MVALLTDLGNKNDGLSVTNAVEVIIKSLLDQGYIIPPATYIEHYETNDGAFDSFDKVTLTPHANWEKLSRGRVLEMIGDEDVELSDRSSTNPRIVAQAERLLFRQDPFIGSRYPESNEVTKRRLEIIGSMVSKASVEALVQSGSGEQELQRLLKTDLSIFGEAYAKPDDEYICFSEFPLADGSVDFVVFTGRSRMDIILIEVKGAEFNLLNANHYKAFNHKITEAAGQISQRLGIIFRDLNSFRKEAHAIRKRAESGDTLYNAFLGPRSKLGVDSDKDINFRCVVIGGRSQNDLEESIKRQDYEAHTTPRIRIESWDTWLRRLQRI

SEQ ID NO: 61099 - protein, 485 aa, Burkholderia stagnalis; identical to SEQ ID NO: 61092

SEQ ID NO: 61100 - protein, 485 aa, Burkholderia stagnalis; identical to SEQ ID NO: 61092

SEQ ID NO: 61101 - protein, 485 aa, Burkholderia stagnalis; identical to SEQ ID NO: 61092

SEQ ID NO: 61102 - protein, 485 aa, Burkholderia stagnalis; identical to SEQ ID NO: 61092

SEQ ID NO: 61103 - protein, 485 aa, Burkholderia stagnalis; identical to SEQ ID NO: 61092

SEQ ID NO: 61104 - protein, 137 aa, Burkholderia territorii
MQSSSSIGVGITSNVALEQSNERVADMAFLVQQAAARQVFLDQLDALARDAGTTEAIMHKALERNLWVFGPEYSLFSSNSTLRRQVEELLGKTYTGDRADKRPDLLLNENLGGDYLLIEFKRPGHALNHNDYVQAIG

SEQ ID NO: 61105 - protein, 137 aa, Burkholderia territorii; identical to SEQ ID NO: 61104

SEQ ID NO: 61106 - protein, 407 aa, Burkholderia territorii
MGDDYEYFRNKRTDRVYLSRSLSDKQFRRAEDGSLEEFERPFRIVSKVIDCAESHQFFRDGRQVSLRITDGARQEIKAKFYEDTRDVSTLSIQRYTVESGSPHSTYFTFVNDEISILYNFLRNIQFLPLRDDQSAKLDDKFVESLVLSREQALELLNQQPDLLDELVRSRVTAREVAELRLRKEQLEEFERLLYDEAHFEKRRLETGKVGGPEAVWQRYFETNTWIFGYGLNYVFNSALDDRKLEQVVRGHDISGAGKRVDALLKTHGLISAVSFGEIKTHETPLLKPVASPYRKECWQISDELAGAIAQVQRSVQVSLANIRSRLDVRGEDGAPSGETLFLYQPRSFLIIGSLAEFRARHGINEEKYSSFELFRRSVTAPEIITFDELYERARFIVEAGEHERRDA

SEQ ID NO: 61107 - protein, 420 aa, Burkholderia territorii
MKTPAIQFKPRGNKLQLIYRPHDGTQWIYRKFKDGDDITVKGTFRLTREILVNDDVDEWSEVDGREPRTDPDEFDFDVGGEDRMDFVIASAKGKYFWFNPEVLAIGVPVLLYRQARPTWKWFCAEKRTSILGVIAQLKTSRIVIGGPEPDAIPVVEFEKLIAQFPTAHELKRYVVARISGIVREYTDAEIDGEEQLRKTVARKVKGTPRDLAAPFREADMRKFEYLLAHLKTMLSKPNEYKETHWQSEIVKIICLLNPKYIEAFTGVRVKDFDRGSYRILDILLLDASGNIDVVEIKRPFGDAMVTPRRYRKNHVPMRELSGAVMQVEKYLLHLTRWGKSGEEELTKRYASRLPPGFKVRVVNPCGIVIMGRDADMTPDQRDDFEVTRRHYKHIADIVTYDDLLRRLEAVLSKLALSAQV

SEQ ID NO: 61108 - protein, 359 aa, Halomonas sp. KO116
MWEAIAYVSSGFTLAAFIAAAVAWILNKKSEEKGRLIELADSSTKALLVQDALEFFHVNSDNLNKEQQFNLALEQIKNRASRFKTIAILVGLIAVLATALSAYAISKMDNSSNNGSPAVPSLQEKSISRSEIFEGLISGLADVNEIRQFIDDNRWMLGGAPVFISGLPEIESVRDFPVEDGFVPNFTRFIFQPRMSQVPDHIIFFDFYSPDLDIFDSSTFLTEHINDKIFRMQKYISSGHENYNEYTDSAAKLANFSIPLSTMQGHFRARFQGVIVVGRRGRLSVQQIEYLSALNKDRNNDVIIITYDTLLEYARLAELYTIKGASLTKQIHADGQSGALPPVICSVSLLGETSHQLRN

SEQ ID NO: 61109 - protein, 404 aa, Streptomyces sp. NRRL WC-3618
MAIFRSSYSLRLMVEEARKLTEHAGVRERIDAVLRIMGDGFGGTYGKGRPLVDALEDVAQQCLLHEEFALAQRFQRFAGYAGGKLFLDTIENYYDAEARQRSEEFMRRMAAMGTERAVSVLEALRAENPDASVTDALALFRGIARSTGHLGIGDGEGGIQLSTKYLKRLQAYGHMELILRDLPRPASAETARMMSEFLEDADAGMLAQLLELRARRAGLASLRAAVNRPESSEGALHSCLRNQEWIFGGAFVAELARRQYTPDTILDIPLLRGDGSLQVVELKRANIEKLVIRPSGQLMLGAPVHQAVSQAQNYLRTLDEGREAILARYGVDTRRASATVVIGHPQYVSEGITPQQVADTLRTYNTHMARIEVITYETLLDSAERLLALSADEQSSGPVDGHTA

SEQ ID NO: 61110 - protein, 399 aa, Streptomyces sp. NRRL WC-3723
MVLERQLGQVRGAAADEAVRSAVDAVFVYMGSGSPGRRRQGKELVRLMEAARKTAAEAGEWHVVRLLQDSLDYAEGRILQQDLEERYRIFQDGARRERSRDFVASSLRTMHQWLVAAGEAYLREHPGASAEETLSHFRAQGEDAAFLRAPDDRPGRYVIPRGAAEISLWLERLLRSERIDVADPAESARRIVGSPQAMALLAADREGRLILQAAELRRRAAGLEELRAVVEDRTATEADLQRALEGNHWIFGGRFVGEAARRRLVPGDEVDIPLIRGDGALHIVELKRAMSLDAPLVKRHRHAWVPAAHVHEAVGQAVNYLVGLDEHRARIREELGIETRRAGALVLVGHPGLHPDVPEGEVNETLRTFNSHVTRVEVLTYKELLDNAERSLAGGVEPV

SEQ ID NO: 61111 - protein, 389 aa, Rhizobium sp. AAP43
MSSEEEIFLNSRPDKTYASPAFTDYTGRKLRIANKYIDGGPGYQFANVKEELVLRQTDAGRFQIKATFLEDDRAFQTVTIQKFTSKGNAKEYFSFGVDEMRALLKFISNIQKIHFPDDGRLNIRDSDLEELLLEPDQLRRVAADNQQLLAAIARNEITTEDVVALSYRKKQLSIFERLLTDADYFDECVAHHGRGPEGLWQRFMEKNHWILGYSLSLINFGPLDERKLEQTVRGHDIDGPGKRVDALLRSRAALTTSAFVELKHHRTDLVAPDQYRSGIWAPSKELSGAVAQVQGTVAAAMDRWGAAVRLTDGDGEPTGETIYTTEPRSFVICGRLSEFEGENGVNERKFASFERFRRNLLRPEIITFDELYERARLIVAANDSSEKRV

SEQ ID NO: 61112 - protein, 212 aa, Sphingobacterium sp. ML3W
MWNIEEVEKKLLKAYLNDSETELLAILKNNTFLFYDLFTRKYGIQPIFRELNFGNEFRCDFAWLNDNSSGPEWVLVEIEKPKMNLFKNDNKPTAPFQAAIEQVKNWDQYFQQHPAEKKRIFGSVARFRLILVTGTHEEWQSEQGKRWRAYHHNNTNIEIRSMQTFWKSLTAIKTKPEEFWSFEEKPKTLSHSALSDYWKNYEYMDNWRGIDL

SEQ ID NO: 61113 - protein, 342 aa, Pseudomonas sp. 10-1B
MTDDEFEKVMHSLKLARDLRLATTTDAHQISDALAFKLSEHFDPEGDMEASLNEHLESIEEEQQRTVRSALGENPDLERLNKLFETDAEFERAIATGNDARNSINRLKEYMQENYLDDEAKEFAALCIRAFADINTMLLEKDVVPLIKRGIYSEDIASAISVWKNSFKDKESDEGFWQEELSARKGILERLIGGHAVFLQREFHVGSTDVEGKGGRRSDFALIDGINNNVTLLEIKTPGTKLLGASYRNTFPLSTELSGTISQVINQKNELMKTFYAKAYKSKSVFEVFSPRCYVIVGDLESLGGDEEKLKAFEVQRQAVAAHVTIVTFDELYHQFSTFNQV

SEQ ID NO: 61114 - protein, 392 aa, Flavobacterium sp. KMS
MDLNYMNTGSVDKTYFARSFVDKFTGQTERFAFKILDDNQTEFILRKEAIIGTSFLGKRALKALFYEDSRNIKKLFLQQFDATELPVKNLSKQASFTEDEIERLYLFLKSIKEVEFPNNQTYNIKDDDLRKMLLDDKQAKKLILENLPQLQEALKNNVTTSDIINYGYRKAQLEIFKKLLYEDGFFDNHKQALILEGELSSKARDEDLWQSFFEKNTWILGYGLEYLFNTELDDKKLEQITSGANFNESGKRIDGLLKSQGAINSLCFCELKLSSHNLLKQVKNSYRPESWQISDSLSGAIAQVQRTIQKAIFDIKTKIEIVDKQGDLTGEELYLYNPKGFILIGNQNEFITEGRINQIKYSSFEMFRKNLKNIEILTFDELYQRAKYICEK

SEQ ID NO: 61115 - protein, 259 aa, Paenibacillus sp. IHBB 10380
MKVYERDYTVLTSTERSEYDLILEKEKVDRLGELDIRVNLFRKYPKAARHFLSLFPNNYLDTVDLENSEEIKSVVNQFLTMLNDGSITNEREIARFIQEIKAYYILGSIFNYYDFGHHEAFIFPEFQLSSTYKVDYLLIGRNSDGYSFIFVELEHPEKQITLADGELGNAFRKGIKQVKDWRSWIFGNFSTLTSTIIKYKHPDKQLPDEFYTFDPTRCNYVVVAGRREDLNDTTRRIRREHLEEQKIRLLHYDNICDIR

SEQ ID NO: 61116 - protein, 407 aa, Mycobacterium sp. NRRL B-3805; identical to SEQ ID NO: 60603

SEQ ID NO: 61117 - protein, 409 aa, Bacillus sp. BH072; identical to SEQ ID NO: 60566

SEQ ID NO: 61118 - protein, 88 aa, Pseudomonas sp. HMSC05H02; identical to SEQ ID NO: 60010

SEQ ID NO: 61119 - protein, 202 aa, Grimontia sp. AD028
MNDLINLVDKEPLEQPVQEFLEKCPSAICGTKYIMGNCVISKLPLGNEYKTDFAYINPQSGYTFLHLVEIEKPGKSIFTKSDEFTKEFNQALQQVKDWLFWCSNNSEYLYNLFEPLRQRSGDSVGYYNARGLLIYGRSSEINNIRRKERWTQQTTENNFIEIRTYDGFAREMSSFLPPNNLYSEMIDTYHYVQREFKPKKLA

SEQ ID NO: 61120 - protein, 421 aa, Paenibacillus sp. VKM B-2647
MSKNQLVQKSEVYAYHTDLRTIHYKMSSNFITSEIILDGFQTFPTHFYKNGGGFTEYISSFAFTEGLKEYMGVGNSHIQKLTISNNKSTSIRKLKGKFSINLHHDDFEKLFTLCIIGKRKGTSLSINSIAEFFHNRFPAFSKYSPDQKTDSELKKMFLSSLDEGLIDKLSKAEIEKVQEFYEKLLGKNSEKHDFILRNVLKVKQISLDSILDDFSEKLAKKTQESSWQKFFEKNIFIFDSRYIDFLPKFNLKSGRKAEPDFLVYDIYGFVDIYEIKRPDTSLIRYDNSHDNYYWSNEMAEAIGQLEKYIFWATENRTSIQHSIKMDRGQEVSIIKPRGVLVIGTNMELNDSKKREDFKILRASLKNIEIILFDEMFNSLQNLRKVTTNVFPLIRNVQKLTVMVVRILTDIMTRTSIQGKEK

SEQ ID NO: 61121 - protein, 402 aa, Leadbetterella sp. JN14-9
MNYIYEKGNDLVLKCVDDISEENWIKKQFADRNLAKIRKAFNFKKSDIIDQRELDAGEEEMDGFEYNFRIGTKVGSYYKLSKSVFGIENDIYIKVGSDFTMKHFVTTNNASVIKRLDDLIIEPLYIGGDESGNGKIPSKEYNELLKLLPNGYEVKLYSNARIESTLSNFLETKESSTTKFNNYLNKKLEQLNNPDLAKLFDEYEIQKLNTILEHLEDMLKSERKYSEKQWQDQILNILILLFPKYIAVFKEVKFKDIYSGKTRRLDYVLVDYLGHIDIIEIKKPMESAMISNSHYRDNHIPKRELSGTIMQIEKYIYYLNKWGKKGEDELTKEYKNCLPKGMKIRITNPNGLIVMGRENNLTIEQLSDLEIIKRKYKNVIDIISYDDLIKRIKITIEQMSKV

SEQ ID NO: 61122 - protein, 298 aa, Streptomyces sp. NRRL S-495
MQTVEADTSPARPRAIDDKQYTAALHNEWKAVLDSAENERSVQEFLEKHPALLPGSNGVAGVGGHHGPLLHCVYREPKLQGLGNYRPDFMWIARHSSVITPVCIEIEDPRKQWFTQGGLPTAEVTQAMDQLVTWKAWFDKPENELWFREFYDLPGGSRGRKPIRPAYFLIYGRNAEFGPGSRHKDPNFLSTKRGFMARADEQFMTFDRLSPDRGACNFVCVTRTSSGREVKYVPPTFETGPSMADTLLRLDGWEDAIRRTDGLEDGRADYLISRVEYWREYARSVETNGPRPYSLDLE

SEQ ID NO: 61123 - protein, 235 aa, Pseudomonas sp. MRSN12121
MIDYVDDEEPDLSALGLVGQVVEAIEDFNNVIVADDVLPLIERGIYASDVARALEVWATNRESKKGDEGFWQEEFESRKGVLERLLGGHAVLLQSEFHVAGTDTSGAGGLRADFAFLNKTSNISLVEIKAPDTKLLGSKYRGTYPLSRDVSGAISQVLIQRGELMKHYFQKQHYAPVSFEVFAPRCFLIAGNLDSLEADPVKLKAFEVQRQAVASHVNIVTFDELYQQFATFNQM

SEQ ID NO: 61124 - protein, 240 aa, Geminocystis sp. NIES-3708
MSKSEIIPSAIIFKSDQQKKLFHNAEDNDIDLSDGVGQFHGIISNAKSENEVHNFLEKYPDFLPGFTNYHLGPAARAIVTKLPLGNDFKTDFAFLAYNSMEVCLTTIEIENPKYNIFNQNGNFSSHFNNARQQVEDWMEWATDNKQQAFDCFGDLGQINWNNTLTKTFKAYLVIGDSDKLELEIEKQRWSNLQSYESKNIYIMSYRRLLQMSSLAHILYNKRLLVCSYKNRQLYVKNVAG

SEQ ID NO: 61125 - protein, 304 aa, Chroococcales cyanobacterium CENA595
MFVNANKGDFPPEEYRVDPHNVTGDDIEKLITLIRKNAGETEIDLLLKNRLPLLSLTSSFFSTGHHRSWIIPQARIKPSGFTNGPGLRPDYLFAGENSDGVTWWVVDLKSPKDTLYKENGDGRIVETDKLRNAISQVDDYITYCTKHQGSIRNTLELTSFSSPYGIIIMGREAELKRDLRKQERKAQFNRRTHTIQIRTFDAFVREVEFHSKCSYKLPFLTKLYKSLFVIDELTHHDRWFIDEDLQIPTSAQLHGLYRISCQLTYMMVQPIHLICINNQTQNLYILAGQSEDIEFQITPTGEVL

SEQ ID NO: 61126 - protein, 417 aa, Berkelbacteria bacterium GW2011_GWA2_46_7
MVREERTLYHQSLKTKDKYFLCIDGKNTNYLAMERSKNKKRTLWYPFWYDRDLKQPKQKYREIKGIGTDYGKIPSTGFTAGINSGYGFTRNQGVDRFFYYLTENLKKEVETVIFTQKETTIERKKLLLNIRDFGRVRSQTKSFTESSSKEEKHLHKTLLHTLLPIKVDEPEKLIYIPGSLKRYMSKYDDASVTLSADDAESVIQNLDVEKQAVLSTKNEVDRIYIEDVISEFKEIMSQKTNTSQLEERWHQFFKKHPWIFTNIFAYPATYFRDKFNVGGQDLSGGSDKIVDFLAKSNFTNNVAFVEIKTHKTPLTQKRPYRKPSIYSVSSHITGSIVQVVDQKTTFLKNFHARKGSEDVESLNSCCLIVVGSIKSLSDKDKRNSFELFRMSNKDVQIVTFDELQEKMETLLSLFIKK

SEQ ID NO: 61127 - protein, 395 aa, Candidatus Beckwithbacteria bacterium GW2011_GWA1_46_30
MALDPETSEEKIVDNYFTDTLYSSREFKGGVGKFFTIVSKDENSVPIEIDIEHSYPIRNKIKTTLTFIKKENEITSISFKRFKYYKKEHWVEQPEEQITFSYSLFKKIIGYLQLLSELNLSDISERRIALADDTLLNINEETKKKIKTLLLSKDGQKIIEELINNGLITSTDIINIGYRKKQLEIFEKLLNQPDYFATYITENKITDTRHESVWQYFFNSNDWIFGYGLDYRFLGILQKEARVSSTDVAGKGDVRNDFLLGCNKFTVLVELKKHDTPLFGKDKNRSNSWTLSDDLISGLSQILEQKASWQVFAETNANGNFDNNGKLIKQKAIDPKSILVIGSTKQFEGEDKENQIKAKTFELFRRDSRNIEILTYDELYERAKFIVEHKKKDSA

SEQ ID NO: 61128 - protein, 397 aa, Microgenomates group bacterium GW2011_GWF1_44_10
MELIDGVAELTQISSGDFRAVKYGQIVIYFDNQCKFHDHFGHTRRTKRFKYYQNLVKYVEENPSIKLYFTLDPAIASFVKVVDGFLINMDAYQLFCRSIERKTEGRLHAFLGQNLDVLSTEERSEFIRAHATDEDVKEALKGFDPQTRENVVAFAKSLPRDQDVPAGSRPSEPSVTVEEFLVAFSKFASDPTVQTAFLKKLPQIQIETLKSHVEFLRANLNQNETFIQNWIDEEDHKHRKKRCLIFGIEYVDPKREGFLNSKRFDILAEQNRNHHVIIELKSPDADIFKVEESANANGGKNTTYNLSPDLSRAIPQVLSYKDWYERTTPEELQGIGIVDRKRVSKCIIVIGQNKPDDEVWMSNLSRLRSSLSGMEIWTYTDLIEKLENTIANLEQNL

SEQ ID NO: 61129 - protein, 397 aa, Microgenomates group bacterium GW2011_GWF2_45_18; identical to SEQ ID NO: 61128

SEQ ID NO: 61130 - protein, 345 aa, Candidatus Woesebacteria bacterium GW2011_GWB1_38_8
MSNLIKTKSTSLASAVGQDIELRCTKSTRLVFRPEVVDNFSDRSACVRGNFIFQRKKISGHWEDYKSLELSKLKDHEWIKLELKSSELKKLIMELDKYYQIYKKYGIRYGETSFVVTPQNARDLIEQFLKNPQNFEKLQELKIDDLKKLNLISSINSLKNVLNVWNENKNNSNESFWQTFFMQNSWIIAQIFAYPVILIQDQAYVGGKGIDNKGGNLVDLLYKNSFTDNVLLVEIKTPTTPITGASYRDKLYCASSDLSGSIAQILDYKHELRRNFNDLTQKSNGVFQVFNPKCMVIIGKLTDDKVSAEHKKSFELFRSNSKQVEIVTFDELFQKVKMLIELLEG

SEQ ID NO: 61131 - protein, 260 aa, Candidatus Woesebacteria bacterium GW2011_GWB1_44_11b
MDIPKRFIKAGNLGYPEEEIIEKQVLKDGTFVKKVAQTVIVDHKTQGRRVESLTIDEFKKTKKNEPWPESATSRISLDHDAVRNLLNYLLAHKEFLKLQRSSFYTLITGTHELSELNASELSGVVSLVQTAAKQGKLAEIVKPEALQNFNAAINQARYKSAIDQLSQMLSNVALSEDDYKKWFLEHHWVFGTDYLGPEDRTKIGWAVKGDIILRSIDGYQDLVELKLPTAEVLKNDPSHNNWFPSTELSKALAQVIKYFQ

SEQ ID NO: 61132 - protein, 409 aa, Candidatus Nomurabacteria bacterium GW2011_GWA1_36_15
MATKKKKKKLEIPEQHFDSKEGKFCVYEIYRKSKKTVYFLRGTQSKHIDKITLEGYEGLPSGLYLYKDGFGLGKKGTFFLSALKTHIAKGKRLGLVVLSKGKKSIRNSSTTVTVSLPVIDIKNLLVRLGRINEDSNNELREAVNSFLSTKFPKKIKISNDDFDEYKGGEVAALLRRNKVAQKLNEEDLESLSKFFPKIFEGSLKGKRKGVKIGRATLINNTKTTTDKIFLDEVIKEFEANLIKKSMSENDWQKFLSEKVFRFMANYVTSIEKQNVSISVSYPDFVLVDVYGFVDVFEIKKRETSLLGFDEDHDNYYWKLDISKAIAQIENYIDEIIHNADDYIRDVKKRKGIDIKVVRPRGYIIAGTSKQFINKKEFADFRKLGSSLKNINFILYDELLENLKNLRSKL

SEQ ID NO: 61133 - protein, 265 aa, Candidatus Nomurabacteria bacterium GW2011_GWA1_36_15
MKFSKEIFNILGWSEKSDDFIIGKDNFSDLQISSTPAIEQFYYFFYQKDRRLIKQFVLNEGKQVDYICRVTLIKKDDKFTPRLSFSVRDKTKKIIENTEVTPTNIKANVSLDECYDNFWKLISFLKSLQDIELPKDKFSLMSQDEGEIVSALRGRGTDSVLNIVKQLFLSPDISLTQKDINSLLKRRDRLAGFKKALSEHSTDEGWWQDFFEENKWIFGYGLNYEILRQQQSQPTYGGVRMDGKGGQRGDNLMSTTGDLNFTVLV

SEQ ID NO: 61134 - protein, 409 aa, Candidatus Nomurabacteria bacterium GW2011_GWB1_35_20; identical to SEQ ID NO: 61132

SEQ ID NO: 61135 - protein, 409 aa, Candidatus Nomurabacteria bacterium GW2011_GWC2_35_35; identical to SEQ ID NO: 61132

SEQ ID NO: 61136 - protein, 409 aa, Candidatus Nomurabacteria bacterium GW2011_GWF2_35_12; identical to SEQ ID NO: 61132

SEQ ID NO: 61137 - protein, 395 aa, Parcubacteria group bacterium GW2011_GWA2_37_10
MDFTKFTFSKKYSRNDRILELSFDFDIKEVTGRNSKTFDDYNSLLYFLLNNPKKQIFLTQTQNSDFCEENDKLVINLQSYQEFCKKIGQNGKNRTQAFLAQRLKNYSEDEKKSIISSSTEEEIIERIKNFTDEEKGIFLEKLKGVEGLKLPEGNIKNISNEEFLKAFSSFLTDPAKQKIVVANYPQIQINLLEEYKQFLEQNLDKEETFIQDWIDGKIDNNGQTNNSDEEEIKKIKKSRCLIFGLEFISHKREGQVSSKQFDILTRISQGKNDYVLIELKSPSSDVFKVKTKNNDNGGTSEEYHLSDDIARAIPQISEYRHLLDNASDIEWQRIGLVRGKISKCLIVIGTKRDDAVWSEHFLSLRKNLSSTIEILTYTDLIQKLETTIRNLRENL

SEQ ID NO: 61138 - protein, 380 aa, Parcubacteria group bacterium GW2011_GWB1_41_6
MKFSKEILNVLSWSQKSDDFIIGKDNFSDLQISSTPAVEQFYYFFDQKDRRLIKQFVLDEKKQVDYICRVTLIKKGDKFTPRLTFSVRDKTKKIIDNQETTPTNIKANVSLDDCYDNFWKLISFLQSLRDIELPKEKFSLVSQNEGEIVSALRGRGTDSVVNIIKQLSTYPDVLLTQKDINSLLRRREKLVGFKQALTEHSSDEGWWQDFFEENKWIFGYGLNYEILRQQQSQPTYGGVKMDGKGGQRGDNLMSTTGDLNFTVLVEIKTPATPLLQGTQEIRNGAWSLSKNLTDALSQIQANIQTWEKQGSEQPENRDKLEKLSIFTVKPKGIIVIGSLSQLVDRNKRETFQRFRKSIHGIDIITYDEIFERAKFIVENE

SEQ ID NO: 61139 - protein, 409 aa, Parcubacteria group bacterium GW2011_GWC1_35_21; identical to SEQ ID NO: 61132

SEQ ID NO: 61140 - protein, 380 aa, Parcubacteria group bacterium GW2011_GWC2_39_11
MKFSKEIFDMLGWSEKSEDFVIGKNNFSDLQINSTPAIEQFYYFFNQKGRNLIKQFILNEGKQVDYICRVTLIKKNDKFTPRLSFSVRDKIKKITEESEIKPTNIKANVSLDGCYDNFWKLISFLQSIREIEIPQDSFSLISQGEVEIVTALRGRDTSSIVNIIKQLSNTEGVKLSQEDVNQLLKRREKLEKFKTGLDNKISDESKWQSFFEKNKWIFGYGLDYHILRQEQAQPHYGGDRVDGQGGQRGDYLTSTMGDLSFTVLVEIKTPVAPLLQGTKEIRNGAWSLSKELTDAVSQIEANIAIWEKDGSRQDDNKDRFESENIFTVKPKGIIVIGSLSQLDTRSKRETFQRFRKSIHGIDIITFDELFQRAKFIVGKD

SEQ ID NO: 61141 - protein, 409 aa, Parcubacteria group bacterium GW2011_GWD2_35_7; identical to SEQ ID NO: 61132

SEQ ID NO: 61142 - protein, 389 aa, Parcubacteria group bacterium GW2011_GWE2_38_18
MSEFGKNKNPSMTYISNAVGRDKNIRYISKVFDIEDFKDFYTDKINKKVYEVIRESGRQEITAIYNEDTSKFSIRIQRFSKESGLPHCQSFSFWGGSLIKFIKFIESLDAFNYSIKDKIKLTDQQVDGLIERKRKLQQLINATDDLSSTEFEYIFKNLKTKDKIEIFKKNLDIMSKVEIENFEAAIKQKEYKKAIDDFEKLLQLEEDGNIVFDIQKHSELTKYFAGQPEKIFQIWLENNLWVFGVEYYKKHSFSVISSDGSKADLVMETADGFINLIELKRPKLQYELFNYDSSHRNYYPTKDFSQSISQCLIYLKRLEEFKTTLEKNQQTKILRPMIKLIIGRTNNFSSEEKQALRLLKSSLHGVDIISYDQILYNAKQIVSFYKLPS

SEQ ID NO: 61143 - protein, 401 aa, Candidatus Magasanikbacteria bacterium GW2011_GWC2_45_8
MIYEEIKNTFKDMFGDYDAYLLSCLNEGRDISDDSGFDAKKVGSNFLSSKLCFLHNTNFKKTIVKAFHIGDSKGKIHHYDIHFVRFQRNKVSEAWQRVEIKDLKDKEVENLNSFLAEQNKLVGKDNSHKYWRLIGSDEPISIGDLSTAINLALKNKDVDFSKLTEGEITNISDLVGKIIDGGNVLVENKLYQNLISSRTSPKSITVYEKDLMDFKKLIADKKTLETDMQDFLKTRVWFFGLNYYQTHQKSKPKFSTTLGSEYDFLLEGFNQVYDIAELKGPNDLMFDEYSSGERKNAFDKRVDYKFSDKFSRALHQVISYMDEFEEHFGLIKEHQPSIQEFLYPKGVIVISKRDLFPKDGKDSQKYLHLTNRQFANIDILTYDDLADRAEIIINFMKEIQN

SEQ ID NO: 61144 - protein, 469 aa, Enterobacter sp. 35027; identical to SEQ ID NO: 60037

SEQ ID NO: 61145 - protein, 469 aa, Enterobacter sp. 35666; identical to SEQ ID NO: 60037

SEQ ID NO: 61146 - protein, 401 aa, Burkholderia sp. LK4; identical to SEQ ID NO: 60979

SEQ ID NO: 61147 - protein, 401 aa, Hyphomonas sp. BRH_c22
MRLEPSLGAALPDAKDAEYFFNTLPGKVIHSKRINDAPSGRGIRILSEIVESAEEVKFTTDLNEITIRETPQGRSRIKATVFEDNRAIKVFTIQRYLRVGSSQVPHKEEHFSFVGEEITRLKKFLASIETISFDGNGKGRISDADLDGLIVGTLQARKLIDKNSEVFVQLMQNENWERDIVALGYRRNQLQNFEKLLNDREYFEAQRALIGGSAERVWQNFFEQNTWIFGYGLSYQFLSALDGRKLEQIVSGVSVSTVGKRIDGLLKTKGALEALCFVEIKTHESPLLKENFYRTGAWVPSEHLAGGVSQLQATVRAASKLLQEHFEAVDREGNPTGELLHNISPGSFLVVGKLSEFETENGPNLQKYASFEDYRRSLIRPTVLTFDELYERASYIVEHAE

SEQ ID NO: 61148 - protein, 401 aa, Burkholderia sp. MSMB0856
MDDEEKIHHNKLPGKTYISPRIYIDAHEAVRIASKVIDSDGLHYATVKKEIVLRRTEKGRTEIVAKFLESTRDLRVLTIQAFNGQTGTPHKTHFSFVGDEIPKLLAFFENIASVEFESQDKINLTDTELSRLVLSREQAASLVQDNQAIFSEVVRQAITKEDVVALGYRKRQVATFARLLNEPTYFDQVKAAKGVKGDEALWQAFFERNRWIFGYGLSYFFVTGFDNKKLEQVVEGHDLINRGKRADGLMKTKGIVSSLCFVEIKTHTTKLLDSTQYRSGCWAPSKELSGAVAQVQTTVASAMRSLSEYIQPTDALGVPTGEEVFNFKPRAFVVVGSLNEFVTERGVNRDKLRSFELYRNSISSIDILTFDELFERCSFIVQSEAERTSGETPTDDTENRT

SEQ ID NO: 61149 - protein, 480 aa, Burkholderia sp. MSMB1459WGS
MASETGSELNAPIEFDHRDVMEPRFRLEVAAAGDIPCRDLYLQTFARSESNSDVWVSLPESDWHLLARISPEKIVTYPVHTNPHAQRYLSPRHGRFATLVYQRVEDELLPDSADDAVALIESRQPWRVFNECIFGLGLKDELDTVWQSLAALPDVDIIVINDGITQVIDQAVWITEDDLDALRRAFDRAKRGQRERVKLAKKTHVRNALLSRLNPERFPPIVEVSSTGRLVQVRLDRMRPSIAVARSERRSTVRAVRANVELLAAEAPGELMALHAEIERVTLVNMIERYESMLQQSLPEGRWQRFFENNVFILTMLFARPVRLLHTQFHAQGSNLDGSGAQVGDFLLGGEGQSLAIVEIKRPTTALMLNAPYRNREVYGPSADLSGAVTQVLYQQSMLHSNWLVHRVSPVLQASRPDATKCVVIAGITPTDETQLRSFEIFRNACKNVEVVTFDELLGKLRLLLSHLSPQEAAPNPVPF

SEQ ID NO: 61150 - protein, 383 aa, Microgenomates bacterium 39_6
MQKYQLTRVSANVATTDDVVIEESGTFRKIFRGVVIKDNPKDPKATLKGYIIVQRKSANDEWQDLSSVKLTELKKDEGIKFELKSLALKNLFEALVNLYSISEQELPWLKEIYVVAKEDEIIRVDEKRKNFVTKLLEQDYGNEVWEQLVQKEPHLATRLAYSRVQTERQTALREFESSLTENKDEAYWQNFFKNNEWIFGLGLRYQYLHLITSQPQYGGGNVFGSGSQRGDYLMDTAADGRFTVLVEIKKPSTDLLGNEEYRNGAWEIGKDLVGGVSQLQVNANKWEVEGSRTDENREELDGITTCSPKGLLVIGHCNQLNSNSKKKTFELYRRNLTNPEIITFDELYERAKFIVNNSAEEVQPQTEVVASFEVELEDDKIPF

SEQ ID NO: 61151 - protein, 294 aa, Sphingomonas sp. Ag1
MRQPPDEALASAFEQLLADDGKNENDIQTFLEQHTELLDTSSWLLNHRLHMNCVIAKFPIAGRTADFAYLTKSSDRWILVLIEIERPNKPLFTTSSKHVGGSSAFNEALAQTAVWRDYWEQHQSEVRERLLPLLVPSPMARNRIELRRVLIIGRSTGKDFNQAQRDRIASIEDDQKIKILTYDSLLRSYRSGWGEKKCVLSPRSTGYAIKHLDGLPKLLFAYVLPEHLSVPASVETRLKAEGYQMSAWRNNQLLRFNEKWASEPTDEEAGDVHPAVLSVIRAADRARPSKAKRR

SEQ ID NO: 61152 - protein, 231 aa, Sphingomonas sp. Ag1
MPVLKIMTDADFDKYEAKEAQRFPGALYGSPSHIRLDWLDAFDAALAAKDEEAIQRCIEQRPYLAQYITPSTGHHGIWLFPKQQIALHQPNGSPGKIPDFLAVAANSDGYTWWIIELKRADVQFANMKADAFSPTANKALVQCTSYLNQFDRYVDTVRSMTGVKEIVRPKSVLLLIGDSRQETPGQTSMRGNVNESLSDRLQVVSYDRIRRHLQSDLGYRRRNRGFAAEVT

SEQ ID NO: 61153 - protein, 334 aa, Enterobacter sp. GN02186
MSLNHSFLIGSDESSELMLNISGLDANAKEVDSLCANFFAHCAKTGTPKFTCKLTIQNLQNLYSHLSSYSMVCDSTSSKTGRFIEVRDNYNEIISILEHADNNSLVMALQHLVSSKLTNNDINTILGRKESLETYEKMLTEPDSYKEADWQRFFETNEWIFGYGLKYKFLKILQREAHISRTDLNGGNDVIADFLISDSRFTKIVELKTPTTKLFTKRQGRSDAWFLSSELTDAVSQILAQKANWEIESQSRNYTTDGELIHEDTFDTECILIIGSLSSIEGSEREKLIKRKTLELYRRNLKNIDILFYDELLERSRYIVRSAEVIEDKLLSAL

SEQ ID NO: 61154 - protein, 436 aa, Streptomyces sp. CFMR 7
MATRSDWALELQLNAVKDQATSPATESAIESALTHIGGSGSRNRRGGKQLVSLLEQARSIAAQAEEWQVVRLLQDSLDYVEGRILKPEFEERYRLFQDGQQRDDILRDYMSMTLWAGSRFVTGKAEEFLEGNPGSSAGDLLDHIFSLGQDALFLEAPADRPGRYTIPRGRAETALWIERVIRRERVDVDDAAVEAHRIAASPEALALLAADSDGQMVFRAAELQRRAAGLDRLRAVAEDRTATEHDLQAALEGQHWIFGGRFVGESAQRRLVPGDEIDIPLIRGDGSLHVVELKRAMSLRNPLVKRHRGAWVPAADVHDAVGQAINYLVGLDENRQKIQRELGIETRRASAVVLIGHPAVQPDVPEQDINEALRTFNSHMSRVEVLTYKELIDNAERSLGSPEAGSSDISSHAGGGDRRSSTDRRVLLMGLDRRET

SEQ ID NO: 61155 - protein, 361 aa, Janthinobacterium sp. KBS0711
MKISDFIHRYPTELGLRTDGICRVRTFVDEQLNLSALLTDLDDKNTAASITNAIETVCGSLVTKGIVPNQCRFVEHYEADSLGSDKFDLVTFTESGVPKWKSITRANLETLIACDKRELDTKTRDEPRLLNEIDRLRNEIDPFLDSPWLESPAVTKRRNDIESRMISKKMIVDLVARGSGEQELQSILKQDLSIFAEVYAQPKDEYICFSEFPVAEGAVDFAIFSGRSRMDVTLFEIKGAEFDLVNKGHYDKFSAKIDIAIDQIRKRSRHIIDNIQEFRVHTHQTRQSVEDGKLLHNSLLGPAGSLEVDPDKDINIRFVVIGGRTRDDLEESRKRHDVERSTHPPIRVESWDTWLRKIRRE

SEQ ID NO: 61156 - protein, 385 aa, Marinobacter subterrani
MEDDYQNPLPGKTYISPSLQAFGDKERRVRIASKILLSEDGYEYAKERDEVVLRKKPDAKTYIKAKFIEDSRQIFVLTVQKFVSETGQPYGSGFSFVGDEIGRFCEFLANIHSVDFKNKAKVNITDEELRKIALTTHQARAFLVDNQELFAEILKSEVTTEDIVAVGFRKKQLSVYDKLLNSESYFDDLRARKKCSNEALWQKYFEKNPWVFGYGLGYIFLSSLDDKKLEQVVQGHSIGSHGKRVDALMKTKGIISNLCFVEIKTHTTALLESKPYRSGCWAPSKELAGAIAQVQGTVASAVENLSSRLTPSDSEGNPTGEEIYNYQPKSYLVIGSLSEFLSEQGVNKDKLRSFELLRKNTSNPEIITFDELYERAKFIVQHNQI

SEQ ID NO: 61157 - protein, 334 aa, Enterobacter sp. GN02457
MSLNHSFLIGSDESSELMLNISGLDANAKEVDSLCANFFAHCAKTGTPKFTCKLTIQNLQNLYSHLSSYSMVCDSTSSKTGRFIEVRDNYNEIISILEHADNNSLVMALQHLVSSKLTNNDINTILGRKESLETYEKMLTEPDSYKEADWQRFFETNEWIFGYGLKYKFLKILQREAHISRTDLNGGNDVIADFLISDSRFTKIVELKTPTTKLFTKRQGRSDTWFLPSELTDAVSQILAQKANWEIESQSRNYTTDGELIHEDTFDTECILIIGSLSSIEGNEREKLIKRKTLELYRRNLKNIDILFYDELLERSRYIVRSAEVIEDKLLSAL

SEQ ID NO: 61158 - protein, 334 aa, Enterobacter sp. GN02534; identical to SEQ ID NO: 60431

SEQ ID NO: 61159 - protein, 216 aa, Phormidium sp. OSCR
MKYFEDIDLNIALCRQELDDLKQHLDNKNELRERRDVLPFFRERRHLSAFIGSYFPYIDQFDKIAYEYDIFGDFKADLVVGDSNSSWYGFVEFEGATENSVFQFKGSKSTPDWSRHFEHGFSQVLDWFWKLSSQEYEREFTYRFGKDFAGYEGMLIIGRSQDLQPREQDRLRWRRDRLMVNSKHIYCVTFDELYSTLNTRLTLIERYHVVNPDESL

SEQ ID NO: 61160 - protein, 469 aa, Citrobacter sp. MGH103; identical to SEQ ID NO: 60037

SEQ ID NO: 61161 - protein, 469 aa, Citrobacter sp. MGH105; identical to SEQ ID NO: 60037

SEQ ID NO: 61162 - protein, 469 aa, Citrobacter sp. BIDMC107; identical to SEQ ID NO: 60037

SEQ ID NO: 61163 - protein, 363 aa, Enterobacter sp. MGH86; identical to SEQ ID NO: 60376

SEQ ID NO: 61164 - protein, 334 aa, Enterobacter sp. MGH120
MSLNHSFLIGSDESSELMLNISGLDANAKEVDSLCANFFAHCAKTGTPKFTCKLTIQNLQNLYSHLSSYSMVCDNTSSKTGRFIEVRDNYNEIISILEHADNNSLVMALQHLVSSKLTNNDINTILGRKESLETYEKMLTEPDSYKEADWQRFFETNEWIFGYGLKYKFLKILQREAHISRTDLNGGNDVIADFLISDSRFTKIVELKTPTTKLFTKRQGRSDTWFLSSELTDAVSQILAQKANWEIESQSRNYTTDGELIHEDTFDTECILIIGSLSSIEGNEREKLIKRKTLELYRRNLKNIDILFYDELLERSRYIVRSAEVIEDKLLSAL

SEQ ID NO: 61165 - protein, 385 aa, Acidovorax sp. SD340
MANEEEIHRNKLTGKTYISPQVPTLNGPLRIASKVIDSEGAYYAKVKKEVVLRRTPTARTEIVAKFLEDDRKLTVLTLQQFNGNNGQPHRTNFSFVDSEIPRLLGFLNDIAEVEFKHTGAVNITDTELHRLVLSKAQAATLFHDNQEVFLEALKSEVTKDDIVALGYRKKQLGVFSQLLSDPEFFELCKKQKSIKGDEPLWQAYFEKNPWVFGYGLSYFYVTGFEERKLEQFVQGYDLLNRGKRADAVLKTRGIINSLCFAEIKHHNTRLLESDAYRAGCWAPSKEMAGAVAQVQATVAIAMHKLHGMQRMVDDDGNPTGEDVFNFKPRAFIVIGSLNEFMGEHGVNQDKLRSFELYRTSITGMDIMTFDELYERSKFIVESAQP

SEQ ID NO: 61166 - protein, 467 aa, Pseudomonas sp. RIT-PI-r
MYDAESVFNPSFDLVPTQQAGEPCRDLYMETFFTFEDADDWYPYPQDQWHRLARIFSDRIVTYPVFTNPHAQRYLTRRHGRIKTIIYEMEYDQVLPETTDGALTLIDMFLTSRIWNNSNFGLGLIKDLETICTELMRLPDIDTLIVTHDDQLRIDRNCARISEKLLDELRRTFDKTGRRLKERIRSAKHWHVRNVLLAKLAPAQFPALVQVTSTGEMVEYRMASSKPSAAMERQQRQASIRTVRKNARQIAKDAPQELFSLHAEIERVTLANMIELFEKKLEQQLTEAHWQRFFEDNIFILSMLFARPVQLLHTQFHAQVSGLDGSGAQIGDFLFRELGQPLAIVEIKKPTSPLMQSSAYRNNKVYGPHAELSGAVTQVLYQQTSLRSNWLLHQCSLQGSQPDAIKCIVISGTTPIEQEPRRCFDIFRHACKDVEVVTFDELLDKLKLLLKHLNHEGSRDEAISKES

SEQ ID NO: 61167 - protein, 344 aa, Pseudomonas sp. RIT-PI-r
MDSNDDIFENLMHSLDLSRDLRKARTVDFNSVSDALSFKLSRHFNPEDDMQEELEDLILEINDHYKKVVKQTIGEKPTLEEFKKELENNQDFKKTIADAKNAQDSIENLIEYITDNHLDNDAKEFASLCISTFTNINSMLLEQDVVPLIKRGIYSEDLASAIEVWKKNVLEKAADEDFWQNELSARKGILERLIGGHALFLQREFHVGTTNKAGKGSKRSDFALIDKLNDNLTLIEIKTPDTKLIGSVYRGTFPLSRELSGTISQVLNQRNELIMNYYSKRYNSETAFEVFAPKCFVIAGTLSNLGKNKEKLKAFKVQRQAVAAHVTVITFDELYHQFSTFNQI

SEQ ID NO: 61168 - protein, 318 aa, Pseudoalteromonas sp. SW0106-04
MAKIKDRLAKIIRDKPRVLTRAIFWKIPHNTSEDEVFLKLGRYNKPKGWLEGETLELDNPKSELTLDSEEFSNLIDFISTNYEPFKQGTKAFLPLDNPYDTSNAEQIKQLLNLPDKQGMLQFLLDNDVIPEDLELGLEHARKSRAIDEFQYLLESDFTENVWQNWFETNSWVLGSDFVKVLDERAIDIHNISDFLMESYDGFLDVVEIKRPEGGLKFWASGLDHNNYYPHSDLIKAITQSQSYIHEIELEANSVKFMERVGYVKTIKPRCTLIYGRSNDWNREQQQAFRVLNSSYHNLTIMTFDHVLERAKRILGKRC

SEQ ID NO: 61169 - protein, 308 aa, Gemmatimonas sp. SM23_52
ELITARLGFDIVLRRADVPPTPPAKPFCLLSVRNTFEFHILGEMLSIEPERPRQPFLVRSAMRLPVGWECIEVFPSASLLNWKPGYAPIWAENDILAAVVSHQIQETRLSTLDPHVGARRYFSTLFQAYQELLDSKPDREEALQRFLAENPALLCPTHIRFWPKLPLGAHVTDFVFQEATGDYLLVELEKSTHRLFRKDGHATEKLNTASGQVLDWRRYIEDNLPTVQRELGLEGISANPRSLIVIGRSSDVSLADRRKITAIENQAPRLKICTYDDVLKNVKAAVENLLGPLWNVEGNTRIYYLRQE

SEQ ID NO: 61170 - protein, 412 aa, Phycisphaerae bacterium SM23_30
MTTRHTYVKNLLDSLSIEDFATVAATLVKETSYDELWGKYGRRVVSESRSSDGRSVTIGQVQPVGPGAVPTLRYFTAIAAPFLVKSFSSEKEAYALFDFLVSSANSACAELATSGEHGADFALFYLVTNMPRTTLNILKKSGLFFQAMDEARQRINALHAISVGNMGVFTADNVAEAADEYQELEECLRRVGQSYGRLVFSQGTNGKILVESAVLSGFRCISLEGTGDLLSKISIPHEVSQDSLSALESLLNSPSVNEGDIQRFLEENPSLLAMGENIAIYPQVVLLRSDGTLLRPDFLLEPVTGPLCTMLDIKMPGERIIVNKKNRPRFSAKIYEYAAQLREYGRYFDTPSQRRWFKDKYGIDAFRPRLVMIVGRDYSAREYGLLKSLRNTLDPIEILTYDELMRQYPEHM

SEQ ID NO: 61171 - protein, 200 aa, candidate division Zixibacteria bacterium SM23_73_3
MNKTYTELSDLLSRDPPEEILHQYLYAHTYLLTDLGYGVKLVFSKPSFGSDFRADFALAGWGNYTCWTFVEIERSSDPLFTKEGLVAQPLNRAIQQINSWWIWLYDYNEYASAEFHKLSGENTAAIVIGRRSSLSPTDLRRLEQLNATQLGGKLRIVTYDALLDSIKDLSNSDLKQLQRKHQRLTQFRSIKEWSKSEYVK

SEQ ID NO: 61172 - protein, 262 aa, Lysinibacillus sp. FJAT-14745
MKLYKNKDYTVLSEEEMNLYEEVKKTENKGRLRRSNKFREYPKAARHYKHLFPNNYLDIVELGDIGKINDICNEYQVLLSSNPGEREMLNFINNNEYYLLIASLFKFYNFGHHGAFLFKEFNIGGHVVDYLLVGKGSGGYEFVFIELEDPSNPSFMANCHYAESYRKGLNQVRDWKSALNRNFSYLSNEFRRATKPGVALPEEFLENDEGRRHYVVIAGRRKHYEVNPRKTYEVRRNESLARIFHYDNLIDYTKELIGKKTF

SEQ ID NO: 61173 - protein, 212 aa, Planktothricoides sp. SR001
MKQFLKFHFNPILCHQQLDEFRYLMQSREFLSEFDDILPFFKQRHQLSALVGSYHAKIIRPDIIAFEYDIFGDLKIDLVVGYSVTNAYCFIEFEDATANSIFVSKAGKSTPEWSPRFERGFNQIVDWFWKLNDFEKTDDFENRFNSRSIDYTGLLIIGRNEHLERREKKRLQWRQKNLVVNYRHITCITFDELYQTLLRRLVQYQFVSQEDN

SEQ ID NO: 61174 - protein, 411 aa, Pseudomonas sp. 655
MNEKEETTSSVEPLVLAFMQGMNHNYMAPLRKYVQENPSLTKTAPGFLLNPEEVIVYIGRTHIAVEYVGSEIAEEINTVGVNIRYHDYSVKECNLFEQIIGFEYDSNSSRLFSMPLPPFSEDLVLPTNKGWDKLSELKWNFAAQNSIMGFNVPSPEAMKGQFTRIVNGMFFDADDSGLKTRHIKWLDFFPIHFDGSDEEFDRIGFDLEEIKQFVEHDAHYSYPMPDDYKYIQLPKINRFIEIWGSSRSTEPDITSHLSKEENKFILTMKFGAKDVFSELTCEWQSENRKNIRPDFFVLQPNGYADIVEFKLPEIDKCFIVGGQNRETFSSWLNSYISQTRVYATYFDDPNNRRWFEEKYGFKVHKPRRWLVVGRRSDFESDVWREIMSDHRDLEIITFDDLIDGVVVQFYK

SEQ ID NO: 61175 - protein, 385 aa, Rheinheimera sp. EpRS3
MDDDYKNPLPGKTYISPSLPDFGNKERQVRIASKILPSEDGYEYVKERDEIVLRKKPDAKTYITAKFLEDSRQTFVLTIQKFVSESGQPYGAGFSFVGEEIGRFCEFLANIQSVDFKNRAKVNITDEELRKIALTTHQAKTFLTENQALFAEALKSEVTTEDLVAVGFRKKQLGYYHRLLHDESYFDKLKIKNKCSNEALWQKYFEKNPWVFGYGLGYIFLSSLDDRKLEQVVQGHSAVSHGKRVDALMKTKGIISNLCFVEVKTHTTALLDAKPYRSGCWAPSKELAGAIAQVQGTVASAVENLSSRINPSDSEGNPTGEEIYNYQPKSYLVIGNMGEFVSEQGVNKDKLRSFELLRKNTTNPEIITFDELYERAKFIVQHNQS

SEQ ID NO: 61176 - protein, 336 aa, Klebsiella sp. G5
MSVDHSYLIGSDGINNLQLNISGLDRESQDISNLRANIFAYCSSTAMPKFTCQLEIDHLRRLYQHLSQYSVIRERTSTTGNFVEVRGNQQEIMQLLEHAESTSLILALQHVINNRLTNDDINTILGRKDALSEYQRMYDNADNHIETEWQRFFERNEWIFGYGLRYKYLSILQREAHISHTDLNGSNDVIADFLITDSRFTKIIELKTPQTNLFVNRQNRADSWRLSNELTDAVSQILAQKANWEVESQRDNYTAEGNLINERTCDPECILIIGTLGDISGTDREKLIKKKTFELYRRNLKNIDIICYDELLERAKFIVRSAEIIEEAIGEALTGS

SEQ ID NO: 61177 - protein, 432 aa, Gracilibacter sp. BRH_c7a
MDEDLLYEFDGEIRYEYPKEKLKTKDKYYFVDKERGIEILSKEVMKKKKEVIHYPFRRDGKKKYSFTKIIYRNMPKNLPVGIMKSPNYGYGFTKEVNPFIYRLQDEFKDLDTLIVDYEGCTEIIDGTIIKLSYEDIKLARERIAPMLSKQSKEKNVIVSNIINNIFPGIVEDEKYDYVSGELANFITSKSITTDNLSISDLTTMTDLISKLDISHLFVKEKGIIATKEKVEKVFLEDIIHKFEELMRQKTETDRLEDKWQDFFRENMLYFNMGYVEKFEKERIQGDKSLNIPDYILLNTYGYLDVFEIKTHITKLLSYDAGRNNFHWSSEATKAISQSENYIDSMMENSKTIMINIRDKYRIEVDVIRPKVYIVASSWDYIAGEDTKDKFVAEKYQKMKNDFRRLNNSLKNIEFVLYDDLLEVFQNTINRIS

SEQ ID NO: 61178 - protein, 376 aa, Alphaproteobacteria bacterium BRH_c36
MNDDVEYLANYKADTLYIHPAAGNKGAYASLLAENEVMIGEIEVTGRSRLAVSAFFVNEKENYGTLKLTKLQYHKTHGWRLDGQITMNPFLVDRMQEFVSLLASLNFKDASKNKISLNGANLDVVDAIMRMERGADVLRTIAESPALSEDIFALAHKKGELEVFRKLLNDDSFKSEYAERHELKAAGAEGVWQHFFEQNPWIFGHGLNYVFLDKIGDKLETVTTGFSHEQPGKRVDALMRTRAVISQYVLIEIKTPTAPLLKAREYRSGCWSLHEGVSEAVTQIQKTTFDFTSNQFHKVQMKEGGRLTGQEVFRIQPKSYLVIGNLAELQGQDDKFTCFQLYRNSLTSPEIITFDELYERAKCIVETISHKQKAST

SEQ ID NO: 61179 - protein, 420 aa, Chryseobacterium sp. Leaf201
MKKQNNIENDLYYFNQRKPEKIYVSKAFPYLHFSRVITTEKRYIKKVFEKDDTSELVEVEGEIILKNIPTLFGKYQVNAVVYSKQDTNLLEFTLQKFIETKDQLRPVKDSAFSFTNREFTELLQFLSDVKFLDFNDKERFVIDSEKFSHHKILLNLTEPDPNKILVDKKFGDLINKLNELDLKERENFLETLKNKILTKTDLDILTGRKDGLEQFKNYLGSEHPITEIQWQDFFKNNSWIFGYGLDYKFLNILQKEASVSSVDVGRKNEVKADFLLGDNNFTVIVELKRPDTPLFDNTQNRSESWRLSKDLTYAVSQILTQKAEWELKSQHTQFDGEGNPIYQSTYNPKAILIIGNTKQFEGENKESLMKRKTFDLYRRNSRDIEIVTFDELLEKAKFIVSDNRQNDEVINLEENDDLPL

SEQ ID NO: 61180 - protein, 149 aa, Rhizobium sp. Leaf202
MFEPLNEHLITEFETCLAEPAPAGRKKEQVVQEFLEANTVLIPTPHRLNHGLHFKSIISKFPITSGLETDYVYLSKSSGSWQITFVELESPDKSIFTGATKTVQPSAEFQQAVSQIEDWRTYLSENKQEILNRLSPLIQPMSRNPINFK

SEQ ID NO: 61181 - protein, 225 aa, Sphingomonas sp. Leaf10
MTDADFDEYEAKEAQRFPGALYGSPSHIRLDWLNAFDAALATKDEEAIQRCIEQRPYLAQYITPSTGHHGIWLFPKQQIALHQPNGSPGKIPDFLAVARNSDGYTWWIIELKRADVQFANRKADAFSPAANKALVQCTSYLNQFDRYVDTVRSMTGVKEIVRPKSVLLLIGDSRHETPGQTSMRGNVNESLSDRLQVVSYDRIRRHLQSDLGYRRRNRDFEEVAT

SEQ ID NO: 61182 - protein, 413 aa, Sanguibacter sp. Leaf3
MARTRPIQEGILDQLDFNKFFGNYVTGQIRAEFLDTDDADDIATSDRQRLVEDDERVQLLLKKLRQMFNDAGSQWSKERPKEKFRQATEKYPTIRDWVDKRPDGQRDAARNMIGTIASLHLDREVDRPALFKAGVLAFERIAIEDTGKELEKLSQGLTASDVLPLLATSRSYEDALYLQILRSRLEAIERLEHLINKDELEKVLQKHLFDNLWLLDPSWEGAAGDSDMEIALSRIRSGALFSKTEAENQKQGRIDIQYRSAAGVHMIVELKRYGRSSKIDDLVEQGNKYHEALREVLEKRQQAHSGINVVFVLGQKPKVGYLGDRTESQFITEKVQHIDGRVLYYDELLHNAQQRYREYREKKRESTALDQVLQSLDELIPEPSGGKSAGSTEDQKGSSSVSTPTPSIMAKKR

SEQ ID NO: 61183 - protein, 406 aa, Serratia sp. Leaf51
MIDFESTTKGIVFKYEPETVGKEWVWRELQQHNEVRISRVFWFELSDLITQPSSNQDFDDYVYDFKFGTLSGDYVIIPARILGISHDLHISKEINLYRGIFAAERSTSIFRRLSGLLDHTSPIVIGGEATGAIPWLVFSELLRKFPNTHELNRYADARVHTILAQYLDGMKDARGRYDAYLQRKATHNVVNLGLEEIKKLEIEKYALIRNLIKDALRNKLNWAERDWQDLMITFLLLLFPKYIKVLKNVTIHDYYSNPVKKTDRYIDIALVDANGNIDVIEIKKPFDDKILRKGEYRGNSIPTAELSGSIMQAEKYLFHLSKWGIKGEQALTKRYESMLPPGMSIHISNPKAIIIVGRDQIGDADMTPQQQLDFEVIKRKYANMMDIITYDDLLRRLDNTILALEG

SEQ ID NO: 61184 - protein, 419 aa, Erwinia sp. Leaf53
MNLNEFSVLCETMLNKYFRFIEKKHEEGRIIDGNGVRVKICYPTMLLCVESEEKIFSVEFLGVTKKFSPLKVKKRSYGNLKDLTLLSHGDFPSQAIISMSDDNSFRGFLFSNEKTLDFYDVQRHPIIDEFKTQFCFKGEATHAFDFTDDFGSGLISNVVLASRSGVFFRAKYISFQLFFSNKSTESFIVQRVNDLIANNDGFIFGVQNFTNSLNESWVRASHLINLVLNDKILETTIGDYINANPEIILDSLGYKGMVYEPLLRWVEKTPDNEDEAINPDALLKRADGFYDICDFKRGLLNRKKVTKADRNRRRFIDDVNEGIAQLDNYAEYFSFPGNNQHALERYNVRVFNPKKILIVGNLENTDRIQVQQALRCRPDIIVVDYDTLISNYYASIKPNKLLLRQKILNILYGKVHLHA

SEQ ID NO: 61185 - protein, 149 aa, Rhizobium sp. Leaf68; identical to SEQ ID NO: 61180

SEQ ID NO: 61186 - protein, 291 aa, Bacillus sp. Leaf75; identical to SEQ ID NO: 60557

SEQ ID NO: 61187 - protein, 213 aa, Methylobacterium sp. Leaf99
MAKPYFDAHVFRLIDAEAELVEFKTLLETNVDLAEREQVLARFRTCPNLCAMMGQYNVRLGIGDLIKREFRILPHFRTDLTVRRAGTDNICLIEFEGASERHIFEDSQRGVDTWARAFEKGFSQVVDWTWALDHYRKTGDYVDAFGGDRPNIVGVLVIGRSTALSTTVRKDRWEWRRNKVKADSFTLTLVTFDELYRDFEMWLGLRRMDAAAS

SEQ ID NO: 61188 - protein, 192 aa, Methylobacterium sp. Leaf99
MLSFKAWLAGRTFFGEAEVVAQIRARAQMCCLLASHAGIRAPDLIRFELALKGLFRTDLVLGNDHFRQFALIEFEDAQADSLFAGGTRQYRHWSRRLEHGFGQVLDWAWIRNDHPNDTVLTAAFGGPIHDSAYLVVCGRDASLVDEMERKRFEHRRFKTRIEGTPVAFLTYDDMVKGMELSLENAKSFAILG

SEQ ID NO: 61189 - protein, 396 aa, Microbacterium sp. Leaf151
MSFAEWIKQIDDLHTWDMSKGDLTTLEIRPGTDAFHYFYDPLENRLIKDFLLDDRPRVSLHCEVRLIDHGGKYSPRVRLWKRDRSKKATQLWETGEIPGSHIVKALVDTGDGHEHFLTLMAYLVELSGVTVGDRAVRVVDATDADIVSALRARSRADVVPMIESVLDSPLNGAEIAALSGRKSDLEEFETLLTDNAHFEREAADGSREAVWQRFFERATWIFGYGLNLVSHAAMDDGKLERITVGNNIFTGAGKRSDAIMRTRALISTLLFCEIKKHDTPLLSPGRPYREPDVYSPSAELVGGTAQLQKTVRKAYRLMINQVEKHTTPDGTPTGLDFSTTRPRQVLLVGSLDEFRTDAGVNAEKMESFELYRRAQAEVEIITFDELLERARFIVAG

SEQ ID NO: 61190 - protein, 504 aa, Rhizobium sp. Leaf311
MVPLEEPTVKQVQVRTEDGSAISLYQYGDGRQVLKIKVTDKVRKHVFDQENSHVFQSGTHEILLAEYEPKHELLITYPTTLLPQSPYFGTDKYLLVQRISLERARPLWDHEEDNSIVGSLHRQFPSGFVCDPFDGFGLIFMLRFIVDAIEEITEVEEIRLCKDKTTSFSNGIFRLPISMYERMRKTLNRTHRAAVEFANEEKRAFLRSDLVLPYLPDHSGKPVFRRTKADLKAVLGSAINSPGRRSQTHPTNESAAVRVVKSSAKELIAENREEILELNREIELVTLEDVISKFEARLADRSLKEGSWQKFLSVNPFILRLAFGLPAVVFKEQMPVGGWDFDNKGGKLADFVMKSGAVGNLAIVEIKTPEAKLLGKTAYRGGIHAPSSGIAGAVTQVLDQRYLLQDHISQLLRNSQEEAHTYAVGCIVIIGTTPTVESYKKSFELYRNNLNGVVVITFDELLDKLKALHAFLVEPPIEDAAEDDDVSEINHYDFDLDEDEDGDE

SEQ ID NO: 61191 - protein, 256 aa, Modestobacter sp. Leaf380
MQEFLEAHPSLLPGGTGDIGPGGHHGSTWGAVITQPSLEGVERDRRPDFMWVTRSTSLITPICIEIEKPGKRWFTQNGRPTAHLTQALDQLTDWKVWFSEPENELLFRRTYLIGDEWRHRQLLPQCVLIFGRRHEFENPDARANAGRLRRKRDFMLRSNESFMTFDSLSPNERHCDALTLKVDSNGPKLWRLPPSFTLGPVAGKAAAALGDPLDAVKKTELWSEARRKYVRDRWNYWAKAFYAPREVRTYDPSRGE

SEQ ID NO: 61192 - protein, 467 aa, Rhizobium sp. Leaf391
MVKSVNSFYNQPDVNEPTLLFTIDLDKKVAGVFPLITYRTSNIYSQKYKKIRSIWFDLPPDDWDAPTDHHSAMEFLKIYLPGGFVQDPTYGLGVTKELRPIIHAVEEIEGVSRIVIGGRETTRHEHSVFYFRESDFSNLRMVFGRTTRRHQQESLMERNILAHNNVLHHVYPEKYRLKEPPYRPGTIYKLVGGQDAAQTVLQGKDRTALLKTVVGNAAAIADRDPKEFVQLQKDLELVSLDKLIRTFEKSLGRNHNESHWQKMLELNPFILSMVFGYPIVIVQAGASVGGGSIAGNGTKIADFLSKNSSSHNAAIVEIKTPQTPVCGTEYRGGVFKPSNHLMGAVAQVLDQRQKFTVSLPMTKYNSPELSSLQAYAVDCVIVVGTMPTEIAQISSFEMVRSQFKDVRIVTFDELFGKLLLLREMLTGERYVSPIDDEEDEGEPPFEIDADDEEDESEFDEEEIIVLR

SEQ ID NO: 61193 - protein, 239 aa, Rhizobium sp. Leaf391
MKFTSEEDVERYFAEQAALFTGAHYGSIRNVESALVVELLNALDDGPEESIQRVLTANPYLFQYAMPNTGHHGVWVFPKRMIRTQQADKTPGLIPDYLVAASSSLGFTWHIVEIKRRDTQFASPNGKSLSAAGLKAVVQSATYLSHFHQYIETVRNNVGIAEIIQPENVIVLIGDSSTETQEQVARRAEFEQLAPRVKIVTYDRIIRGLRSDTHFWTGTDKADQRAVSVGTELQNGETV

SEQ ID NO: 61194 - protein, 210 aa, Methylobacterium sp. Leaf456
MSLFQPLAWSLARAETELDGFRGWLAGQNFVAETPIVAQITARPHLCGLLAAIAGFSAPDLIRFELSLKGLFRTDLVLGNDAARQFALVEFEPAEATSLFSGRSTQQYRPWSRHLEHGFGQVVDWAWIRSDHPHDIALTNAFGGPVQISAFLVICGRDAGMRDEMERRRFSHRGGSVRIDGVSARILTYDGMVREMERNLAVAKSFATLP

SEQ ID NO: 61195 - protein, 347 aa, Nocardioides sp. Soil777
MDVDDYVGRDGMLAFFDDCRQLAEQGKIDELVQGLATKAGRTQEKPEVARIAAGALVLAGQPGIAAIGRFLEEADVGGLRASAALRALWLASQGLPPIVSSVGISYTVEPVSPALQAQARVILDDFIAAAATSAEHSRVLLALQHEESFLSPDGPLPPFAAHILSVTRESSIVLTIALIEEWEALVEQDLPEKKYQDFLEEHPVFVDPLAAEVLNRKRLGVELVTDFVVRRHDFRYVVVEIEKPHDRIFTQANDFGSSFSHAVGQVLDFQGWIAENVAYAQRHLPAVENPHGVLIMGRRSEMTTHQQSKLRRWLHNSKNIEVLTFDDLSQRARALHASLRAGVGSPP

SEQ ID NO: 61196 - protein, 410 aa, Streptomyces sp. Root1295
MTVRSDFALELQLGQVAARAGDSRVKDALTAVSRHMNAGTGRNRKGGRALVGLLEEVRSAAAVANEWQVVRLVQDSLDYAEGRILRPDFEERYELFERSTKPLSSHQDFAARTLSSALSFFSQLGDNYLVEHPGATADEVLAHVAAISRDARYMQQSQERRGRYQILRGSAEVAAWFEQVFTERLDVEDPERAARRIVMSPESLEILAADREGQLLLQAAELQRRRRGLRTLRAVVEDSGASESDVQRGLDGQHWIFGGQFVGQAVQRRLVPGDEIDIPLIRGDGALHIVELKRSMSLHGSLVKKHRGCWVPTAEVHDAVSQAVNYLVGLDEHRLRIRRELGIETRRASAVVLIGHPALQPDVAEEQINEALRTLNTHMSRVEVMTYKELIDNAERALGADASAPSTGWP

SEQ ID NO: 61197 - protein, 391 aa, Sphingopyxis sp. Root1497
MTDNHEFFKLRREGKTYISKVFTYTRNSEPMRNVIIVLEGSDVLHLGEIEGALRLRMSGTKRKTQVTAVVSQDDKSIRRVTLQTFQSRGNEDWYQGYDEHSFTLRQDEYQRLTNFLNEVDFIDLSNPDGFHIEDMSGGARRRAIVDAVDGNLIEQVRSMNSADRAALLGALRNTLTPDEINVLLGRRAALEEFEREMRAGEWPELQWQEFFERQPWVFGYGLHYRVMRPFDREMTVSTGGVDNREKSVIDFLMQFTDYTVLVEIKRPDTPIFKAVRGSESRSGTHVFSDKFTGAISQILEQKAEWLSFAEMGSHYSRDGTKPLMTRTRNAKTILVIGSRDEFAKAPSIRDKRIMQDTFELYRQDLRSIEIITFDELLDRAQFIIRDTSAPE

SEQ ID NO: 61198 - protein, 423 aa, Hydrogenophaga sp. Root209
MTKLAVEFEVSDKELFLIYRPRDDTSWVRDRFERDEDLLVKGTFHLTSKDLVEDAAEEAANAAGDEESVLWIDDDRLVFSIAAAEGEYFRFKPQVLGFETPVLLHRDARPNWKWFSAERKVSILSIVQSLGLERIVIGGSDPDAIPIPEYERLLDQLPTPYELRRYVQARVGTVVRQYTAPAIDAEALLNAYVDRRTTATAPNLEAPFRQFDVVKYAFALERLQAMLANETGTSEAQWQLEIVEIILLLNPRYIKAFTEVRLWDADASTWRRIDILLVDASGNVDVIEIKKPMGKPIMLPVRYRDHHLPMRDLVGAMGQVTHYLRHLSRWGPAGEDYLTQLLSTDLPAGFKIRIINPSGIVIMGRSNTLSDAQRREFEVLRRDSKGIVDIVTYDDLLARVQAVLDQLRNGPALRVSPASPTAG

SEQ ID NO: 61199 - protein, 101 aa, Caulobacter sp. Root487D2Y
MSSEVSNAVTQVQKTTFDFTRRRFRDVLKDAAGNDTAELAYAVEPRSFLVVGNSAELSGNDDKIACFELYRRNVRSPEILTFDELLFRARFIVQNLGGQTK

SEQ ID NO: 61200 - protein, 385 aa, Ensifer sp. Root558
MVDDNAKFFELRKEGRAYLTRVFMQGAINPEKRRLVRSVIEGTERVLIGELEGAMCLRLTGEKRKTQVTALVSQDDGGVRRITLETFQSRAGDWYQGYEKDSFTFRSDEFAKLLAFLESIKFIDRSNEERFEVRDVSVGNGPKIITDASDHAMLTRIKKLDPRERERLFRGFHADLSQKEINLLLGRRQALEEFECQLAAEQWVERSWQDFFERQSWVFGYGLDYRIMRPFDREMMVGAGGTDNRERPTVDYLMNFTDYSVLVEIKRPDTPIFQQRRSGRSGTWRFSNEFMDAVSQVLEQKAEWLVQAHTGLNYDKSGTRRMTARSRDPKAILVIGRGSEIEGCGGARDAEVRRDTFELFRRDTRNVDIVTFDELLDRARFITRD

SEQ ID NO: 61201 - protein, 477 aa, Acidovorax sp. Root568
METEVGAIAEGQQILSGNDVMEAQFKLQEATENGEPAQKLYLKTFQPIDRDMQIWQARPESEWPLLATILANRIIMYPIHANPHTKRYLKPKHGRFTTVIYEDGARSDLPSDPQDAAAHVALRLASSIFDLPGDGLGLIKDLDMVWRVLSLVQQADILAIGKKTEMRLDGRTVFIDQSELDSLRRAFNRTKTRGRSLIQRIQQGLVYDDVLTRINPEKFQRIERVAPPLVRVRRESAAQTSSRERAERRANVQTVRKQVDELAAEAPAELLKLHAEIERATLTAMIGKYRDMLEKKLSELLWQRFFEQHKFVLSLAFARPVELSHTQFHAQGSGLTGSGAQIGDFLFKEQGQALAIVEIKTPDAPLMLATPYRKPHVFGPHSELSGAITQVLHQQSELRTRWQTHVFDNPSLRRSRADVVKCVVLAGRRPIEEHELRCFEVFRNACKDVEVITFDELLVKLEYLQQHLQAVPGEVPF

SEQ ID NO: 61202 - protein, 410 aa, Streptomyces sp. Root63; identical to SEQ ID NO: 61196

SEQ ID NO: 61203 - protein, 400 aa, Lysobacter sp. Root667
MSDDEYYVGNKIPGRIYGSKSFEIKEQPLAEGRTERPPRRARYLDRVFPDVEGEVLAVVKHELVLRTTTTGKRQIKLYVVEDPRGIRSLVLQNFNMGDGGDTPSRNTHFSLFGQEIDDLLEIASLAREGDFQVSGKFRIGVNQLQRLDITPEAVRALVGSDTGLLENVLRNEVTEKDVVAVAYRKQQVKRFESLLRDPVYFKEEQERAAGNGAEAVWQSFFEENHWIFGGTLFLTSAGSIDSGKLERAVAGASVAGYGKRTDALLRTRGRIGALCFVEIKCHTTPLLKSTQYRPGVWAPSEQIVGAISQVQRTIQLAERTIEKSLRPTDSNGNPISDDAYLIRPRSVLICGDLEQFVTPLGVNEDKYTSFELFRRHLQGPEIVTFDELLERAKLMVETSD

SEQ ID NO: 61204 - protein, 346 aa, Pseudomonas sp. Root9
MVEGKAVGKPSYFGLENSDEIPARLLRKLYGEVEADGLMDYVTAGWDSVIENSEAYLQIVTFVQANLVEAFRSTHGMEMRMAHARLQKAVAGRLEKLPQHKREFADRAIKKVLKKYYDEPAHKVQALAFVVLEAVERTEYRSIIEHLAEANRGDIVNLADALESFGLADMAVLVDQAKARLQFLDDLERLVRNEGCLESTVHKAIEVNLWILGAAFTIFSSNITLKRQIEELLKQKYSGALGTTRPDLLLNESLLGEFLLIEFKRPSHPLSFADYQQATRYRHELTGYSAKPIKILVIGGRIDGFPTRELEPGVSCLLFTDIISTARRQIEWQLQRAPGFPGALLM

SEQ ID NO: 61205 - protein, 272 aa, Pedobacter sp. Hv1
MLYQRNYFELSPNEISQLDKAEKYYKKALKKNDGGLDGAEFIRYHEMLPNAYYNYSSLFPNNHILFDFEKHGKVIGQKLEGFAALVEAEETTERDILNYIRTTESYFILESLLMDFYTGNHEAYLFREFALPPNYIVDFLLVGKNSGGYEFIFIEFESPNADITLKDGNLGVAFRNGIKQIEDWDLWLESNFSSLKNVFKKYKNPDVDLPEEFYELDKTRIHYIVVAGKRKDFTPKTYRLKRKNINGVKILHYDNVLDQANFYVYHRHKIQP

SEQ ID NO: 61206 - protein, 397 aa, Frankia sp. DSM 45899
MASDVDAHFAAQRRPGRLYFTKRFSQEGAEVDPNGQIPLQQRMAFQVHDTSDDVRFVRNGGIEEVLRETRHRRDQLKAVFFEDDRRISQLVFQKFSVNGIPRREKTFSLNGEEVEALKRFLALIASTPMGSTEGSRLDSDLIREVLDSPEIVAQLYSSRKDDITKIIQEDETAVDVIAVRRRRSAVKLFENLLEDADYFRRHQQELGKSRPEDVWQHFFEENRWIFGIGLSAQVFLPWDLGRLSQAVAGASIEGAGKRPDALMRTAGTIGSFVFVEIKRPDTQLVRASTYRSATWPPDSEIVGAVAQCHATVDSAIGRWQSQRRRDSDGYDIGFDVHYCRPRSYLIAGHLGQFVREGSCNNEKFRSFENYRRNLTDPEIITFDELYMRARCAVMDLS

SEQ ID NO: 61207 - protein, 333 aa, Rhizobium sp. BR10423
MPLNPYRTGFVASAEEGARLLFRAPGKESWRLDYSPAPRATDVAEKLNPAFYNQQRYTIIECQRELDVARTFPLNVAASSPGFMQGKYDTLRSITLEGFKLADCQNVEDVLEALQALPSGFVKDPYFGLGINFDIRYIIESIERMDGVSDLRVRKGRRTGLPKVEMGTYAISAASFDEIRKRLRRIHAKALDVAADEKFVLTNNELLHAVDPQTFPVVKRRYRKDALSEALGDGLTKTAGLTAGDRKTAARTTSAVAKTMSQREPTTLLALSRTIETVTLEELIVKMKAMLSKRVSESGWQVFFQGQSLCPEDGVRLSGHAYWGSVFGRGAAI

SEQ ID NO: 61208 - protein, 193 aa, Rhizobium sp. BR10423
MLIGDQFSVGGRQFSGKGDKISDFAVKAAASGNLALVEIKTPHTDLLEAKPYRGGLFGPDREITGAVNQILDQRFQLQRSLPIMKDASGIYDVESYAIQGLIIAGMIPTGRDNLKSFELFRNGLKSVSIVTYDEMLAKLEFLYEVFRGDSEQEVQSGAAATTDANGPEDEIDLELETDLEADIDPEADNESRF

SEQ ID NO: 61209 - protein, 241 aa, Sphingopyxis sp. H005
MPTLFEISKPENQARFHKELAEHFPDALYGSRRDFSAKLAGEFDAALALGSEETMQKLIEAHPYLLQYAFKTTGHHGTWAYSKRWIRTNQVNGLPGLIPDFIAAMQNSLGYSWQIIELKRPDVQFSNKRGDGLSTEAHKALAQCGEYMSHFANYIENVRVNVGNERIKQPDGVTIVIGDSRFESEAQRRVRAGFQDLSPKISIATYDRLRRGLLNDVLPSALETPAYDGAQTPDFLSGGPA

SEQ ID NO: 61210 - protein, 241 aa, Sphingopyxis sp. H012; identical to SEQ ID NO: 61209

SEQ ID NO: 61211 - protein, 241 aa, Sphingopyxis sp. H038; identical to SEQ ID NO: 61209

SEQ ID NO: 61212 - protein, 241 aa, Sphingopyxis sp. H053; identical to SEQ ID NO: 61209

SEQ ID NO: 61213 - protein, 241 aa, Sphingopyxis sp. H077; identical to SEQ ID NO: 61209

SEQ ID NO: 61214 - protein, 241 aa, Sphingopyxis sp. H080; identical to SEQ ID NO: 61209

SEQ ID NO: 61215 - protein, 241 aa, Sphingopyxis sp. H085; identical to SEQ ID NO: 61209

SEQ ID NO: 61216 - protein, 241 aa, Sphingopyxis sp. H093; identical to SEQ ID NO: 61209

SEQ ID NO: 61217 - protein, 456 aa, Sphingopyxis sp. HIX
MADPKLKRSDPLPTRRLFDIHVGEDQLVTYPTFTRPTDRFLTGKYAPLQSISFELTEPFSLPDTQEDAVAFLDDRLPPMFIRDPAFGLGVTTLIAPLINVICEIGTIIYLALGSDETHIEGKTFHLNYDDYEDLRLNFGRIARKYQNESKIDRTIAANDMLLHDLDPERFPLRGRPYQTGSIHKLLGGPNLQKTQLKGKDRVGVAQAASANAKTLARKEPLEFAALQRDIELVSLDTLIERFDALMKANASESRWQKLLDANPFILSMVFGYPVVLVASSSPVGGIRFGGNGQKIADFLYKNDRTQNAALVEIKRPDTDLIGAVYRGEVWPPHWKLTGAITQVLDQRAKFIKSLPALKESSEYYAIEANAVDCVIVAGTTPEDRDKRASFELFRAQMKDVRIVTFDELHAKLVMLRELLAAPVGPDDGGAIGAADERAELDEAHLDDADPRQDYDL

SEQ ID NO: 61218 - protein, 456 aa, Sphingopyxis sp. HXXIV; identical to SEQ ID NO: 61217

SEQ ID NO: 61219 - protein, 307 aa, Vibrio sp. 1048-83
MEKRRTPTQQVKKKLMALSGSKCAFPGCGENLTTESGNIIGHIALIESMSPGAPRFNPAKSSSELLDADNYILLCPNHHYLIDKEPEKYSIDWLKAAREQHLKNITKLLSQPEYEHKATTSISLSKALNEWERERENSSEEFWQRLFESCPPLISQAFPKSMYQLGSKCYVGGKSWTNSGGNLVDFIYLNKFTGNIVLVEIKTPKTKLLGKKYRNNAYSISEELSGSVVQVLNYKEQLMKELYQLKDETFNAFNPKCLVIAGSLESEFNNETQYKSFELFRNNSAGVEILTYDELFQKSKDTLAIAN

SEQ ID NO: 61220 - protein, 469 aa, Rheinheimera sp. F8
MASIRPSAFNQRERLDGGPFLIIEAAEPEGEGINVFFTDIPAAERKPDSPIALLLNVCPDRMTIWPLNVREDRDDYLQPKYGTLERIVVARPVIEPYILPETTDDVVGLLEQLPDGFAKDFRFGLGLLWEYRQICETAASLENVSILIVHQGNDAKIDSPFFILGIKRFHELRKELNRIASRHQRDARKDKQFHVYQTLLHAADSAQFPALKKSVRPDALTEMTDGGRQHVTLSKRDRRAAVRMVQDNMKALAVSEPHTLLALKNDIELITLNQLIERYQDMLGKGLAESKWQSFFLENPFILSLAFAVPAMLVQGQAYAGGKRLNGSGGKFSDFLCASASTGNLGLIEIKKPQTELLGKSPYRGDDVFGPSTELGGAIAQILDQRFKLQSELPVIKNNMNRYDLHSYAVRCIVVAGMTPQEHHQRKSFELVRNAFAEIVIVTFDELLARLTEIKNALQPIPTVDTVLF

SEQ ID NO: 61221 - protein, 405 aa, Streptomyces silvensis
MTTFRSGSTLWQLVGAARKLTEDARIRDRVDAVLHIMGGLGGTYGKGRPLVNALEDVAQEAILQSDFAFAQRFQRFAAYAKGELFLDILENYYDDEARQRSEQYMRRMAALGADRAVAVLDVLCRDKPGASAADARDLFRGVAQSVDYLGLGDGEGGIRLSTKEVRRLQEYGHMEMVLRNLPRPASAEAARMMSDVLADVDAGMLAQLLELRARQVGLAALRTAVEDPDSSESALHGCLKNQDWIFGGAFVAELARRQYTPDAILDIPLLRGDGSLHVVELKRANIKDLVIRRSGHLMLGAPAHRAVSQAQNYLRVMDENRPSILTKHGVDTRRASATVVIGHPRYVSGDVTSQEIVETLRTYNTHQARIEVITYEILLDSASRMLALSSARQDVDPEPDEESAA

SEQ ID NO: 61222 - protein, 402 aa, Halothiobacillus sp. XI15
MINFYKEEERVLLFYDGAYGDATWIEDSLEEHGQVTIAKTFTFTKNDVINEPSNYDEPAVFQAATLEEDYYRFPGRTLSVDSDVYIHKDITLKRNKFIAERSISIFGKLDKVTQGPIYIGGKRNDAIPKSTYEHLVKNFPNKHELDKYTSARISSTISSYIETKDDFEEDFHRYMNKKQSRVGNDLHSSLSEFETTKYERILKKLQGMLNQEQTYSEKQWQKEIIQIILLLYPKYLYVFSESPVKDFYKNKNRSIDYLLVDSSGYTDIIEIKKPFDKSIITERTYRDNHIPLRELTGTIMQIEKYIFHLNKWGIKGEQKLTERFRSELPKDFQIKITNPGAIIIMGRTKGMSNEQNQDFEIIRRKFKNVIDILTYDDLIDRLKFTIAQWKKRIPDQRTRAQH

SEQ ID NO: 61223 - protein, 484 aa, Paucibacter sp. KCTC 42545
MATKSVWQALGIQDQLADRITFDCEKCAEGGTDVYFHLMPPPNHLMDMVRRWRLMTVADGLLTIYPFKSTVNGYEPKYEGIDRIVIGRRRHDAWEEPEGDGDVQSLLERLPEGLETNPLNGLGFTSLDRSIPQSIAAAASGVLIFIQGGDKPPYLKDDLYVISELYLKRLVRGMRSISSRHQRQARTEKLILAHNSLLSAMDENKFPPRQKKLSPEAMYELVQVGRNYAGIPKTSQRSVVGMVSENAQAIAKNAPDVLYELAAKIERVTLQEMIAKYEDMLTKGLKETKWQRFFEANTFILSLVFTVPTVFVQETPYVHGKRVDGKGGRFSDFLMRGQGTGNVALIEIKSPETDLLTAYRAEQPCPSTELVGSITQVLGQRRRLTTGWHNLKGEDNGALSNAELYSPQAVVLIGKTPTAKAEREAFEAFRNVVKDVAVITFDELLLRLQYLYEALAAQPAPPPLDVAPPSPDATEGGDESTDLF

SEQ ID NO: 61224 - protein, 506 aa, Bosea sp. PAMC 26642
MSNKQVIFHGVRNEDSATWTLTQDQAGFQELTFEANLIHNGAADLFGAGNSKPARKKHLLADYAPQTRLLRTYPIFTKAGSVYMLDAKYGDIEKLAIENQRSIKEQIDDDETQTSSASDLIDLPSGFQRSMNEGFGLIYPLRYIIEAFDGIEGVSGIVFCRDTEISRDGADIRLPLAHYHEVRRAMKRAHDAALAFAARDKAAYVTSELTDKVLKTVSADAFRQGTDVLREKVAHALSGKRSRARKTANAESAVKTVRAAAKDLATDAPEELYKLNREIELVSLTRLIEVFKEKISKQLSESHWQKFLTANPFILKLAFGYPVSIFGEQVSVGGGKFKLSTGKIADYLVRSGLLGNVSLIEIKKPSTKLLDKAAYRGEVYSPSKELSGSVTQILDQRYRLQQEITQKKENEDIRDIWAYAVQCTVIAGRIPDAKHERKSLELYRSNLRDVAVVTFDELLEKLNSLHEFLSSNSNASTIEPVLLDDEDSSDEPDADWEDVNWEEDDA

SEQ ID NO: 61225 - protein, 202 aa, Grimontia sp. 96-237
MNDLINLVDKEPLEQPVQEFLEKCPSAICGTKYIMGNCVISKLPLGNEYKTDFAYINPQSGYTFLHLVEIEKPGKSIFTQSDEFTKEFNQALQQVNDWIYWCSNNSGYLYNLLEPLRQRSGDSVGYYNARGLLIYGRSSEINNIRRKERWAQKTTENNFIEIRTYDGFAREMNSFLPPNNLYNEVIDTYHYVQREFKLKRNP

SEQ ID NO: 61226 - protein, 279 aa, Achromobacter sp. 2789STDY5608630
MVAFEQSLIDNFELVLANPAPPGRQKEQVVQDFLENHSALIPTPNLLHHGLHFELILSKFPISTELITDYVYITKSSDTWRITLVELESPDKKIFTNNLKGATLSAAFNAALAQVRSWKIFLANDKQELIRRLKPLLQPLGMSGNPIEFNYQLIIGRSAEKNLAADRKKIFREVINESGIEIMTYDQIIARYKTDRRHEKLVARISGSQFWLSHMPFSPNQILAYLGPADLKLTQEQIDHLNADGYEMDKWKGGELLTLNWKYAPSSDDFDPLGGLIKS

SEQ ID NO: 61227 - protein, 469 aa, Enterobacter cloacae 'Hoffmann cluster IV' MGH 34; identical to SEQ ID NO: 60037

SEQ ID NO: 61228 - protein, 261 aa, Chryseobacterium sp. GSE06
MYHFDELTFEQKEKFKEFKKITSSFEIDVEAWCKITDENPYLWHTDSYFPDNFLDDYILRNNYNECNGYINELKLLIENRSCTEREILNFISNDKLFIAAAILKSFTLFGHHDGYIFKEFELPPHYVCDYLIVGKNSDGYHFLLIEFENIYNNITISDGDFGTTIRKGLNQIDDWKSWMDKNFLTFSSNLKRFKNKRETLPDEFNDYDSTRFTYCVVAGRREDYKEKTYRKVRELSKQNIILTHYDKLLEEAEFLLNSGSY

SEQ ID NO: 61229 - protein, 405 aa, Methanosaeta concilii GP6
MEFNEFITLNIEYWNKYFKNLYTKIKKKEINLEEGMLLYPNIMLFTETDKHFILELFGAQRDFKGLKSKTNKKKGISTNIYLCQFDIRDHEEPFLNLADTRGSHFRNLWLSREIDYESLNKRFIFRDIWPTKLIQKSEKNGSLFAFGENFRSCYIDNCIIVNRLEEIYRIKYVLHLTIIGKSFSKCEYLKDISRNLESPLETSDDLTGIHYIKNESEEDHMLAGQFANLFLVPGLRETTIGDFLEKNPDFLRRAFRTLSCRDVLYQKELKWIEGNPYPEKSIKPDLLFERNDGCFDIGDLKTPLLDKGKITKSDHRRRRFTDDVNEGVAQLANYREYFSFQKNRAYAESKYGIKVSEPKLILIVGSYENVIQNEVNEASRTLPLNCMVIDYDTLNLMYLSSFDAR

SEQ ID NO: 61230 - protein, 350 aa, Haloarcula vallismortis ATCC 29715
MEIEQTFDGEIYEIEVPLEDKDRLRHVAHYPIKDGPRTFKSVNVFEVIASDSGKKVISFWKSRLTDSRIEVEEETIFRCQPDELQRLIALLDNLEDIANLERGNHVILAKDAPSVEAAKAAIESIESTDTEESEELAVELIKSVSEIEPAIDDIEGFADELPEDVVNVEYLISRARARNAIDEFRELIQSREPEREYQEFLESHPWIFGARYVDNRDERELTRDEEVDFCLETVNGYYDIFEIKKPDHTVMVEDRSHDNYRPSADLSEAVSQVENYINEIEASRDGILRRDGLDMLKPRGTVVIGADLNSDEREGLRVYNSFLNRIDVVTYSELARKGERLVEAYQTKLD

SEQ ID NO: 61231 - protein, 166 aa, Methanococcoides burtonii DSM 6242
MLEDGEETEHRYQEWIEKYPWILGLQYSLVQRHTQFDNENIPDFTAVRVHDNSRDIFEIKQPFLNLFRKNGVFSSEFNDSWNQIERYLDFARENKDYLRRSKGLNIENPKCYLLIGYNLTHEERDKIRRKEKLNSSIIILTYNDLIQFAENTVGFLKSRLETNDEE

SEQ ID NO: 61232 - protein, 435 aa, Methanococcus maripaludis S2
MKDIIELKREERGNGDILLELKDVKKNQIIKQYLKSGEEKPHIIYKLDISKKKMVYYIRDRNLPDELKTIFVNGYSKRPDGFKKYGQGFTGGNYLLYVLDEKFKDKISKITISKDDKTKFSKKKDKYEFTINYKDFKLINTNLWNISLERAPRSKNAIINHLHNVLPEYFDEKMLEDGFTYKKGELSKILEKNKILENLDKNDIEAINKFYMEFIHSGQMINDKEKIIQITSNKTEWVKIELEELIKTFEKNMDDCLKNKKKLESFWQTFLKQYIILLTKKYRKIIEKNNIKTGKTKIPDFMLVDIYNYIDIYEIKTPITSVLAKLPDKGRGNYYFSTEISKAISQVENYIYELTINAHAKQNEFRNEYGIDAKIIKPRGYIIAGARSQLKNRKMEDDFRLLNNGLKNVEIIFYDDLLANLKHFLERLGDKSKKE

SEQ ID NO: 61233 - protein, 227 aa, Thermoplasmatales archaeon DG-70-1
MRLSSQYEVDFVVLTDQYSLGIGYELIEIETPHMKLFTSRSDPSARLTHSIRQVLDWKNWVEENPNEVKKLFPASLIDRAGKPNFKLTVIVGKRSNIRELLPFRNKYADNLGIHIRSFDYLGDLLRNKHFNPFPTITSPQMRSLSPQVLNQLANPFFKAYGDREWRNIAQSDTFNPYHVIACNADLLLEHREYNGLLFNKFVSFWNSLPDTRKNQVREDLHTMVGAF

SEQ ID NO: 61234 - DNA, 804 bp, Shewanella putrefaciens 200
atgagtttaagtaaaatagaagccaaaaagttgggagaggattttctcaaattacttgatgaagagcacggcgaacaagtctatcaagaattcttagagaagaactctgcgcttatgcccagagagttcatacaaaatcatggacttcattttgacctcgtcatgagaaaaatgtctttagctaaggattacactcctgattttttctacatgtccaagagctctgccgattggaacttggtgcttgttgaaattgaaaagcctcaatctaaatatttcaaaaatgcgaagaacgatcttcacagagattttttggctgggctagatcaaatagcacgttggagagcttggtttgataacacctccaatagagaagcctttataaacggaacaatcgaccctattcgtgtgcctagttcaatgagaagaaatccttgccatataaagtatgtccttgtacacggaaggagaagtgagtttgaaggtaatgacttaaaaaaaggacttatacgtgcccgtgaaacggatgactttaaaatcatgtcgtatgacagtctggctgaatctttacacactaaaggtcatctttatgtaggcgtaagaaaaaatgagacttttgaaatacgttctcctcattttgcgggagaaaacatattttcttgggtggagccttcctacttaaaaataacagcagcactcaaagcagaaattctagctcaaaagaatagttggacaatccacagtcttaaaggtggttttgccttggatcatatattgcccatcattggagagtgtgatgcctga

SEQ ID NO: 61235 - DNA, 957 bp, Shewanella putrefaciens 200
atggcacaaattaaagacagattagttaggataattcgtgataaacctcgtgttctgactagagctatattttggaagattccgcataacacttcagaagatgaagtatttttgaaacttggtcggtataataaaccgaagaattggactgagagtgaaactcttgagctcgatagccctaaaagtgaattaacgctagatagtgaagagtttcacaatttgcttgagtttatctctaataattatgaaccttttaaacaaggtactagagctttcttaccacttgaaaacccgtatgatctttcgaatgctgagcaaattaagcagttattgaatttaccggataaacggagaatgcttgagttccttttggtaaatgaggttattcctgaagatctagagctaggtttagagcatgctagaaaagttcgggcgcttgatgagtttcaatatcttttagagtctgactttactgaaaatgtatggcaaaactggtttgagaaaaatagttgggttcttggtagcgattttgtcaaagtcctagatgaacgagcaatagatacccgtaacatttcagactttctgatggaaagctatgatggtttcttagatatagtagaaataaagcgaccagaaggtagccttaagttttggtctacaggtcttgatcacaataactactatccgagctccgatttaattaaagcgatcactcaatcccagagttacattcatgaagttgagcttgaagctaacagtgttaagtttatggaaagggtaggctacgttaaaactatcaagccaagatgtacgttaatttacgggcgctcaaatgactggaataaagaacaacaacaggcgtttcgtgtgcttaatagtagttaccataacctatcgattatgacttttgatcatgtattggaaagagcaaagcgcataattgggaaacgcggctaa

SEQ ID NO: 61236 - DNA, 975 bp, Chondromyces crocatus
atgagcgacggcacgtcgaagcggatcttgctggtcgaggacgacgaccagaatgcagaggactacaccgcctggctgcaagccgccgggtacgtggtcgagcgcgcagcggccgtcgacgacgggctcgcgcgggccgaggccttcaagcccgatgtggtgatgctcgatctccagctcccctcccaccccggtcgcgcggacgctgacgcggcacacggtcttcgcgcgctggaaggcctgctgagagacgacccctttcggcccgtcgtcatcgccaccgcccacagcaggaaccgggagctgatgcgtgaggtgatgcaacgaaaccgaggcgggcagttcctgttcaaagatgaacgggatctgaagggcgccttgctgcgtgccatcgccgtggccctggcgagccctgtctacgtggcgagccgcaccgtgcgtgccttcgaggcgctcgtcgagcgcaacgagctggaggaaaggtaccgcgagtttctcaagaagaactggcgcatcatcctcgggcctcggtaccgggagtgcaaatcaccccatgacgtggggcgcggggcgaaggtggatctgctgttcgtgcggcatgacgactttccggacctctgggagctgaagcggccggatcagcccgtgctcaagggctatggcgaccgtctccatctgagcgaagagtgcgcgcgcgccgtggggcagctcatggaatacatcgatctcgccgaaaaagaacgcgcagggccgaacagctacgaggcgcgaaaaggtctacaggtgcggctcgaacgaccgcgcggcgtggttgtgatcgggcgccgctccgacgatcgggagcgcgatcatctcgcactccagaacagctttctggccggcatctccatcctgacctacgacgacctcctcgacagcgcgcgcgaaatcctcaccttcctgcgcgactaccggaacggcgacgcggatccctga

SEQ ID NO: 61237 - DNA, 1023 bp, Sorangium cellulosum So ce56
atgcgagggcacctgcttcttcgcgcggttcgtcacatggagggatgcatcatgaacgacaagaacgccccgaaggtgctcctggtcgaggacaacaaggctactgccggcgacttcctgcgcctgctccagctcaacgggttcacggccgagcacgccctcgatgccgccgaagcgctgaacaaggccgccgcgttctcccccgacgtggtcctgctggacctgcagatcccctctgccccgggcctctccgacgaggacgtcgagcacggcttccgcgtgctcgacgcgctcctcgccgctgacccgtttcgccccgtgtgcatcgtgaccgcccacaaccagcccgagctcatccgccgcgcgatgcggcggacgcacggcgctccgttcgtcttcaaggacgacgatctccgccgggccgtgccgaaggctgtgaacgtcgccctcgccagcccggccttcaagatgagccgtaccgttcgcgagttccgtgcgctcgtcgataggaacgaatccgaggacgcctatcgaaaattcatccaccagcactggggtgcgatcctcggccccgagtaccaggacgtccgttcgccgtacccgatcacgcgcggcggggagatcgatctcctcgcgatccgctgggacggtttccctgacctctgggagctcaagcgcccgagcgaccctgttttcaaggactacaacggctggctccatcacagcctggagtgcgcccgggccataggccagctcatgtcctactacgatgcggcggagaaggagccccgcgggccgctcgggtacgacgggcgccggggcatcaccgtgcacctccagcgcccccgcggcttcgtcgtgatcgggcgctatcagagcgatgccgagcgcgagcgtcttcgcctcgagaacggcttcctcgccggcctcgccatcctgacgtacgacgatctcatcgagcgggccgagcagtttctcacgtttctccagcagcaccggaacggcgacgattcccccacataa

SEQ ID NO: 61238 - DNA, 996 bp, Sorangium cellulosum So0157-2
atggacggagggcgcatgagcggcaggcaagccaagcgggtcctcatcgtggaggacgacgagacgaacgccgaggcggcggtcgagtggctgcgggagcagcactaccaagtcgagcgagcttcggccctggaggacggcctcgccgtcgccgagcgcttccagcccgacgtcgtcatgctcgacctgcagatcccctcacgaccgggacgggcggacgagcacaccgacaacggcttccgcatgctggacgcgctcctccgtgccgagccgttccgaccggtcgtggtcgcgaccgcccacagccggaaccgcgagctcatgcgtcaggcgatgcagcgcaaccgcggcggtcacttcctgttcaaggatgaccaggacctccgcgcggcggtgctccgcgccgtcgcggtggcgctggagagccctgcctacgtcgcgcacagcaccgtgcgagccttcgaggagctgatcgcgcggaacccccgggaggaggagatccggatctttctccgaaagagctggcgcgtcctcctcggacctcgctaccgggaatgccactccccgtacgaggtcgatcgcggcgtcaaggtggatctgctcttcgtccggcacgacggcttccccgacatctgggagctgaagcgcccggatcagcaggtcttcaaggagtacggcgaccggctgcaccacagcgaggagtgcgcgcgggccgtcgggcaggtcatggagtacatcgacctcgccgagaagcagaccggagggcaggtgagctacgaggtccgcaagaacgtgcgcgtgtcgttgcaccggccgcgcggcttcgtggtcatcggcaggaccggaagccaaagggagcgggaccgcttggccctcgacaacagcttcatggcgggcatcaccttgatgacctacgacgatctgatcgaggacgcgcgggaggtgctggtgttcctgcgcgactaccgcaacggcggggaggccccctccgtgtga

SEQ ID NO: 61239 - DNA, 972 bp, Sorangium cellulosum
atgaacgagaagaacgccccgaaggtgctcgtcgtcgaggacaacaaggtcactgccggcgatttccttcgcgtgctccagcccaacggattcgcggtcgagcacgccctcgatgccgcagaggcgctgcacaaggccgctaccttcggccccgacgtggtcctgctcgacctgcagatcccctctgccccgggcctccccgacgaggacgtcgagcacggcttccgcgtgctcgatgcgctcctcgctgctgacccgtttcgcccggtgtgcatcgttactgcccacagcgagcgcgagctcatccgccgagcgatgcggcggacgcacggcgctccgttcgtcttcaaggacgacgatctccgccacgccttgccgaaggccgtgaacgtcgcccttgccagcccggccttcaagatgagtcgcaccgttcgtgagttccgcgccctcgtcgaccggaacgaatccgaggacgtctatcgcaagttcatccaccagcactggggtgcgatcctcgggcctgaatacaaggacgtgcgctcgccgtacccgatcacgcgcggcggggagatcgatctcctcgcgatccgctgggacggcttccccgacctctgggagctcaagcgcccgagcgaccccgtgttcagggactacaacggctggctgcatcacagcctggagtgcgcccgcgcgataggccagctcatgtcctactacgatgcggcggagaaggagccccgcgggcagctcgggtacgacgggcgccggggcgtcaccgtgcatctccagcgccccaggggttttgtcgtgatcgggcgctaccagagcgacgccgagcgcgagcggctgcgcctcgagaacggcttcctcgccggcctggccatcctgacgtacgacgatctcatcgagcgggccgagcagttcctcacgttcctccagcagcaccggaacgggaacgattcccccgcgtga

SEQ ID NO: 61240 - DNA, 816 bp, Sorangium cellulosum
gtggtcctgctcgacctgcagatcccctctgccccgggcctccccgacgaggacgtcgagcacggcttccgcgtgctcgatgcgctcctcgctgctgacccgtttcgcccggtgtgcatcgttactgcccacagcgagcgcgagctcatccgccgcgcgatgcggcggacgcacggcgctccgttcgtcttcaaggacgacgatctccgccacgccttgccgaaggccgtgaacgtcgcccttgccagcccggccttcaagatgagtcgcaccgttcgtgagttccgcgccctcgtcgaccggaacgaatccgaggacgtctatcgcaagttcatccaccagcactggggtgcgatcctcgggcctgaatacaaggacgtgcgctcgccgtacccgatcacgcgcggcggggagatcgatctcctcgcgatccgctgggacggcttccccgacctctgggagctcaagcgcccgagcgaccccgtgttcagggactacaacggctggctgcatcacagcctggagtgcgcccgcgcgataggccagctcatgtcctactacgatgcggcggagaaggagccccgcgggcagctcgggtacgacgggcgccggggcgtcaccgtgcatctccagcgccccaggggttttgtcgtgatcgggcgctaccagagcgacgccgagcgcgagcgcctgcgcctcgagaacggcttcctcgccggcctggccatcctgacgtacgacgatctcatcgagcgggccgagcagttcctcacgttcctccagcagcaccggaacggggacgattcccccgcgtga

SEQ ID NO: 61241 - DNA, 972 bp, Sorangium cellulosum
atgaacgagaagaatgccccgaaggtgctcctcgtcgaggacaacaaggccacggccggtgatttcctgcgcctgctccacctcaacgggttcaccgccgagcacgccctcgacgcggcggacgcgctggagaaggcaggcaccttctgccccgacgtggtccttctcgacctgcaaatcccgtcggcaccgggcctctccgacgaggacgtcgagcacggcttccgcgtgctcgacgcgctcctcgccgcggatccgtttcgccccgtgtgcgtcgtgacggcccacaaccagcccgagctcatccgtcgcgcgatgcggcggacacacggcgctccgttcgtgttcaaggacgacgatctccgccgcgccctgccgaaggcggtgaacgtcgccctcgcgagcccggcctttaagatgagccgcaccgtccgcgagttccgcgctctcgtcgacaggaacgagcccgaggacgtctaccgcaggttcatccaccagcactggggcgcgatcctgggccccgagtaccaggacgtccgctcgccgtacccgatcacccgcggcggcgagatcgacctcctcgcgatccgctgggatggctttcccgacctctgggagctgaagcgcccgagcgaccccgtgttcaaggattacaacggatggctccaccacagcctggagtgcgctcgcgccctgggacagctcatgtcctactatgacgcggccgagaaggagccccgcgggccgctcggctacgacgggcgccggggcatcacggtgcacctccagcgcccccgcggtttcgtcgtgatcgggcgctaccagagcgacgccgagcgcgagcgcctgcgcctcgagaacggcttcctggccggcctcgccatcctgacgtacgacgatctcatcgagcgcgccgagcagttcctcacgttcctccagcagcaccggaacggagacgattcccccgcgtga

SEQ ID NO: 61242 - DNA, 816 bp, Sorangium cellulosum; identical to SEQ ID NO: 61240

SEQ ID NO: 61243 - DNA, 1191 bp, Cyclobacterium marinum DSM 745
atgaaacaagaggatttgattaaaacatgtgaaaaatgttttaataattggtttacaaaaattagaaatttacacttaaaagggatagttcgggcatcaggcaatatttattgtgcaaccgaggttcaaacctttgaaagcagtgaccattttattattgagttagctggctctcagccaattatttctttcaaaccgattaaagcttttaaaaaaactataaaagtaaaaaactcaactaaccatctaataggtggtttggaaattaaggatataaacaaaaaaaaagcattattatctatagaaaaatgtagaaagatgcattatatacaatgcgattttttttcaggaattaactctaatttttataaagatttaggtttgggtggtggaaaagaagagatatatgaaattccattttttattgattcagaaagcaattatatattattggacaactgtaaaatgagttatcattttaatgatttgaaatatttctatagagtgatctcttttgctttgttcataaaaaaaaatacaaaaaaagaggccctcgccagattcttaatttcaacatttgataaccagcttaaaagccaatatcccgctttcatgggggtctttatagatactaaaccaaaccttcggttccggcaagaactattaagtctagccaatcaaccagtacatgaaacaagaatagatgactttattaatcaacataacgcattatttgctaaagccctcaattataaaggtgcaagaagtaatattgaattaaaaatcatagataaaaaaggatgggataaaagttctttaatcccagattatatgatggaacgggaagatggaagttatgatatccttgatttaaaaaaaggtctcacaaaaaataatttaactaagggtgggaaatcccggcgtaggctgacttcttattgttatgaacttgtcgctcaacttgaagggtataaaagatacttcgaatcccctttaaatagtcaatgggctttagataattttggaataaaaatgaattattcaccccgcttaattggaattgtaggaaatcaaaatagtttttttcgagaggaaatcgacgaagctcttttagttcatcgggataatattgttctttttagctataatgatatttgtgatttactctcaagtaaaactaaattttcttag

SEQ ID NO: 61244 - DNA, 825 bp, Leptospira interrogans str. UI 09600
atgatatatagatggtctcttcttaatcacgataaaaagattcttaaaaaagtaaaaactgaatggaatgcgcttttaaagaataaaaagttaactgagcatgattatcacaaatttctcagcgaacatgcgggaattatcttatctccgaatgatttcagctacatggtgttatcgaagattaaacttgcagatgattacgaagtggattttgtaacaattgaggataagcgcagtaatggtatgcgctataacttaatagaaatagaatcaccgcattctccaccatttacaaaagcaggcaaaccttctgctagattaacaactgcgcttcagcaaatagatgattggagattttggatcaaagaaaacagagaacagttcaaaaggttgtttccgaacgaaacatacaaagtgtttaaaggtcatttaaattactcattcactatctatattggaaatcgagaaaattctgaacctttcttggaaaaaagaaatgaattggcctctgaaagaaacgtaactataagatcctttgacagtctcggagactacattgattttaatagatttagtgatttagctcctgactatgctgctgaaatgacagaattttcctatgagataagaaatcaactggcatcaccatttttcaaagctactaatcattcaatgtggaaaatatttttaaaacaaagaaaaggcaatgcgcatatttttacatggaacgcatcaacaattgtaaatctcagagaatataataagctctattatgattttataaataaaaaaatatcaaaaacggtgtcatatctcagttcatga

SEQ ID NO: 61245 - DNA, 825 bp, Leptospira interrogans serovar Canicola str. Fiocruz LV133; identical to SEQ ID NO: 61244

SEQ ID NO: 61246 - DNA, 825 bp, Leptospira interrogans str. Kito; identical to SEQ ID NO: 61244

SEQ ID NO: 61247 - DNA, 1365 bp, Leptospira borgpetersenii serovar Hardjo-bovis str. L550
atggcaaaatggaaattaacctatgaagcgttagaatttataggtagggacggggccggatggcccattattaatctaatatctgattcttataatgttgaagataactctatagtccgtgtctctgtaaaagcaaagaatatggttttgaagaccttaccagagaacattgttggagttcgagttttggatattgaaagaattgataaaatgacgggcaaaaactactttgaaagctatcaaattgaagatcttaattttgaattagaagaaagtgatgttaagaagttacgaaaaatacaatttgatctattatccattgacggcggttcattagatttcgattatctaagactttttaatccagatttgtttgttatgaatttaatgaatgtgaaagcattctttgttgatggttatggggtactaagtcatgaagaaggagttttagtattagaaaatttaaataacttttataattcatttacttctgatcaaatcaacgttttaagaattaatcccaaaagtgtctcttatgatgaaaacgaattaattcgtaaatttctcgaacaagatcgacaagtcgtagattcatctagtaaacaaaattacgttaaaaatggaagtaaagttaatctaaaatttctagaagaaaaaattaaagattcggaaataatttctgatataattgattggatagttgaaaacgaggaaaatcctgaattattaaaaaacttcagcaaacttactccggaaaatttaagcaaactaaatacattatccggtattgtaactttaaagaattgtttactacgatgggaggaaaatctactccattcttccgaagacttttggcaaaaagagtttgaagataactcatacgtaatttctcaactttttacatctccagttacaattatgaaatctaaagcttacttaggtggcaagagtattcataatactggaggatcgttagtggattatcttttcgttaataaattaacaaagaacacaagtataattgaattaaaaaccccggccacaagattattaggctcgaattatcgtaataccatttataatatttctgctgaattatctggagcgattgtacagctttctaattataaagacgaacttttaaaaaactattacccgctgacaaatttaaataaaagaatatttcatgcatatgatccttcttgcatactcatagtgggaaatttcgcgacggaattagattccgaagaaaaagtaaaatctttcgagttatttcgacaacaactacagaatattcaaataattactttcgatgaactttttgaaaaaatgcgactattaatacatttattagaaggtagttag

SEQ ID NO: 61248 - DNA, 1365 bp, Leptospira borgpetersenii serovar Hardjo-bovis str. JB197
atggcaaaatggaaattaacctatgaagcgttggaatttataggtagggacggggccggatggcccattattaatctaatatctgattcttataatgttgaagataactctatagtccgtgtctctgtaaaagcaaagaatatggttttgaagaccttaccagagaacattgttggagttcgagttttggatattgaaagaattgataaaatgacgggcaaaaactactttgaaagctatcaaattgaagatcttaattttgaattagaagaaagtgatgctaagaagttacgaaaaatacaatttgatctattatccattgacggcggttcattagatttcgattatctaagactttttaatccagatttgtttgttatgaatttaatgaatgtgaaagcattctttgttgatggttatggggtactaagtcatgaagaaggagttttagtattagaaaatttaaataacttttataattcatttacttctgatcaaatcaacgttttaagaattaatcccaaaagtgtctcttatgatgaaaacgaattaattcgtaaatttctcgaacaagatcgacaagtcgtagattcatctagtaaacaaaattacgttaaaaatggaagtaaagttaatctaaaatttctagaagaaaaaattaaagattcggaaataatttctgatataattgattggatagttgaaaacgaggaaaatcctgaattattaaaaaacttcagcaaacttactccggaaaatttaagcaaactaaatacattatccggtattgtaactttaaagaattgtttactacgatgggaggaaaatctactccattcttccgaagacttttggcaaaaagagtttgaagataactcatacgtaatttctcaactttttacatctccagttacaattatgaaatctaaagcttacttaggtggcaagagtattcataatactggaggatcgttaatggattatcttttcgttaataaattaacaaagaacacaagtataattgaattaaaaaccccggccacaagattattaggctcgaattatcgtaataccatttataatatttctgctgaattatctggagcgattgtacagctttctaattataaagacgaacttttaaaaaactattacccgctgacaaatttaaataaaagaatatttcatgcatatgatccttcttgcatactcatagtgggaaatttcgcgacggaattagattccgaagaaaaagtaaaatctttcgagttatttcgacaacaactacagaatattcaaataattactttcgatgaactttttgaaaaaatgcgactattaatacatttattagaaggtagttag

SEQ ID NO: 61249 - DNA, 951 bp, Leptospira borgpetersenii serovar Pomona str. 200901868
ttgagaccggctctaagtcatgaagaaggagttttagtattagaaaatttaaataacttttataattcatttacttctgatcaaatcaacattttaagaattaatcccaaaagtgtctcttatgatgaaaacaaattaattcgtagatttctcggacaagatcgacaagtcgtagattcttctagtaaacaaaattacgttaaaaatggaagtaaagttaatctaaaatttctagaagaaaaaattaaagattcggaaataatttctgatataattgattggatagttgaaaacgaggaaaatcctgaattattaaaaaacttcagaaaacttactccggaaaatttaagcaaactaaatacattatccggtattgtaactttaaagaattgtttactacgatgggaggaaaatctactccattcttccgaagacttttggcaaaaagagtttgaagataactcatacgtaatttctcaactttttacatctccagttacaattatgcaatctaaagcttacttaggtggcaagaatattgataatactggaggatcgttagtggattatcttttcgttaataaattaacaaagaacacaagtataattgaattaaaaaccccgggcacaagattattaggctcgaattatcgtaataccatttataatatttctgctgaattatctggagcgattgtacagctttctaattataaagacgaacttttaaaaaactattacccgctgacacatttaaataaaggaatatttcatgcatatgatccttcttgcatactcatagtgggaaatttcgcgacagaattagattccgaagaaaaagtaaaatctttcgagttatttcgacaacaactacagaatattcaaataattactttcgatgaactttttgaaaaaatgcgactattaatacatttattagaaggtagttag

SEQ ID NO: 61250 - DNA, 1365 bp, Leptospira borgpetersenii serovar Hardjo-bovis str. Sponselee; identical to SEQ ID NO: 61247

SEQ ID NO: 61251 - DNA, 1194 bp, Elizabethkingia meningoseptica FMS-007
atggaatttgaaaagatagaggatagattaatacttattcatcatatatctgataatataaattatgactgggtaagagataaattagagaaaagtggtgtagtcgtattaaagaaatcgttatcatttttgctaagcgaccgttatcctatagagtatgaaaaggaaccctatgatgaatattttcccccgagcgcatttgtattaggaaagctaattgatgattattatcgtataagtagaagtgttgttggaacaactaataactttttctttcataaggatattgattttaaatctaaatattttatagccgaaactaatctttccgttctaaggcaaattgatggattggtgaaggaagatatttatataggtggtactgctgaaaagagtgtttctctcgaaatttttgataaaatgattgatgaatttcctactacgtatgaaaaaaaaatgtacgcagaagccagggtctcttccattataaaaaactattttgaaactactaaagattcagaactgaaatttcaaaaatatctaaatactaaaacttcaaaaacagggaagaaattgcaaaagatttttcaggattatgaactgcaaaaatttcagacaatccagaagaaacttaatgaaatgcttaaaagcgagaatgagtatagcgaagaccagtggcaaaatgaaatccttgaaataatactattcttatatcctaagtatatcttttcatttaagtcagtatatgtcaaagcggataaaaatagacgtcgatttttagattatatgcttgttgatagtaatggaaatatagatgttatcgaaattaagaaaccttttgaaaatgcaataatgactcattcactctatcggggtaattacactccgcataaggatttgacgggaaccattatgcaacttgaaaagtacatctatcatctcagtcggtatggaagtaccggcgaacgtaatttgacgagtaaatataaagaccaacttccggaaggattggaaataaagataatcaatcccaaaggtatcattattatgggaagagatataaatcttaatgcagaacaaaggaatgattttgaaattgtgagaaggaagtacaaaaatgtggttgatattattacttatgatgacttattacggcggttaaattacacaattgaacaaattcaaaggctataa

SEQ ID NO: 61252 - DNA, 1284 bp, Comamonas testosteroni
atgaccaaacctgccgtcgaattcgaagtctccgacaacgagctctatcttatctaccgcccgcgcgacgacaccagttgggttcgcgaaaggttcgaacgggacgaagagctgcttgtgaagggcacgttccacctcacatcgaaggaccttgtggaagacggtgccaaagaaaaagccaatgctgccggcgatgacgatgacgatgacgatgacatgctgtggattgacgacgaacgattggtgtttgccatcgcgacagcagacggcatgtacttccgattcaagtcccaggtccttggttttgagacaccggtcctgttgcatcaggacgcacggcccaactggaaatggttcagcgccgaacgcaaggtgtccatcctcaacatcgttcaaagcctcggccttgagcgcatcgtcatcggcggcccggatccggacgccattccgatccccgaatacgagcggttgctgaaccagttcccgacgccgtacgaacttcgccgctatgtccatgcgcgtgtcgcaactgtggttcgccagtacaccgagccggcaatcgacgcggaagcgctgctaaatgcctatgtcgacaggcgcaccgtggcgactgcgccaaaccttgaggccccctttcgccagttcgacatcgccaaatacgccttcgctctggaacggctgcaggccatgttggccaacgagacaggaacctccgaggcgcagtggcaattggagattgtagagatcatcctgctactgaatcccaggtacatcaaggctttcgccgaggtcaggctttgggacgccgacgcctccacttggcgacgcatcgacatcctcttggtcgatgcatctggcaacgtcgacgtcatcgagatcaagaagccgatgggcaagcccatcatgttgccggtgcgctatcgcgatcaccatctaccgatgcgcgacctagtcggtgccatggggcaggtcactcattacctgaggcatcttagccgttgggggccggctggcgaggactacttgaccaagctgttgcgagccgacctgcctttgggctttaggattcggatcgtcaatccctccggcattgtgatcatggggcgcagcaacacgctgtccgttgcgcaacggcgcgaattcgaagtgctgcgtcgcgattccaaaggtgtcctcgacatcgtcacctacgatgacctactggcgcgggttcaagcggtgctcgatcagttacgcagcggaccagctctcagcgtggcaccagcgtctccgacggcggaatag

SEQ ID NO: 61253 - DNA, 1284 bp, Comamonas testosteroni; identical to SEQ ID NO: 61252

SEQ ID NO: 61254 - DNA, 1644 bp, Pseudomonas aeruginosa UCBPP-PA14
atggataatctgaaaacacgaatcgtcaattcatacaatgacctgtcagcggacgctgactcattttcggagtcgagcggaaagtcgcgaactgtggtggagccagtgctcaggctgttgcgcaaggcgttactcttggatatttccggtggcgaaaagcgagttcctgatgctgatgaaatcaaagactgggtgctgaaactattcgcgaaaaatcccaccgttggtgacatggtgcgagcccttctattgattaaggaggatctagttgttagcgagcaccaactgccttctatcgaagaggcactgcgcgaaatcggcctattggagcagctccacttgccagacttcttcttcgtttcctcggagttggagggagagccttgtggtgtactgttcgaacgttatgaatcggacggtgaagtcctcgtgtttctggccactctcttcgataagaagaacctaatgcaaaaggttggcaggatggcgattcgtgtcagcaaagagtctcctgagcctttcttgtccatctgtaccccggacggctggcttagggtgccaaaaaatcagatcgtgccgggttcagtcagttccttcacggtccaatgcctgcttgaatataagtattacatttatcccactctgcccttgagctccattattgctcccgaattgactaggagaaaggataacattcatttagtaagcctgataaaagaggcttatctggacaaagtagtttgcacacgagtccgcgttcccctagacgtcgtgcaaccacgagacatcgactatgcactgcatacgccggatgagcagatacgagattgtatgccttatgcggcacatactgagttcctgctatacgaagaggatggagtgcttatcatggatgatgactataccccgtatttagcctgccaagcgctcagggtcaaggaagtcacagcggtcatcttgggtaagtttaaccagtcgcgggccaaagttctttccattgggtacagcgagcttatgtctcccatctccgtttcacccagtgcacaccagtcgcagaagcgccttagagacaagcaagagcttcttaagaaaaaattacaatccctgaggccttccttcctcccggcggcaaaaatggagaggagtttcattgagttgtgctggttactgaacagggttaaaactcgggaaagagatctacacagattcctgaaggaaaattaccagatactggactctcacctggcggcaatcttcagcgaagtacccataggcaagtatcgggcagacctagttctgcagtatcaccagtctgacaagcgtgtggtgctggtcgaacttgagccacacgataagaaaatttttaccaaaaaaaatcgccttaggcaccaggtgactcatgctctacagcaggtagaagattggatacaggaaatacatagaggcgtacccaatataccaggctggcttcagggaagttacactgcagaaggcatgatagttattggacgctcgaaagacctgacagaagagcagagggaaactctcgcgctgaagaatgccaaatccagcatcaagatactgacctacgatgatttgctggagcgcctgtctcggcttataaaaacgcttgacaaggaatag

SEQ ID NO: 61255 - DNA, 1644 bp, Pseudomonas aeruginosa HB13
atggataatctgaaaacacgaatcgtcaattcatacaatgacctgtcagcggacgctgactcattttcggagtcgagcggaaagtcgcgaactgtggtggagccagtgctcaggctgttgcgcaaggcgttactcttggatatttccggtggcgaaaagcgagttcctgatgctgatgaaatcaaagactgggtgctgaaactattcgcgaaaaatcccaccgttggtgacatggtgcgagcccttctattgattaaggaggatctagttgttagcgagcaccaactgccttctatcgaagaggcactgcgcgaaatcggcctattggagcagctccacttgccagacttcttcttcgtttcctcggagttggagggagagccttgtggtgtactgttcgaacgttatgaatcggacggtgaagtcctcgtgtttctggccactctcttcgataagaagaacctaatgcaaaaggttggcaggatggcgattcgtgtcagcaaagagtctcctgagcctttcttgtccatctgtaccccggacggctggcttagggtgccaaaaaatcagatcgtgccgggttcagtcagttccttcacggtccaatgcctgcttgaatataagtattacatttatcccactctgcctttgagctccattattgctcccgaattgactaggagaaaggataacatccatttagtaagcctgataaaagaggcttatctggataaagtagtttgcacacgagtccgcgttcccctagacgtcgtgcaaccacgagacatcgactatgcactgcatacgccggatgagcagatacgagattgtatgccttatgcggcacatactgagttcctgctatacgaagaggatggagtgcttatcatggatgatgactataccccgtatttagcctgccaagcgctcagggtcaaggaagtcacagcggtcatcttgggtaagtttaaccagtcgcgggccaaagttctttccattgggtacagcgagcttatgcctcccatctccgtttcacccagtgcacaccagtcgcagaagcgccttagagacaagcaagagcttcttaagaaaaaattacaatccctgaggccttccttcctcccggcggcaaaaatggagaggagtttcattgagttgtgctggttactgaacagggttaaaactcgggaaagagatctacacagattcctgaaggaaaattaccagatactggactctcacctggcggcaatcttcagcgaagtacccataggcaagtatcgggcagacctagttctgcagtatcaccagtctgacaagcgtgtggtgctggtcgaacttgagccacacgataagcaaatttttaccaaaaaaaatcgccttaggcaccaggtgactcatgctctacagcaggtagaagattggatacaggaaatacatagaggcgtacccaatataccaggctggcttcagggaagttacactgcagaaggcatgatagttattggacgctcgaaagacctgacagaagagcagagggaaactctcgcgctgaagaatgccaaatccagcatcaagatactgacctacgatgatttgctggagcgcctgtctcggcttataaaaacgcttgacaaggaatag

SEQ ID NO: 61256 - DNA, 267 bp, Pseudomonas aeruginosa HB13
atgtccggatcatttattcaggtgttaaattacaaagaccaactgatgaaagagtattacaagctaagcgagggcgacgaaggtagttccttttctgcattcaacccaaaatgcttaattgttattggcacgcttgaatcagagcttaaagatgggaatcaatacaaatcttttgagctattcagaaatagtatgacgaatgtagagattgtcacttacgatgagctttttcaaaaggctcaagacattttagatatggtcaaataa

SEQ ID NO: 61257 - DNA, 1536 bp, Pseudomonas aeruginosa ATCC 25324
atgcgagattcgcgcgagcgtctacgcttccgcgcggcagtccgcgataatcgagcggtggccatttcagactcgacaggccgacatgtctcaggagggagacccatggcaggaacggaggggcaggacgacgtagagctggatgtctgggatccagagcttcggcttgatagggggaaagcggatgacggggaggagtaccgggatctgtacatgcagactttcgtacgggattccaccgagccgcatcagtggcggagccagcctgaatccaggtggcatcatttggctagggtgcatccaaaaaaagtcgtcacctacccggtattttccaatccttacgcacaacggtatctatcttgccggcacgggcggttcaaaacgatcgcgtacgaactcgatgtcgagcacccgctgccaggcaacgtagatgaagcaaaatcgcatattgaaactgtgtcggccttcgacttattcaatccatgtgcctttggactcgggcttatcaaagatctggatgaagtctggcgaggacttgctggatttgccaacctcaatgccattgtgctgacgcagtcaggtggtctgcagatcgacggcgataccgtgcgaataccggtggtgcatatcgagtcaatgcgacgggcattcaaccgtacaaatcgaaaggtacgagaggttgtacggctgggcaagagaacgcatgtccggaacgtgctcctatcgcgtctggatcctgaaaggtatccgcgcgtgatgcaggtcaatcaagaaggccaactgatagaagttcgcctggaccactccaggacaagcaagaacgcggcccgttctcaacgaagagcgaccgtggacgcggtgcgcaccaacgtcgacacgctagcggccgaagcccctcaggaactcatccggctgcatgccgagattgagcgcgccaccctggcccagatgattgagaagtacgaagaaatgctcaagaaaaagctgccagaagcggaatggcagaatttttttgagcggaacatcttcatcctgactatggtttttgctcgtcctgtcagactgcttcatacccaattccatgcgaaacctgggagggtggacggaaaaggtgcgcagattggggacttcctctttgccgagcacggttttgccatggccatcgtggagattaagaaaccggccagtctactgttgcgagccaagccctaccgaaacaccgaggtttttgctcccagcgccgatttggcaggtgccgtgacgcaggttctataccaaaaaaataacattcatcagtactggctctatcataaggagagtccagaactcaaggattctcggccagatgccgtgaagtgtgtagtcatcacgggcatgttgccaaaggatgaactacagcgacggagttttgaggtgtttagaaattcaagtaaagacgttgaaatcattaccttcgacgaacttctcgccaagttgcggctgttgtcagagcaccttgcatcacctgaaactgataacagtgagccccctttctag

SEQ ID NO: 61258 - DNA, 1644 bp, Pseudomonas aeruginosa CI27; identical to SEQ ID NO: 61254

SEQ ID NO: 61259 - DNA, 1302 bp, Pseudomonas aeruginosa PA21_ST175
gtggtggagccagtgctcaggctgttgcgcaaggcgttactcttggatatttccggtggcgaaaagcgagttcctgatgctgatgaaatcaaagactgggtgctgaaactattcgcgaaaaatcccaccgttggtgacatggtgcgagcccttctattgattaaggaggatctagttgttagcgagcaccaactgccttctatcgaagaggcactgcgcgaaatcggcctattggagcagctccacttgccagacttcttcttcgtttcctcggagttggagggagagccttgtggtgtactgttcgaacgttatgaatcggacggtgaagtcctcgtgtttctggccactctcttcgataagaagaacctaatgcaaaaggttggcaggatggcgattcgtgtcagcaaagagtctcctgagcctttcttgtccatctgtaccccggacggctggcttagggtgccaaaaaatcagatcgtgccgggttcagtcagttccttcacggtccaatgcctgcttgaatataagtattacatttatcccactctgcctttgagctccattattgctcccgaattgactaggagaaaggataacatccatttagtaagcctgataaaagaggcttatctggataaagtagtttgcacacgagtccgcgttcccctagacgtcgtgcaaccacgagacatcgactatgcactgcatacgccggatgagcagatacgagattgtatgccttatgcggcacatactgagttcctgctatacgaagaggatggagtgcttatcatggatgatgactataccccgtatttagcctgccaagcgctcagggtcaaggaagtcacagcggtcatcttgggtaagtttaaccagtcgcgggccaaagttctttccattgggtacagcgagcttatgcctcccatctccgtttcacccagtgcacaccagtcgcagaagcgccttagagacaagcaagagcttcttaagaaaaaattacaatccctgaggccttccttcctcccggcggcaaaaatggagaggagtttcattgagttgtgctggttactgaacagggttaaaactcgggaaagagatctacacagattcctgaaggaaaattaccagatactggactctcacctggcggcaatcttcagcgaagtacccataggcaagtatcgggcagacctagttctgcagtatcaccagtctgacaagcgtgtggtgctggtcgaacttgagccacacgataagcaaatttttaccaaaaaaatcgccttaggcaccaggtga

SEQ ID NO: 61260 - DNA, 246 bp, Pseudomonas aeruginosa PA21_ST175
gtgttaaattacaaagaccaactgatgaaagagtattacaagctaagcgagggcgacgaaggtagttccttttctgcattcaacccaaaatgcttaattgttattggcacgcttgaatcagagcttaaagatgggaatcaatacaaatcttttgagctattcagaaatagtatgacgaatgtagagattgtcacttacgatgagctttttcaaaaggctcaagacattttagatatggtcaaataa

SEQ ID NO: 61261 - DNA, 1644 bp, Pseudomonas aeruginosa PA14; identical to SEQ ID NO: 61254

SEQ ID NO: 61262 - DNA, 1431 bp, Pseudomonas aeruginosa str. Stone 130
atggcaggaacggaggggcaggacgacgtagagctggatgtctgggatccagagcttcggcttgatagggggaaagcggatgacggggaggagtaccgggatctgtacatgcagactttcgtacgggattccaccgagccgcatcagtggcggagccagcctgaatccaggtggcatcatttggctagggtgcatccaaaaaaagtcgtcacctacccggtattttccaatccttacgcacaacggtatctatcttgccggcacgggcggttcaaaacgatcgcgtacgaactcgatgtcgagcacccgctgccaggcaacgtagatgaagcaaaatcgcatattgaaactgtgtcggccttcgacttattcaatccatgtgcctttggactcgggcttatcaaagatctggatgaagtctggcgaggacttgctggatttgccaacctcaatgccattgtgctgacgcagtcaggtggtctgcagatcgacggcgataccgtgcgaataccggtggtgcatatcgagtcaatgcgacgggcattcaaccgtacaaatcgaaaggtacgagaggttgtacggctgggcaagagaacgcatgtccggaacgtgctcctatcgcgtctggatcctgaaaggtatccgcgcgtgatgcaggtcaatcaagaaggccaactgatagaagttcgcctggaccactccaggacaagcaagaacgcggcccgttctcaacgaagagcgaccgtggacgcggtgcgcaccaacgtcgacacgctagcggccgaagcccctcaggaactcatccggctgcatgccgagattgagcgcgccaccctggcccagatgattgagaagtacgaagaaatgctcaagaaaaagctgccagaagcggaatggcagaatttttttgagcggaacatcttcatcctgactatggtttttgctcgtcctgtcagactgcttcatacccaattccatgcgaaacctgggagggtggacggaaaaggtgcgcagattggggacttcctctttgccgagcacggttttgccatggccatcgtggagattaagaaaccggccagtctactgttgcgagccaagccctaccgaaacaccgaggtttttgctcccagcgccgatttggcaggtgccgtgacgcaggttctataccaaaaaaataacattcatcagtactggctctatcataaggagagtccagaactcaaggattctcggccagatgccgtgaagtgtgtagtcatcacgggcatgttgccaaaggatgaactacagcgacggagttttgaggtgtttagaaattcaagtaaagacgttgaaatcattaccttcgacgaacttctcgccaagttgcggctgttgtcagagcaccttgcatcacctgaaactgataacagtgagccccctttctag

SEQ ID NO: 61263 - DNA, 1431 bp, Pseudomonas aeruginosa BL19; identical to SEQ ID NO: 61262

SEQ ID NO: 61264 - DNA, 1644 bp, Pseudomonas aeruginosa BL16; identical to SEQ ID NO: 61254

SEQ ID NO: 61265 - DNA, 756 bp, Pseudomonas aeruginosa BL01
atggatgatgactataccccgtatttagcctgccaagcgctcagggtcaaggaagtcacagcggtcatcttgggtaagtttaaccagtcgcgggccaaagttatttccattgggtacagcgagcttatgcctcccatctccgtttcacccagtgcacaccagtcgcagaagcgccttagagacaagcaagagcttcttaagaaaaaattacaatccctgaggccttccttcctcccggcggcaaaaatggagaggagtttcattgagttgtgctggttactgaacagggttaaaactcgggaaagagatctacacagattcctgaaggaaaattaccagatactggactctcacctggcggcaatcttcagcgaagtatccataggcaagtatcgggcagacctagttctgcagtatcaccagtctgacaagcgtgtggtgctggtcgaacttgagccacacgataagcaaatttttaccaaaaaaaatcgccttaggcaccaggtgactcatgctctacagcaggtagaagattggatacaggaaatacatagaggcgtacccaatataccagactggcttcagggaagttacactgcagaaggcatgatagttattggacgctcgaaagacctgacagaagagcagagggaaactctcgcgctgaagaatgccaaatccagcatcaagatactgacctacgatgatttgctggagcgcctgtctcggcttataaaaacgcttgacaaggaatag

SEQ ID NO: 61266 - DNA, 1644 bp, Pseudomonas aeruginosa BWHPSA027; identical to SEQ ID NO: 61254

SEQ ID NO: 61267 - DNA, 981 bp, Pseudomonas aeruginosa BWHPSA025
atggaatttgaggtaggatcaagaactgttgagattaaaaaaaggcgtattctcaccgccagcgtgaaacggcaggtagctatattgagtggctatcgatgctcgttcccaggctgtgaccaagacctcatgctcgatggctcgtcatttatcggggaaatatcttcgatcgaagccgttcattctcacggcccaagacacaacccgtctaaggatggagacgagctacttgaaatagacaactatcttctcttatgccctaatcatcatgcggttattgataggcagcctgaaatatattcgactgagtggctaaaaaaggctagggaagatcatctaagtaaagtgtcagaagcactgtctgcctcgaactttgtagacgagataaaactagatgagcaggttgaagtttccttagaggaagcaataggtgtttggaaagtaaatcgtgaaaactcatccgaggagttctggcaaactcttctgcaaaaatgtccagctgtattgtcacagatatttccgcaaagtatgtttcagctaggtaataaatgctacgttggtggaaaatctataacaaactcgggtggaaatctcgtcgactttatctacgcaagcaggctgactggcaatatagcattggtcgaaataaaaaccccgaagactaaattgcttggaaaaaagtatagatctaatgcctattcaattagcgaggagatgtccggatcatttattcaggtgttaaattacaaagaccaactgatgaaagagtattacaagctaagcgagggcgacgaaggtagttccttttctgcattcaacccaaaatgcttaattgttattggcacgcttgaatcagagcttaaagatgggaatcaatacaaatcttttgagctattcagaaatagcatgacaaatgtagagattgtcacttacgatgagctttttcaaaaggctcaagacattttagatatggtcaaataa

SEQ ID NO: 61268 - DNA, 1644 bp, Pseudomonas aeruginosa BWHPSA018
atggataatctgaaaacacgaatcgtcaattcatacaatgacctgtcagcggacgctgactcattttcggagtcgagcggaaagtcgcgaactgtggtggagccagtgctcaggctgttgcgcaaggcgttactcttggatatttccggtggcgaaaagcgagttcctgatgctgatgaaatcaaagactgggtgctgaaactattcgcgaaaaatccccccgttggtgacatggtgcgagcccttctattgattaaggaggatctagttgttagcgagcaccaactgccttctatcgaagaggcactgcgcgaaatcggcctattggagcagctccacttgccagacttcttcttcgtttcctcggagttggagggagaaccttgtggtgtactgttcgaacgttatgaatcggacggtgaagtcctcgtgtttctggccactctcttcgataagaagaacctaatgcaaaaggttggcaggatggcgattcgtgtcagcaaagagtctcctgagcctttcttgtccatctgtaccccggacggctggcttagggtgccaaaaaatcagatcgtgccgggttcagtcagttccttcacggtccaatgcctgcttgaatataagtattacatttatcccactctgcctttgagctccattattgctcccgaattgactaggagaaaggataacatccatttagtaagcctgataaaagaggcttatctggataaagtagtttgcacacgagtccgcgttcccctagacgtcgtgcaaccacgagacatcgactatgcactgcatacgccggatgagcagatacgagattgtatgccttatgcggcacatactgagttcctgctatacgaagaggatggagtgcttatcatggatgatgactataccccgtatttagcctgccaagcgctcagggtcaaggaagtcacagcggtcatcttgggtaagtttaaccagtcgcgggccaaagttctttccattgggtacagcgagcttatgcctcccatctccgtttcacccagtgcacaccagtcgcagaagcgccttagagacaagcaagagcttcttaagaaaaaattacaatccctgaggccttccttcctcccggcggcaaaaatggagaggagtttcattgagttgtgctggttactgaacagggttaaaactcgggaaagagatctacacagattcctgaaggaaaattaccagatactggactctcacctggcggcaatcttcagcgaagtacccataggcaagtatcgggcagacctagttctgcagtatcaccagtctgacaagcgtgtggtgctggtcgaacttgagccacacgataagcaaatttttaccaaaaaaaatcgccttaggcaccaggtgactcatgctctacagcaggtagaagattggatacaggaaatacatagaggcgtacccaatataccaggctggcttcagggaagttacactgcagaaggcatgatagttattggacgctcgaaagacctgacagaagagcagagggaaactctcgcgctgaagaatgccaaatccagcatcaagatactgacctacgatgatttgctggagcgcctgtctcggcttataaaaacgcttgacaaggaatag

SEQ ID NO: 61269 - DNA, 981 bp, Pseudomonas aeruginosa CF27
atggaatttgaggtaggatcaagaacttttgagattaaaaaaaggcgtattctcaccgccagcgtgaaacggcaggtagctatattgagtggctatcgatgctcgttcccaggctgtgaccaagacctcatgctcgatggctcgtcatttatcggggaaatatcttcgatcgaagccgttcattctcacggcccaagacacaacccgtctaaggatggagacgagctacttgaaatagacaactatcttctcttatgccctaatcatcatgcggttattgataggcagcctgaaatatattcgactgagtggctaaaaaaggctagggaagatcatctaagtaaagtgtcagaagcactgtctgcctcgaactttgtagacgagataaaactagatgagcaggttgaagtttccttagaggaagcaataggtgtttggaaagtaaatcgtgaaaactcatccgaggagttctggcaaactcttctgcaaaaatgtccagctgtattgtcacagatatttccgcaaagtatgtttcagctaggtaataaatgctacgttggtggaaaatctataacaaactcgggtggaaatctcgtcgactttatctacgcaagcaggctgactggcaatatagcattggtcgaaataaaaaccccgaagactaaattgcttggaaaaaagtatagatctaatgcctattcaattagcgaggagatgtccggatcatttattcaggtgttaaattacaaagaccaactgatgaaagagtattacaagctaagcgagggcgacgaaggtagttccttttctgcattcaacccaaaatgcttaattgttattggcacgcttgaatcagagcttaaagatgggaatcaatacaaatcttttgagctattcagaaatagtatgacgaatgtagagattgtcacttacgatgagctttttcaaaaggctcaagacattttagatatggtcaaataa

SEQ ID NO: 61270 - DNA, 1644 bp, Pseudomonas aeruginosa CF27; identical to SEQ ID NO: 61255

SEQ ID NO: 61271 - DNA, 1443 bp, Pseudomonas aeruginosa MTB-1
atggcagtgaagaagcgtcaggggcagaccagatggtatacggatgccgaggtcatggagccgtcgttccggcttgaagctggtgtgaccgatgagggcgtggagtataaagatctgttcatgcagatcttcgagcaggaatcctcggagccgcgtcggtggcggagcctgcccgagcccgattggcatcacctggcaagggtgtttctgcaaaaaatcatcacctatccggtattcacgaatcctcatgcacagcggtacctgacctcgaggcatggtccgttcagaaccgtcatctacgaaagtagctatggaagagacctgccagatagcgccgcgtcggcggcttactatatcgagcttgcgcttccatggcgcacgtccaacccgtgcacctttggactggggctgaccgcggaactggatgaaatctggcgggggctgtcgagcttcccgaatctcaatgccatcgtcgtggcgcgtgctggtactttgcaggtggacggtaacgcggtccgaattccagaggaggaactccagcgtgtacggcgggcattcgagcggacgaagcgcaagatgcgcgaggttgtgaaacaggccaggtcgacccacatccgcaatgtgctgctggcgcaattggaccctacgcggtttccaccaattgtccaagtcaacccggatggtcaactggtcgaggtcaggctggacaggggaaggcagagccaggaggcagcgcgctccgggcggaaagccacggtgaaagcggtgcgctccaacgtggagacgctggtggccgaagcccccgaggagctcatcgagctacatgccgagattgaacgcgtcaccctggcccagatgattgaaaagtacgaggacatgctccagaaaggcctgccagaaacggcatggcagaaattcttcgagcgcaacatcttcatcctgaccatgatattcgcccgtcccgtcaggctacttcacacccagttccacgcccaaggcggggggctagacggcaccggcgcacagattggggatttcctgctggccgaaaaaagcttcgccatggccatcgtggaaatcaagacgccgggcagccccttgctgcgcggaaaggcctaccgaaacagggaagtgttcgcaccagacgaagacctcagtggcgcagtgtcgcaggtgctgtatcagcagagcaaaatccacgaaaactggctgttccatcgggcacggccagagctccaagactcgcgcccggatgccatcaagtgtgtggtcatcactggcatgttgcccaaggacgaaatgcagcgtcggagcttcgaggtgtttcgcaatgcatgcaagaacgtggaagtcatcaccttcgacgaactgctgggcaaactgcggctgttgtcagagcacctgacgccgcgcgcaacctcagagaatgaactgccattctag

SEQ ID NO: 61272 - DNA, 1644 bp, Pseudomonas aeruginosa BWHPSA044; identical to SEQ ID NO: 61254

SEQ ID NO: 61273 - DNA, 981 bp, Pseudomonas aeruginosa PA99
atggaatttgaggtaggatcaagaactgttgagattaaaaaaaggcgtattctcaccgccagcgtgaaacggcaggtagctatattgagtggctatcgatgctcgttcccaggctgtgaccaagacctcatgctcgatggctcgtcatttatcggggaaatatcttcgatcgaagccgttcattctcacggcccaagacacaacccgtctaaggatggagacgagctacttgaaatagacaactatcttctcttatgccctaatcatcatgcggttattgataggcagcctgaaatatattcgactgagtggctaaaaaaggctagggaagatcatctaagtaaagtgtcagaagcactgtctgcctcgaactttgtagacgagataaaactagatgagcaggttgaagtttccttagaggaagcaataggtgtttggaaagtaaatcgtgaaaactcatccgaggagttctggcaaactcttctgcaaaaatgtccagctgtattgtcacagatatttccgcaaagtatgtttcagctaggtaataaatgctacgttggtggaaaatctataacaaactcgggtggaaatctcgtcgactttatctacgcaagcaggctgactggcaatatagcattggtcgaaataaaaaccccgaagactaaattgcttggaaaaaagtatagatctaatgcctattcaattagcgaggagatgtccggatcatttattcaggtgttaaattacaaagaccaactgatgaaagagtattacaagctaagcgagggcgacgaaggtagttccttttctgcattcaacccaaaatgcttaattgttattggcacgcttgaatcagagcttaaagatgggaatcaatacaaatcttttgagctattcagaaatagcatgacgaatgtagagattgtcacttacgatgagctttttcaaaaggctcaagacattttagatatggtcaaataa

SEQ ID NO: 61274 - DNA, 981 bp, Pseudomonas aeruginosa BWH032
atggaatttgaggtaggatcaagaactgttgagattaaaaaaaggcgtattctcaccgccagcgtgaaacggcaggtagctatattgagtggctatcgatgctcgttcccaggctgtgaccaagacctcatgctcgatggctcgtcatttatcggggaaatatcttcgatcgaagccgttcattctcacggcccaagacacaacccgtctaaggatggagacgagctacttgaaatagacaactatcttctcttatgccctaatcatcatgcggttattgataggcagcctgaaatatattcaactgagtggctaaaaaaggctagggaagatcatctaagtaaagtgtcagaagcactgtctgcctcgaactttgtagacgagataaaactagatgagcaggttgaagtttccttagaggaagcaataggtgtttggaaagtaaatcgtgaaaactcatccgaggagttctggcaaactcttctgcaaaaatgtccagctgtattgtcacagatatttccgcaaagtatgtttcagctaggtaataaatgctacgttggtggaaaatctataacaaactcgggtggaaatctcgtcgactttatctacgcaagcaggctgactggcaatatagcattggtcgaaataaaaaccccgaagactaaattgcttggaaaaaagtatagatctaatgcctattcaattagcgaggagatgtccggatcatttattcaggtgttaaattacaaagaccaactgatgaaagagtattacaagctaagcgagggcgacgaaggtagttccttttctgcattcaacccaaaatgcttaattgttattggcacgcttgaatcagagcttaaagatgggaatcaatacaaatcttttgagctattcagaaatagcatgacgaatgtagagattgtcacttacgatgagctttttcaaaaggctcaagacattttagatatggtcaaataa

SEQ ID NO: 61275 - DNA, 981 bp, Pseudomonas aeruginosa 3579; identical to SEQ ID NO: 61273

SEQ ID NO: 61276 - DNA, 981 bp, Pseudomonas aeruginosa 3578; identical to SEQ ID NO: 61273

SEQ ID NO: 61277 - DNA, 1029 bp, Pseudomonas aeruginosa PS75
atgaaacgaaagaaatttgatattgatgcatttttggacgctatgcagctatcggaagacttgagaaaggctagacctaaagatgcctctaagatagcgttagcattaagcctaaagctgtgtcatccgggctttgcttcggagcctcttgagactgctgaggaaatgctttattcgcttgatgatagcgttgaacagagggtgtgcgaactgattggggaaaaagcaagtaaacatgaagtttctaaaagatttgattccgatatttattttagaaattttatgaactgcgttgcgatctcaagaagaagcctggttcaattgatagagtatattaagagtaatgagcctgattcgtcagcttttgaccttgctggtcaagttgtggaggtggtagaggactttaacaatgtcgtggtggccaacgatgtgctgcccctaattgagcgcggaatttatgcgtctgatattgcgctggcactggaagtttggtcaaaaaatcgagacctaatgaagggagatgagcgcttttggcagaaagaatttgaggagcggaaaggggtgctagagcgccttcttggagggcatgcagtactgctgcaaagcgaatttcatgttgggggtacaaatacatctggcgctggagatcttaggtctgactttgcttttctaaataaaattaacaatattagtttggttgagattaaggcgccagctaccaagctgttgggctctaagtaccgtggaacctacccgctctccaaggacgtatccggtgccatttctcaggttcttatacaacgcagtgagctaattaaatattacttccagaagaggtgtgactcacccgtgcctttcgaggttttttcacctcgttgcttcttgattgttggggatttgagtagtcttggatctgactctgaaaagttaaaagcatttgaggttcagcgccaggcagttgcgtcgcacgtgagtgttgtgacttttgatgagctttaccagcaatttgcaacgtttcatcagttgtaa

SEQ ID NO: 61278 - DNA, 1644 bp, Pseudomonas aeruginosa BWH058; identical to SEQ ID NO: 61254

SEQ ID NO: 61279 - DNA, 1245 bp, Pseudomonas aeruginosa BWH055
gtgatcagtattttcgccgaagagaaccaactgctactgacgtatcagcctgatcgcttcaacgatgcgcgttggctcgatgagaagctgcggcaagacggcgaagtgactctgcgccgcacgttcaccttcactggcgcagatctgctgaccccgtctgcatcctctggagagggggacgacagcgaacgcatctttttgctcgggctattggaggacggctactacaagatcaatagtgacgtgcttggccttaagcatgaccttctgctcgacagtgcgatgacgctggtaccgagcacattcattgcgcagcgcgatatttcggtgttccgaagaatcgatgaattgattgaagagcctatcgtcgttggcggtgacaacgaaagcgccatcccgttggcggattttgagcagcttctaaaaacctttccgaccagcaccgagctcacccattacgcccgagcccgtattgtgcgggttctcaaagactattttggaacgatctcggatgccgaaggccagctgaatcagtacctgaagcgcaagaagaagctccctgccgcgtcccgtgaaagcattgtttccaactttgagctgcaaaagtttgagtatgttcatgcagaactggagtccatgctgaagcaggtggacgcgtactctgagaaggactggcaggccaagatattgggcttgctattgtttgttttccccaagtatgttgcggtacttgagaatgttcatatcaaggacttctacactaatgcttccaaaaccaccgaccgttacatcgacctgatgctggtcgatgcgaatggcaacatcgatatcatcgaagtcaaaaaaccctttccgaatgcaatagtgtcccgcagcacataccgcgacagccacacgccgaaaaaagagttgaccggatctgtcatgcaggcggaaaaatatctattccacctgagtaaatgggggcacgcgggtgagcaggaaatctacaacaagcggaaaagtgagttgccaacttggattgagctcaagatcaccaatcccaaggcaatcatcctgctcgggcgtgataacgattttgtggggcagcagcgttttgactttgaaatcatccggcgtaaatacgccaacatgctcgacatcatgacttatgacgacctcttgcgtcgggtggggaacattattgaaatgatgagtcgtcagaagtcagcagggagtgtggcaccaaacaggaggggcgcatga

SEQ ID NO: 61280 - DNA, 1155 bp, Pseudomonas aeruginosa
atggacgactatcaaaatccgaagccggggaagacgtatataagtccttcattaagttcgttctcccagccggagcgaaaagtaaggattgccaccaagctaattgaacagccagattcttatgctttcgcagttttaaagggtgaaacagttctaaggcacaaggagggtgctaaaacatgcataaaagcgaaattcttcgaggatgatcgagggatttttgttctaaatatacaaggctacacgatagccagcatgaagcctcataatgcgagcttttcatttgtaggtaatgaaattgagaagcttgtagagtttatagagcatatccgccaagttccgctaagtgattcgcgctataaaaaaattacagatgatgaaattcgcaagcttattttgtcatcgtctcaagcgcactctattatccaggggaacgaagatttattcattgaagttttacgttcagccgtcacaaaagaagatgtagtggctgtagcttatagaaagcgccaacttgaggcttttaataggttgctcaaggatgaggattattttgaaagagcaaaaacaaaaaagaactgttctgatgaggctgtgtggcagcgcttttttgaaaagaacccatggatatttggttatggtttaagctatatacatctttcatctctagatgataagaagctagagcaggtagtgcacggttatagtgtcgctgatcatggtaagcgatcagatgccttacttaaaaccagaggggtgatctctagcctgtgctttgttgaaataaagacacataaaacagagcttctacaaaacagaagttataggcctggctgttgggcgccatcactacacttggcgggaggtgttgcgcaagtgcaaggtacagtgatgctagcagtagaatccataagagagaagctttcaatatttgacgataaaggagaccctaccggagaagaaatttttaactatatgcctaagtcgtttttagtggttggtaatcttgatgaatttagaactgacaatggagtaaacaaggataagtatagatcttttgaacttttcagaagaaatacttctagtcctgagataattacatttgatgagctatacgagagggcatgctttattgttgaacaacatgaggtctag

SEQ ID NO: 61281 - DNA, 1644 bp, Pseudomonas aeruginosa; identical to SEQ ID NO: 61255

SEQ ID NO: 61282 - DNA, 267 bp, Pseudomonas aeruginosa; identical to SEQ ID NO: 61256

SEQ ID NO: 61283 - DNA, 1410 bp, Pseudomonas aeruginosa
atggcatctatcagaccttcagcattcaatcaacgtgagcgtttggacggcggccccttccttgtcattgaagcagccgaaccggaagaggaaggcattaacgttttcttcactgatattcccgcagcggagcgcaagccggattcgccaatagcgagactgctcaatgtgtgtccagacagattgaccatttggcctcttaatattcgagaagatcgcgacgattacctgcaacctaaatacggcacccttgaacgcatcgtcgtcgctcggcctgttatcgagccctacatactgccagagactactgacgatgtcgttgggcttcttgagcagttgccggatgggtttgccaaagattttcgattcggtttggggcttctgtgggaatatcggcaaatttgcgaaacagccgccagcttagaaaacgtaagcatactcattgtccacaaaggaaatgacgcgaaaattgattcgccattctttattctcggaataagaagatttcatgaattaagaaaagaattaaatcgcatagcctctcgccaccagagagacgcgcgcaaggacaagcaatttcatgtctaccagaccttattacatgctgccgattcagcacaatttcccgctctaaagaagagcgtaagacctgatgcactaacggaaatgaccgatggtgggcggcagcatgtgacgctttccaagcgtgatcggcgcgccgctgttcgcatggttcaagacaatatagaagcactggcggaatctgagccgcgctcgctgctggcattaaagaatgatattgagctcatcacactgaatcaactgattgagcgataccaggaaatgcttggaaaaggactgacggaaagcaagtggcaaagcttctttctggaaaatcctttcatacttagtcttgcatttgccgttccagccatgctggttcaggggcaagcttatgcaggtggcaagcgacttaacgggtccggcggaaaattttcagattttctatacgcatccgcttccacgggcaatcttggcctcattgagataaaaaagccgcaaaccgaactgctaggaaaatctccctatcgtggagatgatgtttttggcccatcgacagaattgggtggagcgattgctcaaattctagatcagcgtttcaaattgcagagtgaactacccgtcataaaaaataacatgaaccgatacgacctccacagctatgcggttcgctgcatagttgtcgctggcatgacgccacaagagcatcagcaaagaaagtcattcgagctcgttcgaaatgcgttcgcagagatcgtgatcgtgactttcgatgaactacttgcaaggctaaccgagattaaaaatgcgctccaaccgattcctaccttagacacggtgccgttctaa

SEQ ID NO: 61284 - DNA, 1410 bp, Pseudomonas aeruginosa; identical to SEQ ID NO: 61283

SEQ ID NO: 61285 - DNA, 1644 bp, Pseudomonas aeruginosa; identical to SEQ ID NO: 61254

SEQ ID NO: 61286 - DNA, 1461 bp, Pseudomonas aeruginosa
atggcctccgttacgaacagtgagtaccgtcaagctcagcgcactgacggcggccccttcttggctctactcccacttgacgatactgggctgcccgctaagccgggagaaaccattgccggcgtcgacgtcttctattcggacgttcctgttccagacgggacggcgattggtgctgatccatggctgcacatcatgaatgtgaccactgaaatgctgacgatctggcccattcagcaacgctttggccatcgagattacggaaagcctctgttcgatagcatccgccgaatcatgatttacaagcccattgatgatgaatacgagctaccaactgacaacggcatgctggaggacatgttagaaggtctcccggcagggttctacaaggactggaggtatgggctgggcttgcgatgggagttccgcagcatcatcaccacgatccaggaaatgccggatatcgacaccatcatctttcatgctcctgctgatcaaccaggcacggactttacgcgccctcccttttatctacttggcatgcacacgttccacgcgctgcggaaacaactcacgtcgatctccgagcggcatcagcgcgcagcacggaaagagaagcggacaatttgtcacaacactctgttgcatagggttgcaccagagtcgttccagaaagagcacctatcgctaccacccgatacccttgctgaaatgacgtcttccgccagcggcgggataaagctcaccaaacgagatcagcgagccgctgtgaagttggtgcagcagcacacaacgtcgctagccaaggaagagccggccgaactgctacgattaaaggagaacatcgaactggtcagcctccgtgagctgattgatcgctgtacacagctgctggacgtctcgaccactgagccgaaatggcaatcgttcctttccgataaccccttcatcctcaccatggcgttccattacccagtcgtgaaaattggggacactccctatgttggcgggaagtcgttcagggggagtggcggctcacatagtgactttttgatggctgcggcagcaacgaacaacctggccctggttgagatcaagcgccccggcacccagctcgtggggacggtgtaccgcggcatttatccgccttcccatgaccttagtggcgccgttgctcaagtcgtcgcccagcggtcggagctgcagcagaacttcaggcttatcggaacggaactggaccgtaaaggcttccgcccacactccattgcctgcgtagttgtcgctggtctcaaaccgactgatgaggagcagatccaaggcttcgagcaataccgacacaccctgcagggggttcatgtagtgacgtttgacgagcttgtcgatcgcctgaaagctctacttgatctcctcgccggtagccagcctgctttgcccactgaaccaatagagccgccgttctaa

SEQ ID NO: 61287 - DNA, 642 bp, Pseudomonas aeruginosa
ttggccaccgagcagcctcatgccttgatggagctgcatgccgagatcgagcgggtctcccttcagcaaatgatcgataagttcagcgagatgcttggcaagaaccttactgagagggcttggcagcaattcttcgaccagaatatctttatcctaaccatgctgttctgtgggccagtacacctagtgtgcagccagtttcatgctcagcccagtggaatcaaaggtgcgggggcccaaataggtgattacttgtttcggggtgccgggcaggttctggtaatagtcgagatcaagaagccaagcacttctctggtgcagaagactgagtaccgccgcggcggcggtgttcatgccccggactcagagttaagcggtgcagtaagtcaggtgttgtaccagcgccactcgctgcagacgacatggggaatacatcgcgaagacgaggtgctcgcgggcactaggccagacaacacccgctgtgtggttatcgctggtaaactgcccactgagtcaagtctgctgcgttctttcgaaacttttaggtgcgctcaaaaggatgttgaaataatcaccttcgacgaactccagcagaagcttgagcttctgctaaaacatctctctccggagccgtcactctaa

SEQ ID NO: 61288 - DNA, 1461 bp, Pseudomonas aeruginosa; identical to SEQ ID NO: 61286

SEQ ID NO: 61289 - DNA, 642 bp, Pseudomonas aeruginosa; identical to SEQ ID NO: 61287

SEQ ID NO: 61290 - DNA, 1644 bp, Pseudomonas aeruginosa; identical to SEQ ID NO: 61254

SEQ ID NO: 61291 - DNA, 1245 bp, Pseudomonas aeruginosa; identical to SEQ ID NO: 61279

SEQ ID NO: 61292 - DNA, 981 bp, Pseudomonas aeruginosa; identical to SEQ ID NO: 61273

SEQ ID NO: 61293 - DNA, 621 bp, Pseudomonas aeruginosa
atgctgcatgcggagatcgagcgggtgaccctcgccaagatgatcgaagcattcagaatgaaactcgccggcagttccaacgaatctgcttggcagaaattcttcgaggtgaacaagttcgtcctgagcctggcgtttgctcggcccgtggagctagcgcatacgcaattccatgcaaaaggatccaccttgcccggatcgggcgctcagatcggtgatttcctgttcaaggaacatggtcaagcgctagctatcgtcgaaatcaagactccaaagacgattttgctgcgggccaaagcctacagaggaaaggaggtatttggaccaaattcggagctatctggtgcggtgccccaagttctgttccagcaaaacgaactcaagcagcgttgggtacaccatcggcatgacacaccaggaatgcatctgtcaggcgccgacgccatcaagtgcgtggttgtggcaggaaccttacccaccgatccgattcagctccgaagcttcgaggtgttccgaaacgcctgtaaggacgttgatatcgtcactttcgacgaactgctggcgaagctagaatttctgaagacacatttgaccccagagcctgaggaagacttattttga

SEQ ID NO: 61294 - DNA, 1644 bp, Pseudomonas aeruginosa; identical to SEQ ID NO: 61255

SEQ ID NO: 61295 - DNA, 981 bp, Pseudomonas aeruginosa
atggaatttgaggtaggatcaagaactgttgagattaaaaaaaggcgtattctcaccgccagcgtgaaacggcaggtagctatattgagtggctatcgatgctcgttcccaggctgtgaccaagacctcatgctcgatggctcgtcatttatcggggaaatatcttcgatcgaagccgttcattctcacggcccaagacacaacccgtctaaggatggagacgagctacttgaaatagacaactatcttctcttatgccctaatcatcatgcggttattgataggcagcctgaaatatattcgactgagtggctaaaaaaggctagggaagatcatctaagtaaagtgtcagaagcactgtctgcctcgaactttgtagacgagataaaactagatgagcaggttgaagtttccttagaggaagcaataggtgtttggaaagtaaatcgtgaaaactcatccgaggagttctggcaaactcttctgcaaaaatgtccagctgtattgtcacagatatttccgcaaagtatgtttcagctaggtaataaatgctacgttggtggaaaatctataacaaactcgggtggaaatctcgtcgactttatctacgcaagcaggctgactggcaatatagcattggtcgaaataaaaaccccgaagactaaattgcttggaaaaaagtatagatctaatgcctattcaattagcgaggagatgtccggatcatttattcaggtgttaaattacaaagaccaactgatgaaagagtattacaagctaagcgagggcgacgaaggtagttccttttctgcattcaacccaaaatgcttaattgttattggcacgcttgaatcagagcttaaagatgggaatcaatacaaatcttttgagctattcagaaatagtatgacgaatgtagagattgtcacttacgatgagctttttcaaaaggctcaagacattttagatatggtcaaataa

SEQ ID NO: 61296 - DNA, 1245 bp, Pseudomonas aeruginosa; identical to SEQ ID NO: 61279

SEQ ID NO: 61297 - DNA, 1644 bp, Pseudomonas aeruginosa; identical to SEQ ID NO: 61255

SEQ ID NO: 61298 - DNA, 981 bp, Pseudomonas aeruginosa; identical to SEQ ID NO: 61295

SEQ ID NO: 61299 - DNA, 1536 bp, Pseudomonas aeruginosa; identical to SEQ ID NO: 61257

SEQ ID NO: 61300 - DNA, 981 bp, Pseudomonas aeruginosa
atggaatttgaggtaggatcaagaactgttgagattaaaaaaaggcgtattctcaccgccagcgtgaaacggcaggtagctatattgagtggctatcgatgctcgttcccaggctgtgaccaagacctcatgctcgatggctcgtcatttatcggggaaatatcttcgatcgaagccgttcattctcacggcccaagacacaacccgtctaaggatggagacgagctacttgaaatagacaactatcttctcttatgccctaatcatcatgcggttattgataggcagcctgaaatatattcgactgagtggctaaaaaaggctagggaagatcatctaagtaaagtgtcagaagcactgtctgcctcgaactttgtagacgagataaaactagatgagcaggttgaagtttccttagaggaagcaataggtgtttggaaagtaaatcgtgaaaactcatccgaggagttctggcaaactcttctgcaaaaatgtccagctgtattgtcacagatatttccgcaaagtatgtttcagctaggtaataaatgctacgttggtggaaaatctataacaaactcgggtggaaatctcgtcgactttatctacgcaagcaggctgactggcaatatagcattggtcgaaataaaaaccccgaaaactaaattgcttggaaaaaagtatagatctaatgcctattcaattagcgaggagatgtccggatcatttattcaggtgttaaattacaaagaccaactgatgaaagagtattacaagctaagcgagggcgacgaaggtagttccttttctgcattcaacccaaaatgcttaattgttattggcacgcttgaatcagagcttaaagatgggaatcaatacaaatcttttgagctattcagaaatagtatgacgaatgtagagattgtcacttacgatgagctttttcaaaaggctcaagacattttagatatggtcaaataa

SEQ ID NO: 61301 - DNA, 1536 bp, Pseudomonas aeruginosa; identical to SEQ ID NO: 61257

SEQ ID NO: 61302 - DNA, 1536 bp, Pseudomonas aeruginosa; identical to SEQ ID NO: 61257

SEQ ID NO: 61303 - DNA, 1644 bp, Pseudomonas aeruginosa; identical to SEQ ID NO: 61254

SEQ ID NO: 61304 - DNA, 1443 bp, Pseudomonas aeruginosa
atggcagtgaagaagcgtcaggggcagaccagatggtatacggatgccgaggtcatggagccgtcgttccggcttgaagctggtgtgaccgatgagggcgtggagtataaagatctgttcatgcagatcttcgagcaggaatcctcggagccgcgtcggtggcggagcctgcccgagcccgattggcatcacctggcaagggtgtttctgcaaaaaatcatcacctatccggtattcacgaatcctcatgcacagcggtacctggcctcgaggcatggtccgttcagaaccgtcatctacgaaagtagctatggaagagacctgccagatagcgccgcgtcggcggcttactatatcgagcttgcgcttccatggcgcacgtccaacccgtgcacctttggactggggctgaccgcggaactggatgaaatctggcgggggctgtcgagcttcccgaatctcaatgccatcgtcgtggcgcgtgctggtactttgcaggtggacggtaacgcggtccgaattccagaggaggaactccagcgtgtacggcgggcattcgagcggacgaagcgcaagatgcgcgaggttgtgaaacaggccaggtcgacccacatccgcaatgtgctgctggcgcaattggaccctacgcggtttccaccaattgtccaagtcaacccggatggtcaactggtcgaggtcaggctggacaggggaaggcagagccaggaggcagcgcgctccgggcggaaagccacggtgaaagcggtgcgctccaacgtggagacgctggtggccgaagcccccgaggagctcatcgagctacatgccgagattgaacgcgtcaccctggcccagatgattgaaaagtacgaggacatgctccagaaaggcctgccagaaacggcatggcagaaattcttcgagcgcaacatcttcatcctgaccatgatattcgcccgtcccgtcaggctacttcacacccagttccacgcccaaggcggggggctagacggcaccggcgcacagattggggatttcctgctggccgaaaaaagcttcgccatggccatcgtggaaatcaagacgccgggcagccccttgctgcgcggaaaggcctaccgaaacagggaagtgttcgcaccagacgaagacctcagtggcgcagtgtcgcaggtgctgtatcagcagagcaaaatccacgaaaactggctgttccatcgggcacggccagagctccaagactcgcgcccggatgccatcaagtgtgtggtcatcactggcatgttgcccaaggacgaaatgcagcgtcggagcttcgaggtgtttcgcaatgcatgcaagaacgtggaagtcatcaccttcgacgaactgctgggcaaactgcggctgttgtcagagcacctgacgccgcgcgcaacctcagagaatgaactgccattctag

SEQ ID NO: 61305 - DNA, 1536 bp, Pseudomonas aeruginosa; identical to SEQ ID NO: 61257

SEQ ID NO: 61306 - DNA, 1644 bp, Pseudomonas aeruginosa; identical to SEQ ID NO: 61254

SEQ ID NO: 61307 - DNA, 1443 bp, Pseudomonas aeruginosa; identical to SEQ ID NO: 61304

SEQ ID NO: 61308 - DNA, 1245 bp, Pseudomonas aeruginosa; identical to SEQ ID NO: 61279

SEQ ID NO: 61309 - DNA, 621 bp, Pseudomonas aeruginosa
atgctgcatgcggagatcgagcgggtgaccctcgccaagatgatcgaagcattcagaatgaaactcgccggcagttccaacgaatctgcttggcagaaattcttcgaggtgaacaagttcgtcctgagcctggcgtttgctcggcccgtggagctagcgcatacgcaattccatgctaaaggatccaccttgcccggatcgggcgctcagatcggtgatttcctgttcaaggaacatggtcaagcgctagctatcgtcgaaatcaagactccaaagacgattttgctgcgggccaaagcctacagaggaaaggaggtatttggaccaaattcggagctatctggtgcggtgacccaagttctgttccagcaaaacgaactcaagcagcgttgggtacaccatcggcatgacacaccaggaatgcatctgtcaggcgccgacgccatcaagtgcgtggttgtggcaggaaccttacccaccgatccgattcagctccgaagcttcgaggtgttccgaaacgcctgtaaggacgttgatatcgtcactttcgacgaactgctggcgaagctagaatttctgaagacacatttgaccccagagcctgaggaagacttattttga

SEQ ID NO: 61310 - DNA, 510 bp, Pseudomonas aeruginosa
atggagaggagtttcattgagttgtgctggttactgaacagggttaaaactcgggaaagagatctacacagattcctgaaggaaaattaccagatactggactctcacctggcggcaatcttcagcgaagtacccataggcaagtatcgggcagacctagttctgcagtatcaccagtctgacaagcgtgtggtgctggtcgaacttgagccacacgataagaaaatttttaccaaaaaaaatcgccttaggcaccaggtgactcatgctctacagcaggtagaagattggatacaggaaatacatagaggcgtacccaatataccaggctggcttcagggaagttacactgcagaaggcatgatagttattggacgctcgaaagacctgacagaagagcagagggaaactctcgcgctgaagaatgccaaatccagcatcaagatactgacctacgatgatttgctggagcgcctgtctcggcttataaaaacgcttgacaaggaatag

SEQ ID NO: 61311 - DNA, 981 bp, Pseudomonas aeruginosa; identical to SEQ ID NO: 61295

SEQ ID NO: 61312 - DNA, 1536 bp, Pseudomonas aeruginosa; identical to SEQ ID NO: 61257

SEQ ID NO: 61313 - DNA, 1536 bp, Pseudomonas aeruginosa; identical to SEQ ID NO: 61257

SEQ ID NO: 61314 - DNA, 981 bp, Pseudomonas aeruginosa; identical to SEQ ID NO: 61274

SEQ ID NO: 61315 - DNA, 1536 bp, Pseudomonas aeruginosa; identical to SEQ ID NO: 61257

SEQ ID NO: 61316 - DNA, 1443 bp, Pseudomonas aeruginosa; identical to SEQ ID NO: 61271

SEQ ID NO: 61317 - DNA, 1644 bp, Pseudomonas aeruginosa; identical to SEQ ID NO: 61254

SEQ ID NO: 61318 - DNA, 1644 bp, Pseudomonas aeruginosa; identical to SEQ ID NO: 61254

SEQ ID NO: 61319 - DNA, 981 bp, Pseudomonas aeruginosa
atggaatttgaggtaggatcaagaactgttgagattaaaaaaaggcgtattctcaccgccagcgtgaaacggcaggtagctatattgagtggctatcgatgctcgttcccaggctgtgaccaagacctcatgctcgatggctcgtcatttatcggggaaatatcttcgatcgaagccgttcattctcacggcccaagacacaacccgtctaaggatggagacgagctacttgaaatagacaactatcttctcttatgccctaatcatcatgcggttattgataggcagcctgaaatatattcgactgagtggctaaaaaaggctagggaagatcatctaagtaaagtgtcagaagcactgtctgcctcgaactttgtagacgagataaaactagatgagcaggttgaagtttccttagaggaagcaataggtgtttggaaagtaaatcgtgaaaactcatccgaggagttctggcaaactcttctgcaaaaatgtccagctgtattgtcacagatatttccgcaaagtatgtttcagctaggtaataaatgctacgttggtggaaaatctataacaaactcgggtggaaatctcgtcgactttatctacgcaagcaggctgactggcaatatagcattggtcgaaataaaaaccccgaagactaaattgcttggaaaaaagtatagatctaatgcctattcaattagcgaggagatgtccggatcatttattcaggtgttaaattacaaagaccaactgatgaaagagtattacaagctaagcgagggcgacgaaggtagttccttttctgcattcaacccaaaatgcttaattgttattggcacgcttgaatcagagcttaaagacgggaatcaatacaaatcttttgagctattcagaaatagtatgacgaatgtagagattgtcacttacgatgagctttttcaaaaggctcaagacattttagatatggtcaaataa

SEQ ID NO: 61320 - DNA, 981 bp, Pseudomonas aeruginosa
atggaatttgaggtaggatcaagaactgttgagattaaaaaaaggcgtattctcaccgccagcgtgaaacggcaggtagctatattgagtggctatcgatgctcgttcccaggctgtgaccaagacctcatgctcgatggctcgtcatttatcggggaaatatcttcgatcgaagccgttcattctcacggcccaagacacaacccgtctaaggatggagacgagctacttgaaatagacaactatcttctcttatgccctaatcatcatgcggttattgataggcagcctgaaatatattcgactgagtggctaaaaaaggctagggaagatcatctaagtaaagtgtcagaagcactgtctgcctcgaactttgtagacgagataaaactagatgagcaggttgaagtttccttagaggaagcaataggtgtttggaaagtaaatcgtgaaaactcatccgaggagttctggcaaactcttctgcaaaaatgtccagctgtattgtcacagatatttccgcaaagtatgtttcagctaggtaataaatgctacgttggtggaaaatctataacaaactcgggtggaaatctcgtcgactttatctacgcaagcaggctgactggcaatatagcattggtcgaaataaaaaccccgaagactaaattgcttggaaaaaagtatagatctaatgcctattcaattagcgaggagatgtccggatcatttattcaggtgttaaattacaaagaccaactgatgaaagagtattacaagctaagcgagggcgacgaaggtagttccttttctgcattcaacccaaaattcttaattgttattggcacgcttgaatcagagcttaaagatgggaatcaatacaaatcttttgagctattcagaaatagcatgacgaatgtagagattgtcacttacgatgagctttttcaaaaggctcaagacattttagatatggtcaaataa

SEQ ID NO: 61321 - DNA, 981 bp, Pseudomonas aeruginosa; identical to SEQ ID NO: 61295

SEQ ID NO: 61322 - DNA, 1644 bp, Pseudomonas aeruginosa; identical to SEQ ID NO: 61254

SEQ ID NO: 61323 - DNA, 1644 bp, Pseudomonas aeruginosa; identical to SEQ ID NO: 61255

SEQ ID NO: 61324 - DNA, 981 bp, Pseudomonas aeruginosa
atggaatttgaggtaggatcaagaactgttgagattaaaaaaaggcgtattctcaccgccagcgtgaaacggcaggtagctatattgagtggctatcgatgctcgttcccaggctgtgaccaagacctcatgctcgatggctcgtcatttatcggggaaatatcttcgatcgaagccgttcattctcacggcccaagacacaacccgtctaaggatggagacgagctacttgaaatagacaactatcttctcttatgccctaatcatcatgcggttattgataggcagcctgaaatatattcgactgagtggctaaaaaaggctagggaagatcatctaagtaaagtgtcagaagcactgtctgcctcgaactttgtagacgagataaaactagatgagcaggttgaagtttccttagaggaagcaataggtgtttggaaagtaaatcgtgaaaactcatccgaggagttctggcaaactcttctgcaaaaatgtccaactgtattgtcacagatatttccgcaaagtatgtttcagctaggtaataaatgctacgttggtggaaaatctataacaaactcgggtggaaatctcgtcgactttatctacgcaagcaggctgactggcaatatagcattggtcgaaataaaaaccccgaagactaaattgcttggaaaaaagtatagatctaatgcctattcaattagcgaggagatgtccggatcatttattcaggtgttaaattacaaagaccaactgatgaaagagtattacaagctaagcgagggcgacgaaggtagttccttttctgcattcaacccaaaatgcttaattgttattggcacgcttgaatcagagcttaaagatgggaatcaatacaaatcttttgagctattcagaaatagtatgacgaatgtagagattgtcacttacgatgagctttttcaaaaggctcaagacattttagatatggtcaaataa

SEQ ID NO: 61325 - DNA, 1443 bp, Pseudomonas aeruginosa; identical to SEQ ID NO: 61271

SEQ ID NO: 61326 - DNA, 1536 bp, Pseudomonas aeruginosa
atgcgagattcgcgcgagcgtctacgcttccgcgtggcagtccgcgataatcgagcggtggccatttcagactcgacaggccgacatgtctcaggagggagacccatggcaggaacggaggggcaggacgacgtagagctggatgtctgggatccagagcttcggcttgatagggggaaagcggatgacggggaggagtaccgggatctgtacatgcagactttcgtacgggattccaccgagccgcatcagtggcggagccagcctgaatccaggtggcatcatttggctagggtgcatccaaaaaaagtcgtcacctacccggtattttccaatccttacgcacaacggtatctatcttgccggcacgggcggttcaaaacgatcgcgtacgaactcgatgtcgagcacccgctgccaggcaacgtagatgaagcaaaatcgcatattgaaactgtgtcggccttcgacttattcaatccatgtgcctttggactcgggcttatcaaagatctggatgaagtctggcgaggacttgctggatttgccaacctcaatgccattgtgctgacgcagtcaggtggtctgcagatcgacggcgataccgtgcgaataccggtggtgcatatcgagtcaatgcgacgggcattcaaccgtacaaatcgaaaggtacgagaggttgtacggctgggcaagagaacgcatgtccggaacgtgctcctatcgcgtctggatcctgaaaggtatccgcgcgtgatgcaggtcaatcaagaaggccaactgatagaagttcgcctggaccactccaggacaagcaagaacgcggcccgttctcaacgaagagcgaccgtggacgcggtgcgcaccaacgtcgacacgctagcggccgaagcccctcaggaactcatccggctgcatgccgagattgagcgcgccaccctggcccagatgattgagaagtacgaagaaatgctcaagaaaaagctgccagaagcggaatggcagaatttttttgagcggaacatcttcatcctgactatggtttttgctcgtcctgtcagactgcttcatacccaattccatgcgaaacctgggagggtggacggaaaaggtgcgcagattggggacttcctctttgccgagcacggttttgccatggccatcgtggagattaagaaaccggccagtctactgttgcgagccaagccctaccgaaacaccgaggtttttgctcccagcgccgatttggcaggtgccgtgacgcaggttctataccaaaaaaataacattcatcagtactggctctatcataaggagagtccagaactcaaggattctcggccagatgccgtgaagtgtgtagtcatcacgggcatgttgccaaaggatgaactacagcgacggagttttgaggtgtttagaaattcaagtaaagacgttgaaatcattaccttcgacgaacttctcgccaagttgcggctgttgtcagagcaccttgcatcacctgaaactgataacagtgagccccctttctag

SEQ ID NO: 61327 - DNA, 1644 bp, Pseudomonas aeruginosa
atggataatctgaaaacacgaatcgtcaattcatacaatgacctgtcagcggacgctgactcattttcggagtcgagcggaaagtcgcgaactgtggtggagccagtgctcaggctgttgcgcaaggcgttactcttggatatttccggtggcgaaaagcgagttcctgatgctgatgaaatcaaagactgggtgctgaaactattcgcgaaaaatcccaccgttggtgacatggtgcgagcccttctattgattaaggaggatctagttgttagcgagcaccaactgccttctatcgaagaggcactgcgcgaaatcggcctattggagcagctccacttgccagacttcttcttcgtttcctcggagttggagggagagccttgtggtgtactgttcgaacgttatgaatcggacggtgaagtcctcgtgtttctggccactctcttcgataagaagaacctaatgcaaaaggttggcaggatggcgattcgtgtcagcaaagagtctcctgagcctttcttgtccatctgtaccccggacggctggcttagggtgccaaaaaatcagatcgtgccgggttcagtcagttccttcacggtccaatgcctgcttgaatataagtattacatttatcccactctgcctttgagctccattattgctcccgaattgactaggagaaaggataacatccatttagtaagcctgataaaagaggcttatctggataaagtagtttgcacacgagtccgcgttcccctagacgtcgtgcaaccacgagacatcgactatgcactgcatacgccggatgagcagatacgagattgtatgccttatgcggcacatactgagttcctgctatacgaagaggatggagtgcttatcatggatgatgactataccccgtatttagcctgccaagcgctcagggtcaaggaagtcacagcggtcatcttgggtaagtttaaccagtcgcgggccaaagttctttccattgggtacagcgagcttatgcctcccatctccgtttcacccagtgcacaccagtcgcagaagcgccttagagacaagcaagagcttcttaagaaaaaattacaatccctgaggccttccttcctcccggcggcaaaaatggagaggagtttcattgagttgtgctggttactgaatagggttaaaactcgggaaagagatctacacagattcctgaaggaaaattaccagatactggactctcacctggcggcaatcttcagcgaagtacccataggcaagtatcgggcagacctagttctgcagtatcaccagtctgacaagcgtgtggtgctggtcgaacttgagccacacgataagcaaatttttaccaaaaaaaatcgccttaggcaccaggtgactcatgctctacagcaggtagaagattggatacaggaaatacatagaggcgtacccaatataccaggctggcttcagggaagttacactgcagaaggcatgatagttattggacgctcgaaagacctgacagaagagcagagggaaactctcgcgctgaagaatgccaaatccagcatcaagatactgacctacgatgatttgctggagcgcctgtctcggcttataaaaacgcttgacaaggaatag

SEQ ID NO: 61328 - DNA, 981 bp, Pseudomonas aeruginosa; identical to SEQ ID NO: 61295

SEQ ID NO: 61329 - DNA, 1644 bp, Pseudomonas aeruginosa; identical to SEQ ID NO: 61254

SEQ ID NO: 61330 - DNA, 1644 bp, Pseudomonas aeruginosa; identical to SEQ ID NO: 61254

SEQ ID NO: 61331 - DNA, 981 bp, Pseudomonas aeruginosa; identical to SEQ ID NO: 61295

SEQ ID NO: 61332 - DNA, 1644 bp, Pseudomonas aeruginosa
atggataatctgaaaacacgaatcgtcaattcatacaatgacctgtcagcggacgctgactcattttcggagtcgagcggaaagtcgcgaactgtggtggagccagtgctcaggctgttgcgcaaggcgttactcttggatatttccggtggcgaaaagcgagttcctgatgctgatgaaatcaaagactgggtgctgaaactattcgcgaaaaatcccaccgttggtgacatggtgcgagcccttctattgattaaggaggatctagttgttagcgagcaccaactgccttctatcgaagaggcactgcgcgaaatcggcctattggagcagctccacttgccagacttcttcttcgtttcctcggagttggagggagagccttgtggtgtactgttcgaacgttatgaatcggacggtgaagtcctcgtgtttctggccactctcttcgataagaagaacctaatgcaaaaggttggcaggatggcgattcgtgtcagcaaagagtctcctgagcctttcttgtccatctgtaccccggacggctggcttagggtgccaaaaaatcagatcgtgccgggttcagtcagttccttcacggtccaatgcctgcttgaatataagtattacatttatcccactctgcctttgagctccattattgctcccgaattgactaggagaaaggataacatccatttagtaagcctgataaaagaggcttatctggataaagtagtttgcacacgagtccgcgttcccctagacgtcgtgcaaccacgagacatcgactatgcactgcatacgccggatgagcagatacgagattgtatgccttatgcggcacatactgagttcctgctatacgaagaggatggagtgcttatcatggatgatgactataccccgtatttagcctgccaagcgctcagggtcaaggaagtcacagcggtcatcttgggtaagtttaaccagtcgcgggccaaagttctttccattgggtacagcgagcttatgcctcccatctccgtttcacccagtgcacaccagtcgcagaagcgccttagagacaagcaagagcttcttaagaaaaaattacaatccctgagaccttccttcctcccggcggcaaaaatggagaggagtttcattgagttgtgctggttactgaacagggttaaaactcgggaaagagatctacacagattcctgaaggaaaattaccagatactggactctcacctggcggcaatcttcagcgaagtacccataggcaagtatcgggcagacctagttctgcagtatcaccagtctgacaagcgtgtggtgctggtcgaacttgagccacacgataagcaaatttttaccaaaaaaaatcgccttaggcaccaggtgactcatgctctacagcaggtagaagattggatacaggaaatacatagaggcgtacccaatataccaggctggcttcagggaagttacactgcagaaggcatgatagttattggacgctcgaaagacctgacagaagagcagagggaaactctcgcgctgaagaatgccaaatccagcatcaagatactgacctacgatgatttgctggagcgcctgtctcggcttataaaaacgcttgacaaggaatag

SEQ ID NO: 61333 - DNA, 267 bp, Pseudomonas aeruginosa; identical to SEQ ID NO: 61256

SEQ ID NO: 61334 - DNA, 1644 bp, Pseudomonas aeruginosa; identical to SEQ ID NO: 61332

SEQ ID NO: 61335 - DNA, 981 bp, Pseudomonas aeruginosa; identical to SEQ ID NO: 61295

SEQ ID NO: 61336 - DNA, 1644 bp, Pseudomonas aeruginosa; identical to SEQ ID NO: 61332

SEQ ID NO: 61337 - DNA, 1245 bp, Pseudomonas aeruginosa; identical to SEQ ID NO: 61279

SEQ ID NO: 61338 - DNA, 1440 bp, Pseudomonas aeruginosa
atggcttcgattcggccttcgcaatacgccatgcagaaccgcaccgatggagggccgtttctgcgcgttgaccttgtggacgaaaacgggaatatcgtaagtcctggcgccccatcggcggacattacgctggtctactttagtgacgtcagcctgccagtagactctcacgattggctcctcatcatggcagtgacagctgaggagctcaccttctatcccaagatctcacgcaacgacaatgataattatggcaagcctaggtacggtaccattgagcgtattgagcttgttgatccatcccttcagcttgacgagctgccttacgatcaagacagtttggaagcgttgctgtccgaattaccgcccggatttagaaaagactggcgcttcggactagggtttctatacgagtaccgtttcatcccagctgcgattggcgaactcgatggcgttgacaccctgcgaattcaggctggtgaggctacagacgaggttagaatagacggcaatcggtactgtttaggtatcaatgagttcgaggagctgtgctctcgaatcgaaaaaatcagccgtaggcatcagagagatactgctgaagacaagaaactagtctgttattccggattgctgcacaaagtgaatccagagctgtatccggcacgcgcacgaaggctacccccagatgtgctcaaagatctggtcaatctaggcagggacaagctctcgaaccaagatcagcgctccgccacacgcttggtgaagaagaacgcctcctccatcgcacgtaacgagccgcgtgcgctttatgaactgaaagcggagatcgagcttgtcacgctggggcaactgatcgaggcctacaagaagatgatgtcgcgaaatctgaacgaagatcattggcatcaattctttaccgacaatgcatttatcctagacatggcttttggtcatccggtgaaaatggtggcgtcaaagccctacgtgggcggtaagcaagtttccgggcaaggtggccagcacacagacttccttatggctgcgagatcgacaagaaacctcgctctcatagagatcaaacaccctcaaaaggagcttgtcagcaaaaacgaatatcgtacggatgtctacggcccatcgacagagctcggcggttcgatagcacaggccctgagccaacgggcgcttcttctgcaagatgtgctcagcctgactgcagacatggaggaacgagctcatgcgcacgcagttcctatagtgatcatcattggccgaacaccaagcgacaaaaagcagcaacgctcgttcgagcagttcagaaacagcctcaaagatattcagatcaccacgttcgatgaacttcagactcgactagaaagcatccatcatgcattgcaaccagaggatgcttcgaaggctgaagatgtagagtgcaactaa

SEQ ID NO: 61339 - DNA, 1410 bp, Pseudomonas aeruginosa; identical to SEQ ID NO: 61283

SEQ ID NO: 61340 - DNA, 1422 bp, Burkholderia cepacia
atgtcggatacgctagaagaggtaaacggattgccgtcgcctgactttcggctggacaatcattcgagcgatacgccaccggagttgcgactgtacctgcagacgttccgctcatctcctacgaatccagagacctggatttctcgaccctcggcagaatggcatttgctcgcggtcatccagccgcatcagattatctcgtatcccgtttacacgaatccatacacgcaacggtacctccagcccaagcacgggcagttcgataagctcgtcctagagcgcgactcaaacgaggggttgccgcaaagcgcagaagaagcggtacgtgagctgagtacagctccacattctcaacttttcgacgacccggcctatggatttgggttcatcaaaaatctggacccgctacgctatgggctggcagcgctacgaaatgttgacaccatcaagctttcctctagcggagaattgcagattgatgatggcatattgactatgccagcagctctgctcgaccagttccggcgcgccttcgaacgaaatcgccgactgggtcgtcaagaagtccgattggcaaacacccatcttgtccgtaatcatctactgtcggaaattgacccggagcgctttcctcgagtcgtcacggacacatcacctggtccgttcgttcaggttcgacttgaccgaacgcgacgagcagcatcctccggtcgcgcggaccgaatctcgtccgtacgtgcagtgcgggaaaacctgcagcacattgcgtcagacatgccgcgcgagcttttcgaactgcactccgaaattgagcgcgtaactctcgcgcacatgattgagaatttcgagaatctgcttcagcaaagcctatcggaggctcgatggcaacgtttttttgaggacaacattttcatcttatctatggtcttcgcacggccggtccgtctgctacacacgcagtttcacgcgcaggggtcaggccttgatggcgcgggctcccaagtgggcgattttctcttcgccgagcacggtactgcgcttgccatcgttgaaatcaagaagccgggtaccgagctgatgctcaacagcgcatatcgaaatacgcaggttttcggaccgagcgcagaactaagcggcgccgtcacgcaagtgctgtaccagcagagtagcctgcggagccattggttgttgcacgacaggcgtccagagctcgaacactcacgtccggatagcatccgatgcgttgtcgtcgcaggtaccttacctactgacgaggcacggcggcgcagtttcgatattttccggaatgcgtgcaaagatgtagacgttgtcacctttgatgagctgctgcagaagctgcgtttgctactaagtcatctcaatgctgcccacaccgcacacgttgccgacgtgccgttctag

SEQ ID NO: 61341 - DNA, 1206 bp, Burkholderia cepacia
atggacgacgaacagcagattcatcataacaagttgccggggaaaacctacattagtccgcggatctatatcgatgcacatgaggcagtgcggatagcctcaaaggtaattgactcggacgggcttcactatgcaacagtaaaaaaggaaatcgtgctgcgacgcaccgagaaaggtcgcactgagattgtcgccaagtttattgagtcgacaagagacttgcgagtcctgacaattcaggccttcaatggccagacaggtacgccacataaaactcatttctcatttgttggcgaagagattccaaaactgcttgctttctttgagaacattgcgtccgtcgagtttgcgtcgcaggataaaataaatatcactgatactgaactgcggcgacttgtcttatcgaaggaacaagctgcgagcttagttcacgataaccaagacattttctcagaagtcgtccgtcaggagatcacaagagaagatgtggttgcactcggctatcgcaagaagcaagttgctacgtttgcaaggttgctgaacgagccgacctacttcgatcaagtgaaggtggctaaaggcgtaaagggggatgaagcactatggcaagccttttttgaacggaatcggtggatattcggctatggccttagctacttcttcgtcaccgggttcgacaataagaaactggagcaagtcgtcgaagggcacgacttgatcaaccgcggaaagcgggccgactgcctgatgaaaacgaaaggagtcttaagttcgctttgcttcgtagagatcaagacgcacgcgacaaagctactcgattccacgcagtaccgctcagggtgctgggctccgtcgaaagagctgtctggcgcggtcgcgcaagtacaagccactgtcgcctccgcgatgaggagtctgagcgagtacatccaaccgaccgacacactcggtatccccacgggcgaagaggtgttcaacttcaagccgcgagccttcgtcgttgttggttctctcaatgaattcgtcacggagcacggcgtgaatagagatcaactccggtccttcgagctttaccggaatagcatttcttccattgacatactgacgtttgatgagctgttcgaaaggtgcagctttatcgttcaatcagaagccgagcgtacatcaggtgcgacgtcgacgcacggcacggaaagccgaacctga

SEQ ID NO: 61342 - DNA, 1239 bp, Burkholderia cepacia
atgttgcatttccgtaccacggagactggcgtcgatttcgactaccagccggagtttggcactcaacatcagtgggtctgggaggaactgaagagcggaaaatccacagaggtatctcgggtattctcctttcgaaaagcggatctcaagaatcctccaagcaataacacggactttaccgagtacatctatacatttcacttcggcacgtttgaagacgagtacttgcgaatccccggccgtgtcttttctgtcgagcgagatgtcctcgtaagccgtgaactccgactcaaacgctcggtatttgtcgcggaacgaaatgtttcaattatgaagcgactctccggccttctcgataacgacgagcctattgttatcggaggcagtcgcgccgggaatattccactgcccgtctatcatgagttgctcaggaaattcccgactacacacgagcttaatcgctacgctgctgcgcgcgttcataccattctctcgcagtatgtggacagcatgaaggatgcacggggactttacgagtcctacctcgataagagatcagtgctgaatggaaccttttcttctgaaaatccaccggaactcaaagctctgaaggaacaagaggttctaaaatatcgccttatctatgacgaaattcaacagattctgctgaccggcaagaacctgtccgagaaagaatggcaacggcagatggtttcatttcttccgctgctgtttccaaaatacatcagagttcttcaaaacattacaatcaacgactactacagcaagtctggtaaaacgtccaagcgatatattgacattggcctagtggacgcgagcgggaacctcgatgtcattgaactcaaaaaaccattcgaagacaaaattcttcgccaaggactgtaccggggcaacaacattccgactgccgagttagccggtagcgtcatgcaggcagaaaaatatctcttccacttatcgaaatggggtgtcgatggagagcgcgctctcacgaaggcctacgcctccgaacttcctcctggattgggtatccggatatccaatccgaaggcaatcattatcgtcggccgcagccagattggcggtaagaagatgactgatagccagcaactcgattttgaaatcatcaagcgcaagtacgcgaatatgatggacatcatcacttacgatgacttgctaggccgcctccaaaacaccatctacgcgctcgaacactga

SEQ ID NO: 61343 - DNA, 1239 bp, Burkholderia cepacia; identical to SEQ ID NO: 61342

SEQ ID NO: 61344 - DNA, 1206 bp, Burkholderia cepacia
atggacgacgaagagcaaattcatcataacaaggtgccaggtaaaacctacattagccctcgaatttatatcgatgcacatgaggcgttgcggatagcctcaaaggtgatcgactcagacgggcttcactatgcgacggtgaaaaaggaagtcgtactccgacgcacagaaaaagggcgcaccgagatcatcgccaagtttctggaatctacaaaagatttgcgtgtcctgacaattcaggccttcaacggtcagacaggtgcgccacataaaactcacttctcgtttgtcggcgaagagattccgaaactacttgcattctttgagaatattgcgtccgtcgagtttgaatcgcaggacaaaatcaacatcatcgacactgaactgagacgacttgttttatcaaagaaacaagctgccagtttggttcatgacaaccaagacatcttctcagaggttattcgtcaggagattacgaaagaagatgttgtcgctctcggctatcgcaagaggcaagttgccacgtttgcgaagttactgagtgagccaatctacttcgaccaagtgaaggcggctaaaggcgtaacggggaatgaagcattatggcaagcattttttgaacggaatcgctggattttcggctatggtcttagctacttcttcgtcactgggttcgacaatagaaagctggagcaagtcgtcgaaggacacgacttgatcaaccgcggaaagcgggccgacggcctgatgaaaacgaagagcatcgtcagttcgctttgtttcgtagagatcaagacacacacgacaaagctgctcgattccacgcagtaccgcccagggtgctgggctccatcgagggaactgtccggcgcggtcgcgcaagtacaagccactgtcgcctccgctatgaggagcctgagcgaatacatccgaccgactgacgcacacggtgcccccacgggcgaagaggtgttcaacttcaaaccacgagccttcatcgttatcggctcactcagtgaattcatcaccgaacacggcgtgaacaaagatcagtttcgatcgttcgagttttaccggaactctatttcttccattgacatactgacgtttgacgagctgttcgaacggtgcagctttatcgttagatccgaggctgagcgtacatcaggcgaaacttcgtcacttggcacggaaaacggcccctga

SEQ ID NO: 61345 - DNA, 900 bp, Burkholderia cepacia
ttgcttgaccagggctacatcattccgcccgcgacctatatcgagcactacgaagccgatggcgcggcatttgattcgttcgacaaggtgactcttacacctcgcaccaattgggaaaagctgagccgaggtcgggtactggaaatgattggcgatgaaaatgtcgaactatctgatcgatcttccaccaacccgcggattgtcgctcaagcagacagacttctgtttcgccaagatcccttcgtcggatctaggtaccccgagagtaatgaggtcacgaagcgccgtctcgaaattatcggtagcatggtctcaaaggcatctgtagagtcacttgttcaatctgggagtggagagcaagagctgcagcgcctgctgaaaactgacctgtcaatctttggcgaggcatacgcaaaacccgacgacgagtacatttgtttctctgaatttccacttgcagacggatccgttgactttgtcgtttttaccggacgttccaggatggatatcatcctcattgaggtcaaaggcgctgaattcaatcttttgaacgccaatcactacaaggcgttcaatcacaaaatcaccgaggccgcggggcaaatctctcacaggctaggcatcatcttccgtgacttgaacagcttccggaaagaagcgcatgcgattaggaagcgggccgaatccggcgacatactgtataacgcttttctaggcccgcgcggcaagctcggcgtcgattctgacaaggacataaatttcagatgtgtcgtgatcggtgggcgatctcagaacgatctagaggagagcattaagcgtcaagattatgaagcccacaccacgcctcggattcgtattgaatcatgggatacgtggctgagacggttgcagcgcatctga

SEQ ID NO: 61346 - DNA, 1206 bp, Burkholderia cepacia; identical to SEQ ID NO: 61341

SEQ ID NO: 61347 - DNA, 1206 bp, Burkholderia cepacia; identical to SEQ ID NO: 61344

SEQ ID NO: 61348 - DNA, 1635 bp, Pseudomonas fluorescens WH6
atgcaagagctggaagcacattacatggacggttcgctggcaacggacaccaggctattgcttagcgaaaacgaccttccacctggtaccgaacccatgctgcagcaggtccgccaaggcaccctacgtgaaatcgtgcaaggcgagcatcgtacgcccgatgtcgatgagatcgtcagttgggtgcgtaactgctatcgcaagaatcccttaatcggcgatatagcccgtgcgatgttcgtgatcaacgaagatttggtggtggccgattcggagttgcctacccccgacgaagtactgcgcgatcttcatcgcctagaaaagttaaagctggatcgtgagttctttgtctcctccaccttcgagggccggccctgtggcgtcctatttaggcgctcggaaatggtggatggcggagttctgttcgaaattacggtttttgggcgcgaagggttgtctggcaaggtggggcaattgaacctgcagttatcgagcactcgaccggagccattcatttccatgtgcacggaagaaggctgggtccggttcgagcgcgagtacgccgtgcaggtggcgcacatcatgttccttctgcaatgcctgtatcaatacaagaaatacctttatccggtactgccgctgaattcgatcgtcgataaccgcaaggaccgcccccgcgacaacccgtacctggtgcagctcatcacccgtgcttaccatggtcaggtggcgtgtacgcgggtcagggtagagcttgccattgtgcagcctcgggacattgactatgcactgcgtatcccggatgaggacattagccggttcatcacccatgctagaaccaccgatatccttttgtacgaagagaacggcgcgctggtcatggacgacgactatatcgtctatatggcatgcagggcgcttggtctgacgcgggtgaaagcagtgattgtaggtgccttcgaccagccgcttgccgaggtaatggaggtaggggggcgcgagctaataccgcccataggcgtcactcgccgggacaatcgctcgcgccggggcagcgtcgacaagcaacatttgctgcaacgcaaggtaacagcgctcgggccaaaggtctctcagtcggcaaggtttgagcgcaacttcattgagttgtgccagctattgggccgggtcggcacgcgtgaaaaagacctgcaccgtttcctcaagcagcacacccaagtactggattcccacgtggcagcggtctacagcgaagtttgcatcggcaaataccgtgcagacctggtgctgcaataccgccaatcggacaagcgtgttgtgctggtggagctcgaaccccacagcgcgcagatattcaccaagcgcaatagccagcggcacaaggtgacccacgcagtgcagcaggtgcaggactggatcagggagatccataacaacgcgagtaacctaccacagtggctggcgggcaactatgccgcagaaggtatggtggtgatcgggcgctctaaggatttgacgcaggagcagaaagacaccttgatgatccacaacgcaaagtcagatatcaagattctcacttacgatgaccttctggagcgcttccagcgcttgatcgaggtgctcgacaagcgatga

SEQ ID NO: 61349 - DNA, 159 bp, Pseudomonas fluorescens HK44
atggcagcgaaggccaccgggaatttcgccctgatagagatcaagcatccccagctcgacctgcttgggaaaccctaccgaaagacctatgccccgtcctacgagcttagcggctcagtcgcccagatcatcagccaacacagccatgtgcagcgataa

SEQ ID NO: 61350 - DNA, 1464 bp, Pseudomonas fluorescens BBc6R8
atggtctcagtcccgaacagtgaataccgtctctcgcagcgaaccgacggaggtcctttcgccatattgcagcagttggacgagttcgatttgcccacgagcactcaggacgacgcagttaaggttgaggtctactactcagacatcccagttcctgatggagtaacggtcggcgcgaagccttggatacgcatcatctccatagctagggacataatgacgatctggcccgtgcaacaacgacgcgaccaccgtgagtacggaaaaccattgttcggcaatatcgagcgcctgtgtcttcttgctcgggtcgatggcccctacgagctaccgacgaccattgaggatcttgatgaattgtgggagtcgttgcccgctggtttctacaaagactggcgttatgggcttggggtacgctgggagttccgtagcatcatcaccacgattgctgagatgtcatctatcacgatggtctgctttcatggcgcagccggtacccctggcaccgaccgcgttgaagcaccgatctactgcttgggcatgaacacctttcatagattgcggagagagataacttcagcaacagctaggcaccaacgtgcagcgcgcaaggaaaaggctgcaatctgccacaaccggctgctacataagttcgcgccccagaactttagtctgatgcacctttcactccctcaagacgcgctggcggatctagcggctagcgcccgtggtcatgttatgctgactaagcgggatcaacgggccgcagttgccttagtccaggggcacgcgcaggccttggtgaagacagaacccgaagctttgcttcgcttgaagcaggatatcgaactgctcaccctacgagagctgatcgagcggtgtacagagctactggctgtatcaacgacggaaccaaaatggcagggatttctatccgccaatcccttcatcctcactatggcgttccactacccggtcatcagaatcggtgaccagccttatgtgggggggaaattgcatactggccgcggaggctcctatagtgacttcctgatggctgctgcctctacgaacaatctcgcccttattgaaatcaagcggccaggtatcgcgttgctcggtagtgaataccgcggcatctaccccccctctgcagagttaagcgccgcggttgcacaggtggtagcccaaagagcggagctgcaggccagcttcaagcacgtgggtaccgagctcgatcgccagggatatcgaccgcattccattgcttgcgtggtgatcatcggtctgaagccaactgatgaagaacgagctcaagggtttgaacagtaccgccattcgctgcacggcgttcatgtggtcacgttcgacgaattggttgaaaggcttcagtcgctatacgacttacttacaggtggtagctcaccttcacctgccttgcaagatgcggaggtaccgttctag

SEQ ID NO: 61351 - DNA, 1539 bp, Pseudomonas fluorescens
atgctgcagcaggtccgccaaggcaccctgcgtgaaatcgtgcaaggcgagcatcgtacgcccgatgtcgatgagatcgtcagttgggtgcgtaactgttatcgcaagaatcccttaatcggcgatatagcccgtgcgatgttcgtgatcaacgaagatttggtggtggccgattcggagttgcctacccccgacgaagtactgcgcgatcttcatcgcctagaaaagttaaagctggatcgcgagttctttgtctcctccaccttcgagggccggccctgtggcgtcctatttaggcgctcggaaatggtggatggcggagttctgttcgaaattacggtttttgggcgcgaagggttgtctggcaaggtggggcaattgaacctgcagctatcgagcactcgaccggagccattcatttccatgtgcacggaagaaggctgggtccggttcgagcgcgagtacgccgtgcaggtggcgcacatcatgttccttctgcaatgcctgtatcaatacaagaaatacctttatccggtactgccgctgaattcgatcgtcgataaccgcaaggaccgcccccgcgacaacccgtacctggtgcagctcatcacccgtgcttaccatggtcaggtggcgtgtacgcgggtcagggtagaccttgccattgtgcagcctcgggacattgactatgcactgcgtatcccggatgaggagattagccggttcatcacccatgctagaaccaccgatatccttttgtacgaagagaacggcgcgctggtcatggacgacgactatatcgtctatatggcatgcagggcgcttggtctgacgcgggtgaaagcagtgattgtaggtgccttcgaccagccgcttgccgaggtaatggaggtaggggggcgcgaactgataccgcccataggcgtcactcgccgggacaatcgctcgcgccggggcagcgtcgacaagcaacatttgctgcaacgcaaggtaacagcgctggggccaaaggtctctcagtcggcaaggtttgagcgcaacttcattgagttgtgccagctattgggccgggtcggcacgcgtgaaaaagacctgcaccgtttcctcaagcaacacacccaagtactggattcccatgtggcagcggtctacagcgaagttcgcatcggcaaataccgtgcagacctggtgctgcaataccgccaatcggacaagcgtgttgtgctggtggagctcgaaccccacagcgcgcagatattcaccaagcgcaatagccagcggcacaaggtgacccacgcagtgcagcaggtgcaggactggatcagggagatccataacaacgcgagtaacctgccacagtggctggcgggcaactatgccgcagaaggtatggtggtgatcgggcgctctaaggatttgacgcaggagcagaaagacaccttgatgatccataacgcaaagtcagatatcaagattctcacttacgatgaccttctggagcgcttccagcgcttgatcgaggtgctcgacaagcgatga

SEQ ID NO: 61352 - DNA, 963 bp, Pseudomonas fluorescens
atgtcaaaagttaaggatcaaaagtttgtactattacgaaacaaacctactgtattaactcgggctggattctggaaagttcctcacaacaatagtccggacgaagtctacctaaaaattggtagatacaaaaaacctaaaaacttttacgaaagtgaaatcgtagagctaagcgagcccaaaagcgagcttactctggatggcgaagagttcacaaatctagtttcatttatccaagataattacgaaccttttaaaaatggcgctaaagcatatctacctctaagcactccctatgacatatctatcgcccagcagcttaagaaactattggacgagagcgatcgatcccagatgctacagttcctgttggataacgacgtaattccagaggaattagaaattggactggctcatgctaggcgcgctagggcaatagacgaatatattcaattgttagagagtgatcataccgaaaacaaatggcaacattggttcgaggtgaatagctgggtactcggcagcgactttgttaaggtattagacgagcggaacatagacacaaaaaatatttctgacttcttaatggaaagctacgatggctttttagatatagttgaaataaaaagacctgaaggcggcttgcaattctggagctcttcacttgaccatggcaattatatacctcattcagacctcattaaggcaatcacacaagcatctaagtatattcacgaagtcgaaagagaggccgacagcataaaattttatcagcgggttggtgggataaaaacgatcaaacctcgctgcacgttgatatatggccgatctaatgagtggaatgaagaacagcaagaagcctttaggatattgaattctagctatcataatatgagcataatgacctttgatcatgttttagctagagcatatagaatcctggggagaacgacccatgtttga

SEQ ID NO: 61353 - DNA, 1539 bp, Pseudomonas fluorescens; identical to SEQ ID NO: 61351

SEQ ID NO: 61354 - DNA, 1398 bp, Pseudomonas fluorescens
atgtcaaagcctactgatcccaagccggaagaaagacaaggtgatatagagctcaaggtcataaagaacaatcagtttgacggtatttataagcccagaaaaaaaatggctgaactggcaggcctaaagttaggcatatcagctaaaatgatccacgtaaacctatctaaacaaaccctcacaatttatccgttagtaacgtggccggaccacactgactttcttaagtcaaaatacaaaaaaatagaacgcatctgtttccctatcgaagagtccctctgcgattttttcagaaaaaaatctcctttcgaagccgacgatctgctcatgctgcttcgagatgttttactaccaggcttcactcaagacccggactatggtttagggatcgcccgagaattcaaggatgtaatcgatgcgattgaagagcattcggactgcattgagattcgattttccgaagctgatgaaacctcaatcggtgacaaaaccaaagtattcactctgaatatagatgattacgaagaagccaaaagaaaaattagaaatatcactagtctcggacagaaagctgcagccgaggttaaggacggtacaatttacaatcttctagcgtcgagattaggaaaacccccaacaacaatcgcaactggaagaagtccagtaagacgcctgattaccgctgccgcccaaggtaaaccaccattgacagcgggcgaccaagatagtgttataaatatactaaaaaccaatagcaaacagatcgccgaaacaaagcccgaggctctcgcaaagctacaagatgaaatagaactcgtcaccttggaagttctaattaaacgatatgaagaacagctattaaaaaacaccgtcgaaagcgactggcaacgcttcttcgaagcaaacaaatttattctgacaatggcgttcggctatccgataattgagattcttgaacaagcttcagttggcggcggccagttaaccggtggcggaagcaaattcgctgatttcatatctaaaaacagccagactaataatgctgcaatctttgagatcaagaccccaaaaacaccgcttttaaataaaactgcatttcgaggaaaggtattttccgcaacaacagagttttcaggttccattgttcagattctagatcaaaaatatcaactaggaaagagtcttccttatctgaaaagcaatgaccgcaacctaaatctcgaagcttatgcagttcattgttgcctaataattggcaccacccctaccggtttagacgagcaaaaatcatttgagttgttccgcagaaactctcgagaggtcgagataatcacattcgacgaactcttaggaaagctgaagcaacttcactcatttctgtcatcaaagagtaaatag

SEQ ID NO: 61355 - DNA, 1494 bp, Pseudomonas fluorescens
atgccttctatgcgcccctcacagttcgccatgcaacagcgcagcgacggtggcccttttcttcgtttcgaatttgatgatcatggggaagatttggaggaggacgattttgccccgcccgaaattggcgggtttgagatggagggtgacattgaaatctacggtgtctctcgcgtgtattacagcgatgtggcagtgtcagagaactcgcctgactggcacttgatattgaaagtaaccccggacgacctcaccatctatcccatctttcctagatcagggcattctaaatacgctgattccaaatacgacaccatcaagtcgatcaggatcactcgccaagtctgccaaccctatgcccatccaactgacgagggcagtgtcgaagaggtacttgcagatttgccgacaggactcgcgaaggactggcgctatggtctcggatttcattatgaataccgtttcatagctttggccgtagccgaattagatggcgtcgaagagatcgtacttcacggcgggcgaggttatgacgacacacgagtacagggcagtacctattatcttggaatcggccaacttgagctcttaagaagggggctggatcggctgtcgcagcgtcatcaacgggagacggctgcagataagaagctgatctgctacaccggacttctgcacagagctgccccaggagtttatccgccgaaagcacgtaagcttcctcccgatgtattgtccaacctcatctcgctgggctctgtcaaccctcagctctccctgaaagaccagcaacaagcagtgaggctcacgcagcagaatgttccgaatttggcgaagtccgaacctcgtaccctgtttaacctcaaggagcagattgagctcgtcacactaggcgaactcattgaagtttatcggaagatgatgaatagcaatgtcggcgaatcccggtggcaagctttcttgagcgacaacccgtttattctcgacatggcattcgggtatcccgtaaagaaaatcgccgaccaaccctatgtaaggggtaagaatttcagcggtcgaggtggccaatattccgacttcctgatggcggcaagggccaccggcaatctcgctctaatcgaaatcaagcatccccagcatgacctgcttggtaggcagtaccggcaaacctataccccgtcccatgagctcagcggttcagtcggccagatcatcagtcagcgtggcaatgtccagcgcgagatctttggcctggcgcgtgacttcaaggatcgtgttcacgcccatgcagttgccgccatcgtcattattggccgcactccagaggaagaggataaacaggaagctttcgagcagtatcgaaatagtctgaaagacgtcttggtagtgaccttcgatgaactacaggttcgccttgagagcatccatcaagcgctcacgccgcgaatacctgcaaagcctgagccgattagggatgaagatttaccattctaa

SEQ ID NO: 61356 - DNA, 1482 bp, Pseudomonas fluorescens
atgccatctatgcgcccctcacagtacgccatgcaacagcgcgtggatggcggcccattccttcgtttcgaccatggcgaagcgagaggattgagcgagggagaactcgaagagctggagtcgggcgaatacaacgaaaatgacttctatggcccgacactcgttttctacagcgatgtacctctgctagacaatgggtcaggctggcatctcttattgatggtcacctccgagtatttgaccatttatcctatcaacgctcgctcggaacactctgagtacggtaaacccaagtacgacaccatccagtcgatagtggttactcgccctgtcttccaagaatatccacatcctaacaatcaggatgagcttgaggatttactaggacttctcccagtagggctcaccaaagactggcgctacggtctcggcttccactacgagtaccgatatatcatccaggctttaaatgatctggaggggatcgacacactgttcctgcatggtgggcaagggaattttgatgcgaaaatcgagggcaatcatttctgtttaggcgttgctcagcttgagaaaatggagcgaagccttgatcggctaactcagcggcatcagcgagaaaccgctgccgacaaaaaacttgtttgctacacggggctcctgcacaaagcggcccccgagctttatcctccacgtgaacgcaagctcccgccagatctgcttgcaaatcttgtagcgctggggtcagtggcgcctcgtctatcacccaaagatcaaaagcaggcagtcatgcttgcccagcaaagcgtctccgcgctggctaaatctgcaccgaaaaccctgtatcagctgaagtctgagatcgagctaataacgctcggcgaactcattgaggtgtaccggaaaatgttggaaagcaacgccgccgagaacaagtggcaacgcttcttgcgtgagcactctttcgtactcgacatggcgttcggttatcccgtcaagatgattgcagaacagccctatgtaggcggtaaggacatcagaggtcaagggggccagtattccgacttcctgatggctgcaaaggccaccggaaaccttgctctgatcgagatcaaacaccctcagcacgacctactcggaaaagcctaccgcaagacctacgtaccatcttacgagctcggtggatccgtggcccaggtcattagccagcgaagcgttctgcagaagaacattctcggtctgagcgaggatctcgatgaccgtgtccacgcacatgccgtggcggccattgtcatcattggccgtaccccatcaaagattggtgagcagcgagccttcgagcagtatcggaacagcctcaaggatgtcctggtaattaccttcgacgagatgttaggtcggcttgagggtattcataaagctttgacaccaaaactgccagtagcgcacttgcccctcagtgatgaagacttaccgttttaa

SEQ ID NO: 61357 - DNA, 1155 bp, Pseudomonas marginalis ICMP 9505
atggataactatcagaatccaaagccaggaaaaacatatatcagccccgcgcttccctcctttggtgataaatcgcggcttatccgtatcgcgtccaaagtgttgccgtcggtagacggctatgagtacggtcgcgagcgtgacgaagctgtgctccggcacaaaccggaagcggcgacctatatatcggcaaagtttctcgaggacactcgaaggattcaggttctgactgttcaaaaattcagttcggaaagcgggcagccgtacggcagtggtttctcgtttgtcggagaggagattggtaggttctgtgagtttcttgccaatatccatgcggtaacatttgaaggcgggagccaaatcaatatttccgactcagagctgagacgaatcgctctaacgtctctccaagcaaaacaactagtaacggaaaacgaagatttgattgctgaggtcgtgaaaaactcactaacaaagcaggacgtagtcgcaatcggataccgaaaaaagcagcttgaagtcttcaagtccctattagaggatgaagactacttccaaaaattacaatcaaggaaaggctgcacaccggaagccctatggcaaaaattctttgaaaaaaatccttggatattcggctatggccttagctacatatatgcgtccggcctcgatgggaagaagctagagcaagcggtcagaggtaatgatgtcgctcagccagggaagagagtggatgcgcttctgaaaacaaaggcttgggcgtctagcctctgttttgtcgaaatcaaaactcacaagacccgcctgttaaaaaacaagagttatcgtgaaggttgctgggccccctcggatgagcttgcaggcgcggtcgctcaagtgcagggaactgtggccctcgcagcagaaactctgaaggaatcagtgcggcttactgacgacaatggatatcccaccgctgaagaggtcttcaactattccccgagagcatttgtggtggttggttccctagagcagtttgttggcgagcacggggttaatcgggagcatctcaggagcttcgaattatttcgtcgaaataccatccaacccgagatagtgacttacgatgagctttttgaacgagcaaaacacatcatcgcagcgaatgaagcttag

SEQ ID NO: 61358 - DNA, 1635 bp, Pseudomonas putida S610
atgcaagagttggaagcacattacatggacggttcgctggcaacggatattaggccatcgattagcgaaaacgaccttccacctggtaccgaatcgatgctgcagcaggtccgccaatgtaccctgcgtgaaatcgtgcaaggcgagattcgtaagcccgatgtcgacgagatcgtcagttgggtgcgtaactgttatcgggagaatcctttaatcggcgatatagcccgtgcaatgttcgtgatcaacgtagatttggtggtggccgatgcggagctgcctacccctgacgaagtactgcgcgatcttcatcgcctagaaaagttaaagttggatcgcgagttctttgtctcctccactttcgagggtaggccctgtggcgtcctctttaggcgctcggaaatggtggatggcggagttattttcgaaattacggtctttgggcgcgaagggttgtctggcaaggtggggcaattgaacctgcagctatcgagcactcgaccggagccattcatttcaatgtgcacggaagaaggttgggtccgattcgagcgcgagtacgcgctgcaggtgacgcacattatgttccttctgcaatgcctgtatcaatacaagaaatacctgtatccagtactgccgctgaattcgatcgtcgattaccgcaaggaccgcccccgcgacaacccgtacctggtgcagctcatcacccgtgcttaccatggtcaggtggcgtgcacgcgggtcatggtagaccttgccattgtgcagcctcgggatattgattatgcactgcgtgtccttgatgaggacattagccggttcctcacccatgctagaaccactgatatccttttgtacgaagagaacggtgcgctggtcatggacgacgactatatcgtctatatggcatgcagggcgctagatctgacgcgggtgaaagcagtgattgtaggtgcctttgaccaaccgtttgccgaggtaatcgaggtaggggggcgcgaactgataccacccgtaggcgtcactcgcggggacaatcgctcgcgccggggcagcgtcgacaagcaacatttgctccagcgcaaggtatcagcgctggggccaaaggtctctcagtcggcaaggtttgagcgcaacttcattgagttgtgccggctattgggccgcgtcggtacgcgtgaaaaagatctgcaccgtttcctcaagcagcacactcaggtactggattcccatgtagcagcagtctacagcgaagtccgtatcggcaaatatcgtgcagacctagtgctgcaataccgccaatcggacaagcgtgttgtgctggtggagctcgaaccccacagcgcgcagatattcaccaagcgcaatagccagcggcacaaggtgacccacgcagtgcagcaggtgcaggactggatcagggagatccataacaacacaagtaacctgccccagtggctggcgggcaactatgccgcagaaggtatggtggtgatcgggcgctctaaagatttgacgcaggtgcagaaagacaccttgatgatccataacgcaaagtcagacataaagattctcacttacgatgaccttctggagcgcttccatcgcttgattgaggtggtcgacaagcgatga

SEQ ID NO: 61359 - DNA, 1044 bp, Pseudomonas putida KG-4
atgacaactgataacgacagattaaatgagttgatagactctttacgtttggctcaggatctgcgccaggctaaacctgaggattcggataaggtggcaattgctcttagccttaagctcaatcaatcgctgtttacagtagatataaaagatagtgcaaaacatctgttggatacggttcaggctaaaattgatgagcgaatcgcggatgtttgtggtgctgaccgttcaaaggagcaaatcgagcttaagtgtgcggaaagcgtagatttcaggttttttgttgatgttgctctgcgtgccaagagaaaaataaatgacctgattgaatatgtgacggatgatgaaccagacgatttcgcacttgagcttgttgaatttgtcttggaggcattggatgaatacaactcagtaattgtgaatgatgatgtcattccattgatcaagcggggtgtttatgcctcggatattgctgaagcgttaaaagtatggtcggctagccgagctgatatgggaggagatgagcgcttctggcatggtgagcttgaaagaaggaagggtgtgcttgagcgtctacttggtggtcatgcagttctcctgcgtagtgagtttcatgccggcgccactgatatctctggcgcaggaagcattcgagcagattttgcttatttgaacaaatctagaaacatcagcctcatcgagataaaggcgcctgatactaatttgttagggagtaagtacaggggaacttatccactttctaaagatctatctggggctatttcgcaagtgttgattcagcgtagcgagttgatgcagaactactatatgaaacgtgctcagtctcccgaagtcttcgaggttttcgctccgcgttgttttttgatagtgggcgatctgtctagtatttcaggtgatcgagataagctccgagcgtttgaggttcagaggcaagcagttgcctcccatgtgtcgatagtgacttttgatgagctttacgagcagttttccagcttcaacctgatggatggtttaccgttgtag

SEQ ID NO: 61360 - DNA, 1370 bp, Pseudomonas syringae pv. japonica str. M301072
atggaagggactcagcagagcttgcaggacacatggaacggggaggacgtgttggagcctagtttcagcatcatccagcggccagtggaagcgggcttttgcattgacttgtaccttcaggtttttgacaaaatctcctcagataaatggcagtcattgcccgaagacagatggcatcggctagccacgatcgagccgggttggatcacgatgtatcccatctacaccaacccccatactcagcgctatcggagcccgaagaacggaaacgtgggctgcatcttgtacagccatcagccgacgcgcgatcttccagacactccagaggacgccgtgctctacatcgacgtcagcctccctcgaaaactgtttgatccctgtgaggaaggattggggctggttaaacagcttacgccgctctggcgaggcctgcgattcgctcccagcctaaaaaccctagtcatatcggatgatggtgacacctcgatcacagacgacgtcgtctttgtaagtgaggcacgggtggatgaatgccgtagaacatgcatgcggatcactcgggctcgaaaaaagagtgagacgtcagctcagatgcattggtggctgagccaagtgtttccgacgctgatgcccaatgtggtctttgaaggcagccgtcctgtgctggcgagcgatacgacccctcgcagagtcagtaacccagttgcgcaagcggtggtacgggcgcggcgtcatccgctcagagaagtgaaggtcggcgttgagctgttggccaaggaagcgcctcgcgaactattcgaattgcacgcggagatcgagagggtcaccttggccgtaatgatcgaaaagttcgagagcatgctgagccagaacctcagcgagggccactggcagcattttttcgaagccaacctgttcatcctagcgatggtgttctcacgccctgtggcgcttctgcatacccagttccatgcccaaggctccacgatcaatggagctggcgctcatattggcgatttgcttttctcacaaggacgcgaactggccatcgtggaaatcaagaaaccttccacccctttgatgcaaagccgaccgtatcgcaaccaggatgtcttcggcccgaatttgcagctcagtggagcaattacgcaggtgctatatcagcaaggcctgatgcgctccaactggctgtcgcacattcgagatccaacgatgcgagacttgaatccagacacagcgaggtgcgttgtcattgccggtacgaagccaaccgaggaaggccgccggcgcagcttcgagatattccgcaacgcctgcaaagacgtcgaggtcgttacctttgatgagctgctaggcaagctgcggatgat

SEQ ID NO: 61361 - DNA, 768 bp, Pseudomonas syringae pv. actinidiae str. M302091
gaccttctcgctaatttggtttctctaggatccctgtcgccccggctttcgcctaaagatcaacagcaggcagccaagctgacggagcaaaacgttcctgcgcttgctaaatctgcgcccaactcactgttcaatctcaaggcagaaatcgagctcgttacactcggagaactcattgagatctatcgaaaaatgatggacaacaaagtaagcgaacctagatggcagcggttcttaagcgaacaccccttcgtgctcgacatggcatttgggtatccggtgaagaagattgcagaccagccgtacatcggcggcaaaggcttcagtggccgaggcggtcaattctcggatttcctgatggccgccagagcaaccggaaatcttgccctcatcgagatcaagcatcctcagactgagctgctcggtcagtcataccggcagacattcgtgccttcctacgagctaagcggtgcagtcggtcagatcattagccaacgcagcgtgctccaacgggaggtcttcggtctgtcccaggagcttgatgagcgcgttcacgcacacgccattgcggcaatcgtcatcattggccgaactcccaaggatctcgctaagcagcgtgccttcgagcagtatcgaagcggcctgaaggatgtattggtggtgacttttgatgagctccaagtacgactagaaagcatccaccaagccctcagacccaagccgccggtggagcctgagccaatcagcgaggaagacctaccattctga

SEQ ID NO: 61362 - DNA, 1277 bp, Pseudomonas syringae pv. aptata str. DSM 50252
cagggttgaaacttggtgtgtcagcgaaaatgctgcatctggacctagcacagcagagtttaacaatctacccactaatcacttggcctgaccatgaggaatttctgcaaccaaaatataaaaaaattcaaaaaatatggtttcctattgatgaaaaaactagcgatttctacaagaaaaaaactccgcttacctctgaagacttactagaattacttcgtgaaactttacttcctggctttactttggatcccgattatggacttggcattgcccgagaactaaaggatattatcgatgcggtagagttgcactcggactgcagtgaaataagcttctctgaaagcgagcaaacatgcataagcaacaataaaaaaatattcaccttcagtactgaagattattatgaggcgacaaagaatatacgaagcatatctagtcttggtcagaaagcagctgccgaggttaaagatggcactatatacaatttgctagctggcaagttagataaacctctaaaaacaattgcaattggtcgaagcccagtaaggcacttgattactgctgctgcactaggcaaaccaccgctgagctccggcgatcaagatagcgttattactattctcaaaactcatagcaaacagatagccgaagctaaacctgaagctctcgccaagttgcaagatgaaatagaattagtaaccctagaggtgttgataaaaaaatatgaggagaaattaaaaaggaccacgatagagagtgaatggcaggatttttttgactcaaataaatttatacttaccatggcttttggttatccgattgtacagattcttgggcaagcttcagttgggggtggccaattgatcggcggtggtagcaagtttgctgactttatttcgagaaatagccaaactaacaatgccgcgatatttgaaattaagactccaggaacaccacttctgaataaaacgcccttccgaggaaaggtgtattcagcaacaaaagagttcaccggcgcaatggtgcaaatattagaccaaaaatatcagctcgcaaaaaatctgcctatcttgaaaagcaacgatcgagatttaatgctagaggcttatgctgttcattgctgcctaataatcggtagtaccccaaagggtctagacgaacaaaagtcttttgagttattccgtcgaaactctagggaagtggaggtcattacctttgatgagctcttggaaaaactcaaacagcttcatgcgtttttatcatcaaatacctaa

SEQ ID NO: 61363 - DNA, 1602 bp, Pseudomonas syringae pv. aptata str. DSM 50252
atgccgccggcgaatcagcatttggttcccgtctttccggagctcaagcggctcgttagactcggtataacgccttcggcgaccactatcttgatcagggacgacagcactatgccttctatgcggccctcgcagtacgccatgcagcagcgcaccgacggagggcctttccttcggtttgatctcgaagacactggggctttgagcgaggaagaactctcggccatcgaatcagatgaagagtacgagtccatcggtgacgagatatatgggatttctagggtctattacagtgacgtcgcgttggcagagcatgagccaggttggcaccttctgctggaggttgcaccgtcttacctgaccatttatcccattaaccctagagccgaacaccccgagtacggtcagccccgatatcacggaatcaggtcgatcatcattacaagacctgtctatacaccgtactcccatccagccactccttacgaagtagatgaattgctcgatggacttccgaaagggctttatacggattggcgctacggccttggcttcaagtacgaatacaggtgcatcgtccaggcactgagcagcctaaagggggttgataccatcttgatacacggtggtactggtcacaacgatgcgaaactcaaaggcaacgagttttacttgggcgttgctcgtctagagcagctgcggaaaagcctggatcggttaacccagcgccaccagcgggagacagcgtctgacaagaagcttgcctgctatacaagcctgcttcatgaagctgcgcctgagctctatcctccacgcgccaggaagctgcctcctgaccttctcgctaacttggtttctctaggatccctgtcgcctcggctttcgtctaaagatcaacagcaggtagccaagctgacggagcaaaacgtttctgcgcttgctaaatctgcgcccaactcactgtttaatctcaaggcagaaatcgagctggttacactcggagaactcattgagatctatcgaaaaatgatggacaacaaagtaagcgaacctcgatggcagcggttcttaagcgaacacccattcgtgctcgacatggcatttgggtatccggtgaagaagattgcagaccagccatacatcggcggtaaaggcttcagtggccggggcggtcagttctcggatttcttgatggccgccagagcgaccggaaatcttgccctcatcgagatcaagcatcctcagactgagctgatcggtcagtcataccggcagacattcgtgccttcctatgagctaagcggtgcagtcggtcagatcattagccaacgcagcgtgctccaacgggaggtcttcggtctgtcccaggagcttgatgagcgcgttcacgcacacgccattgcggcaatcgtcatcgttggccaaactcccgaagatctggctaagcagcgtgccttcgagcagtatagaagcggcctgaaggatgtattggtggtgacttttgatgagctccaagtacgactagaaagcatccaccaagccctcacgcccaagccgccggtggagcctgagccaatcagcgaggaagatctgccattctga

SEQ ID NO: 61364 - DNA, 968 bp, Pseudomonas syringae pv. actinidiae ICMP 19103
ttgggcttagtcatgtcgtatccttgcggctattgaggcacctggcaagggatacgtttttcaggggcaaggtcatggatcggttaacccagcgccaccagcgggagacattgtctgataagaagcttgcctgctatacaagcctgctccatgaagctgcgcctgagctctatcctccacgcgccaggaagctgcccccagaccttctcgctaatttggtttctctaggatccctgtcgccccggctttcgcctaaagatcaacagcaggcagccaagctgacggagcaaaacgttcctgcgcttgctaaatctgcgcccaactcactgttcaatctcaaggcagaaatcgagctcgttacactcggagaactcattgagatctatcgaaaaatgatggacaacaaagtaagcgaacctagatggcagcggttcttaagcgaacaccccttcgtgctcgacatggcatttgggtatccggtgaagaagattgcagaccagccgtacatcggcggcaaaggcttcagtggccgaggcggtcaattctcggatttcctgatggccgccagagcaaccggaaatcttgccctcatcgagatcaagcatcctcagactgagctgctcggtcagtcataccggcagacattcgtgccttcctacgagctaagcggtgcagtcggtcagatcattagccaacgcagcgtgctccaacgggaggtcttcggtctgtcccaggagcttgatgagcgcgttcacgcacacgccattgcggcaatcgtcatcattggccgaactcccaaggatctcgctaagcagcgtgccttcgagcagtatcgaagcggcctgaaggatgtattggtggtgacttttgatgagctccaagtacgactagaaagcatccaccaagccctcagacccaagccgccggtggagcctgagccaatcagcgaggaagacctaccattctga

SEQ ID NO: 61365 - DNA, 969 bp, Pseudomonas syringae pv. actinidiae ICMP 9855
cttgggcttagtcatgtcgtatccttgcggctattgaggcacctggcaagggatacgtttttcaggggcaaggtcatggatcggttaacccagcgccaccagcgggagacattgtctgataagaagcttgcctgctatacaagcctgctccatgaagctgcgcctgagctctatcctccacgcgccaggaagctgcccccagaccttctcgctaatttggtttctctaggatccctgtcgccccggctttcgcctaaagatcaacagcaggcagccaagctgacggagcaaaacgttcctgcgcttgctaaatctgcgcccaactcactgttcaatctcaaggcagaaatcgagctcgttacactcggagaactcattgagatctatcgaaaaatgatggacaacaaagtaagcgaacctagatggcagcggttcttaagcgaacaccccttcgtgctcgacatggcatttgggtatccggtgaagaagattgcagaccagccgtacatcggcggcaaaggcttcagtggccgaggcggtcaattctcggatttcctgatggccgccagagcaaccggaaatcttgccctcatcgagatcaagcatcctcagactgagctgctcggtcagtcataccggcagacattcgtgccttcctacgagctaagcggtgcagtcggtcagatcattagccaacgcagcgtgctccaacgggaggtcttcggtctgtcccaggagcttgatgagcgcgttcacgcacacgccattgcggcaatcgtcatcattggccgaactcccaaggatctcgctaagcagcgtgccttcgagcagtatcgaagcggcctgaaggatgtattggtggtgacttttgatgagctccaagtacgactagaaagcatccaccaagccctcagacccaagccgccggtggagcctgagccaatcagcgaggaagacctaccattctga

SEQ ID NO: 61366 - DNA, 476 bp, Pseudomonas syringae pv. actinidiae ICMP 19070
cacctggcaagggatacgtttttcaggggcaaggtcatggatcggttaacccagcgccaccagcgggagacattgtctgataagaagcttgcctgctatacaagcctgctccatgaagctgcgcctgagctctatcctccacgcgccaggaagctgcccccagaccttctcgctaatttggtttctctaggatccctgtcgccccggctttcgcctaaagatcaacagcaggcagccaagctgacggagcaaaacgttcctgcgcttgctaaatctgcgcccaactcactgttcaatctcaaggcagaaatcgagctcgttacactcggagaactcattgagatctatcgaaaaatgatggacaacaaagtaagcgaacctagatggcagcggttcttaagcgaacaccccttcgtgctcgacatggcatttgggtatccggtgaagaagattgcagaccagccgtacatcggcgg

SEQ ID NO: 61367 - DNA, 472 bp, Pseudomonas syringae pv. actinidiae ICMP 19070
ccagccgtacatcggcggcaaaggcttcagtggccgaggcggtcaattctcggatttcctgatggccgccagagcaaccggaaatcttgccctcatcgagatcaagcatcctcagactgagctgctcggtcagtcataccggcagacattcgtgccttcctacgagctaagcggtgcagtcggtcagatcattagccaacgcagcgtgctccaacgggaggtcttcggtctgtcccaggagcttgatgagcgcgttcacgcacacgccattgcggcaatcgtcatcattggccgaactcccaaggatctcgctaagcagcgtgccttcgagcagtatcgaagcggcctgaaggatgtattggtggtgacttttgatgagctccaagtacgactagaaagcatccaccaagccctcagacccaagccgccggtggagcctgagccaatcagcgaggaagacctaccattctga

SEQ ID NO: 61368 - DNA, 966 bp, Pseudomonas syringae pv. actinidiae ICMP 19068
gggcttagtcatgtcgtatccttgcggctattgaggcacctggcaagggatacgtttttcaggggcaaggtcatggatcggttaacccagcgccaccagcgggagacattgtctgataagaagcttgcctgctatacaagcctgctccatgaagctgcgcctgagctctatcctccacgcgccaggaagctgcccccagaccttctcgctaatttggtttctctaggatccctgtcgccccggctttcgcctaaagatcaacagcaggcagccaagctgacggagcaaaacgttcctgcgcttgctaaatctgcgcccaactcactgttcaatctcaaggcagaaatcgagctcgttacactcggagaactcattgagatctatcgaaaaatgatggacaacaaagtaagcgaacctagatggcagcggttcttaagcgaacaccccttcgtgctcgacatggcatttgggtatccggtgaagaagattgcagaccagccgtacatcggcggcaaaggcttcagtggccgaggcggtcaattctcggatttcctgatggccgccagagcaaccggaaatcttgccctcatcgagatcaagcatcctcagactgagctgctcggtcagtcataccggcagacattcgtgccttcctacgagctaagcggtgcagtcggtcagatcattagccaacgcagcgtgctccaacgggaggtcttcggtctgtcccaggagcttgatgagcgcgttcacgcacacgccattgcggcaatcgtcatcattggccgaactcccaaggatctcgctaagcagcgtgccttcgagcagtatcgaagcggcctgaaggatgtattggtggtgacttttgatgagctccaagtacgactagaaagcatccaccaagccctcagacccaagccgccggtggagcctgagccaatcagcgaggaagacctaccattctga

SEQ ID NO: 61369 - DNA, 965 bp, Pseudomonas syringae pv. actinidiae ICMP 19102
ggcttagtcatgtcgtatccttgcggctattgaggcacctggcaagggatacgtttttcaggggcaaggtcatggatcggttaacccagcgccaccagcgggagacattgtctgataagaagcttgcctgctatacaagcctgctccatgaagctgcgcctgagctctatcctccacgcgccaggaagctgcccccagaccttctcgctaatttggtttctctaggatccctgtcgccccggctttcgcctaaagatcaacagcaggcagccaagctgacggagcaaaacgttcctgcgcttgctaaatctgcgcccaactcactgttcaatctcaaggcagaaatcgagctcgttacactcggagaactcattgagatctatcgaaaaatgatggacaacaaagtaagcgaacctagatggcagcggttcttaagcgaacaccccttcgtgctcgacatggcatttgggtatccggtgaagaagattgcagaccagccgtacatcggcggcaaaggcttcagtggccgaggcggtcaattctcggatttcctgatggccgccagagcaaccggaaatcttgccctcatcgagatcaagcatcctcagactgagctgctcggtcagtcataccggcagacattcgtgccttcctacgagctaagcggtgcagtcggtcagatcattagccaacgcagcgtgctccaacgggaggtcttcggtctgtcccaggagcttgatgagcgcgttcacgcacacgccattgcggcaatcgtcatcattggccgaactcccaaggatctcgctaagcagcgtgccttcgagcagtatcgaagcggcctgaaggatgtattggtggtgacttttgatgagctccaagtacgactagaaagcatccaccaagccctcagacccaagccgccggtggagcctgagccaatcagcgaggaagacctaccattctga

SEQ ID NO: 61370 - DNA, 964 bp, Pseudomonas syringae pv. actinidiae ICMP 19104
gcttagtcatgtcgtatccttgcggctattgaggcacctggcaagggatacgtttttcaggggcaaggtcatggatcggttaacccagcgccaccagcgggagacattgtctgataagaagcttgcctgctatacaagcctgctccatgaagctgcgcctgagctctatcctccacgcgccaggaagctgcccccagaccttctcgctaatttggtttctctaggatccctgtcgccccggctttcgcctaaagatcaacagcaggcagccaagctgacggagcaaaacgttcctgcgcttgctaaatctgcgcccaactcactgttcaatctcaaggcagaaatcgagctcgttacactcggagaactcattgagatctatcgaaaaatgatggacaacaaagtaagcgaacctagatggcagcggttcttaagcgaacaccccttcgtgctcgacatggcatttgggtatccggtgaagaagattgcagaccagccgtacatcggcggcaaaggcttcagtggccgaggcggtcaattctcggatttcctgatggccgccagagcaaccggaaatcttgccctcatcgagatcaagcatcctcagactgagctgctcggtcagtcataccggcagacattcgtgccttcctacgagctaagcggtgcagtcggtcagatcattagccaacgcagcgtgctccaacgggaggtcttcggtctgtcccaggagcttgatgagcgcgttcacgcacacgccattgcggcaatcgtcatcattggccgaactcccaaggatctcgctaagcagcgtgccttcgagcagtatcgaagcggcctgaaggatgtattggtggtgacttttgatgagctccaagtacgactagaaagcatccaccaagccctcagacccaagccgccggtggagcctgagccaatcagcgaggaagacctaccattctga

SEQ ID NO: 61371 - DNA, 898 bp, Pseudomonas syringae pv. actinidiae ICMP 9617
ggtcatggatcggttaacccagcgccaccagcgggagacattgtctgataagaagcttgcctgctatacaagcctgctccatgaagctgcgcctgagctctatcctccacgcgccaggaagctgcccccagaccttctcgctaatttggtttctctaggatccctgtcgccccggctttcgcctaaagatcaacagcaggcagccaagctgacggagcaaaacgttcctgcgcttgctaaatctgcgcccaactcactgttcaatctcaaggcagaaatcgagctcgttacactcggagaactcattgagatctatcgaaaaatgatggacaacaaagtaagcgaacctagatggcagcggttcttaagcgaacaccccttcgtgctcgacatggcatttgggtatccggtgaagaagattgcagaccagccgtacatcggcggcaaaggcttcagtggccgaggcggtcaattctcggatttcctgatggccgccagagcaaccggaaatcttgccctcatcgagatcaagcatcctcagactgagctgctcggtcagtcataccggcagacattcgtgccttcctacgagctaagcggtgcagtcggtcagatcattagccaacgcagcgtgctccaacgggaggtcttcggtctgtcccaggagcttgatgagcgcgttcacgcacacgccattgcggcaatcgtcatcattggccgaactcccaaggatctcgctaagcagcgtgccttcgagcagtatcgaagcggcctgaaggatgtattggtggtgacttttgatgagctccaagtacgactagaaagcatccaccaagccctcagacccaagccgccggtggagcctgagccaatcagcgaggaagacctaccattctga

SEQ ID NO: 61372 - DNA, 1080 bp, Pseudomonas syringae UMAF0158
atgaaggtaacggatattgtccacaactaccctgatggctcgcgcttggctcgaggtttatgtcgggttagatcattcgtgaacgaatcaggaatagtggtcctgcttactgacttgggcaataaaaatgatggccagtcagttactaatgccatcgagtgcattattaattcgctgcatgtactaggtgttgtcattggaccggcaacatttttggaacactacgagcgggaagaccctcgaggcgatacctttgacatcgtcaccgtgaattctcctggtgggacgcattgggaaacgattagtcgtgaggaggcatgtcgattgatggggtgtccaccagtcgagttggatgaacggagctgggcaaacggtcgcatcgttgaggaagcggatcggctacgtttttctagaaaccgatttttcgactctcctcatcgagggagcaatgcggtaataaaacgtcgcctggaaatcgagggtggaatgatttctagggcggaagttcaggcgttgatcagtgcaggtgcgggcgaacgagatctccaatgtcttttgaaaaaggacctctcaattttcgcagagacctacgctcagccagatgatgaatacatttgtttctcggagtttcctttagcagacggatacgttgactttgtggtgctgaccgggcgatcgcgtatggacgtaattctgatcgagataaagggagctgacttcaacttgctgaattcggatcattacaaggagtttaattacaagatccatcaggcagcaggccaactgaggaaccgcttaggtcacatttatcgagagctctcaaccttcagagatcacgtccattccgccagggcacgagctgagcgaggagatctaactcacaacgctttcgtagggccgcacgatgggctcgaggtcgaccctcagaaggacatcaacattcgcactgtgcttataggaggacggacgggggatgatcgtgcggaaagtgctaaaaggcacgactacgaacgccacttcattccaccaatcagggttgagtcctgggacacatggatacgcaggcttcaacgctcttaa

SEQ ID NO: 61373 - DNA, 1482 bp, Pseudomonas syringae pv. syringae
atgccatccatgcgcccctcacagtacgccatgcaacagcgcgcggatggcggcccattccttcgtttcaacaatggtgaagcgagagggttgagcgagggagaactcgaagcactggagtcgggcgaatacgacgaaaatgactactacggccccacactcgttttctacagcgatgtacccctgccggacaatgggtcaggctggcatctcctattgatggtcacctccgagtatttgaccatttatcctatcaacgcccgctcggaacactctgagtacggtaaacccaagtacgacaccatccagtcgatagtgatcactcgccccgtcttccaggaatatccacatcctaacaatcaggatgagcttgagaatttactaggacttctccctgtggggctcaccaaagactggcgctacggtctcggcttccactacgagtaccgatgtatcatccaggctttaaatgatctggaggggatcgacacactgtttctgcatggtgggccagggaattttgatgcgaaaatcgagggcagtcatttctgtttaggcgttgctcagcttgagaaaatggagcgaagccttgatcggctaactcagcggcatcagcgagaaaccgctgtcgacaaaaaacttgtttgctacacggggctcctgcacaaagcggcccccgagctttatcctccacgtgaacgcaagctcccgccagatctccttgcaaatcttgtagcgctggggtcagtggcgcctcgtctatcacccaaagatcaaaagcaggcagtcatgcttgcccagcaaagcgtctccgcgttggcgaaatcttcaccgaaaaccctgtatcagctgaagtctgagatcgaactcataacgctcggcgagctcattgaggtgtaccggaaaatgctggaaagcaacgccgccgagaacaagtggcaacgcttcctgagtgagcactctttcgtactcgacatggcgttcggttatcccgtcaagatgattgcagaacagccctatgtaggtggtaaagacatcagaggccaagggggccagtattccgacttcttgatggctgcgaaggccaccggaaaccttgctctgatcgagatcaaacaccctcagcacgacctactcggaaaagcctaccgcaagacctacgtaccctctgacgagctcagcggatccgtggcccaggtcattagccagcgaagcgttctgcagaagaacattctcggtctgagcgaggatctcgatgaccgtgtccacgcacatgccgtggcggccattgtcatcattggccgtaccccatcaaagattggtgagcagcgagccttcgagcagtatcggaacagcctcaaggatgtcctggtaattaccttcgacgagatgctaggtcggcttgagggcattcataaagctttaacgccaaaaccgccagtagcgcacttgcccctcagtgatgaagacttacccttttaa

SEQ ID NO: 61374 - DNA, 1305 bp, Pseudomonas syringae pv. atrofaciens
gtgcatatgcctcaatttaatgatttgactcgagagcttacaagttttattgggggaactaagctaggcggaatcagagtttttcatgatttctcttgggcagataagtttgatagaaaaacttttaagaatggtctgcggcttgcctctttagtaaagtcagactgtccgctcgcatcagtgccttcactcatactgttatctgggccatcagtcaccgaaggtataatcagtgagccaccaaactatgcacttgtaataaatattgattcctacattgcaagcgctacacctgatgcagccgcggcttattttacgcttcggcgtagcgcagatacgcgattggagataaccactgttttggccagagacagtgcgcttagagatgacgtggtgataaatcacttaacatcttcttatgtgatgcgttggatcggagctaatcccacccgagctgccgaaatcaggtcacttctagatcaagctgagcgggaactaccacctgcagatacaaacttagcggatccagctcaggcagtagaattattaaatcgtcttgaggccgttccggaaaccttagttgccgccatgctcgcggttctaactcgattagcaaacggttcagcagagcatcagaacacattacttcagctcattcttggaacaactgagggaaggaatattgcagcttttgagatgggtaaccgtatagctgaacggattcaagatattcgcgatgctcttagagcatatgaagcattaataaataattcgacaaccacggaaacagatacgcacgaatttattatagacaacccatggcttctaggctccgattatataaagacgcgccatgaacagccgctatctcggggccgggtagattctctgctagaaaagtatgatgggcaccatgaccttatggagcttaaatctccaaaccaccgaatcataatatcgacaagtgaaggagctacagcgtcatctccaacacagttcaagttaagtctcgaattgtctaatgcaattgctcaagtaagtagatacctcttcctcttagatcgagataatcagtttcttgctagcgagtacggcattcaaaatgcaaagcacccaaaggcttttatattaataggaaaaagttcagactgctcccagtccgaactagatacacttcagcaacttaacaaaagcttgcataggatcgaggttcttccatttgatactcttattataaagtgtgatgcaatgcttgcatatcttgagcgcgctaccggtttttcggatacattagtggagctatag

SEQ ID NO: 61375 - DNA, 939 bp, Pseudomonas syringae pv. atrofaciens
atgtacggcgagatcgaagctgatggtttgagtgagcatgtcacagcaggctgggactcggtggtagagaacagtgagcggtttcaacgagtcacggagtatgttcagagcaagctgcgttcagccttcactgaaactcatggggcggaaatccgcatggcccatgctcgcttacagaaagcagtacatgaacgcttggccgcaatgcccgggttcaagcgggattatgcggatcgtgccataaagaaggtattagaaaagtactacgacgaaccgtcccacaaagtcgaatcgatcgtgtttgtcgtgttggaagcgctggagcgctccgactaccgaactgttgtggagcatctggccgacgcccagcgccgcgatgtcgccactctggccgaatctctgaatgatttcggcttggcggacatggcattcctagtcgaacaagcctcagcgcgctccacttttcttgaccatctggatagactgactaacattgccgacactctcgaatcaaccatgcataaggctatcgaacacaatttctggattttcggtccagagtattcgttgttcagctcgaaccaaaccttgcgacgccaagttgaggactaccttgcccagacatatcggggcgaactcgcgagcaagcgccccgatcttctactcaacgagaatctcaacggcgaatacctgctgatcgagttcaaacgcccatcgcatgcgctgaatttcgttgactaccagcaggccacaggctaccgacacgacttcctcaaacacgtcagtaaaccggtcaaggtactagtcatcggcggtaaacgttctggggattatcctatgcagaacctggagcccaacgtatccactatgctgtttgccgacatcaattcttcggcgcgacggcaaattcaatggcagttgcgcactaagtctcaataa

SEQ ID NO: 61376 - DNA, 570 bp, Pseudomonas syringae pv. daphniphylli
ttgcaagtgattgaaaagtttgagaaggagatcgctaataccgatgctcttgagaaggtcgcgcagaattacctctttgatcatctttggttgcttgatccgacctggggccctgtaggtgaaagccgtgttatggaaaaaactcttactgccgagttgaaagaaatcgctcccgatgcatcaaccggcgctcggatcgatatagcttaccgaacgtccacggggcgacacgtcatagttgaactcaagaagcctgataagaagtcagtagacgttgatgatcttataaagcagggaagaaaatataggggggctgtaaatgagtatctgcgcaagcaaagtgatatgggaggtttgaacggtcgcaagccaccgattgacgtcgtctttgttacggctgaactatcaagaacaacagatggcgatgtgccggaaattcttagaaaaaatgaaatgcagtcttttacctataaaggaatgattgttaacgcaagacgagcatatcaagaatatctcgatgcgtcgccaagtgtatccgtgattgatgatattgtttcgaatataacctga

SEQ ID NO: 61377 - DNA, 1422 bp, Pseudomonas syringae pv. cunninghamiae
atggacgggactcagcaaaactcgcaggacatatggaatgcggaggacgtgctagggcctagcttcatcaccattcgccggccattagagaacggcctctgcgttgacttgtaccttcagatatttgacaaactctcctcggataaatggcagtcactccccgaagacagatggcatcgcctagccacgatcgagccgggttggatcacgatgtatcccatctacaccaacccccatactcagcgctatcggagcccgaagaacggaaacgtgggctgcatcatgtacagccatcagccgacgcgcgatcttccagacactccagaggacgccgtgctctacatcgacgccagcctccctcgaaaactgtttgatccctgtgaggaaggattggggctggttaaacagcttacgccgctctggcgaggcctgcgattcgctcccagtctgaaaactctagtcatatcggatgatggtgacacctcgatcacagacgacgtcgtctttgtaagtgaggcacgggtggatgaatgccgtagaacatgcatgcggatcactcgggctcgaaaaaagagtgaggcgtcagcccagatgcattgggtgctgagccaagtgtttccgacgctgatgcccaatgtagtctttgaaggcagccgtcctgtgctggcgagcgatacgacccctcgcagagtcagtaacgcagttgcgcaagcggctgtgcgggcgcggcgtcatcagctcagagaagtgaaggtcggcgttgagatgttggccaaggaagcgcctcgcgaactattcgaattgcacgcggagatcgagagggtcagcttggccgcaatgatcgaaaagttcgagagcatgctgagccagaacctcagcgagggccactggcagcattttttcgaagccaacctgttcatcctagcgatggtgttctcacgccctgtggcgcttctacatacccagttccatgcccaaggctccacgatcaatggagctggcgctcatattggcgatttgcttttctcacaaggacgcgaactggccatcgtggaaatcaagaaaccttccacccctttgatgcaaagccgaccgtatcgtaaccaggatgtcttcggcccgaatttgcagctcagtggagcaattacgcaggtgctatatcagcaaggcctgatgcgctccaactggctgtcgcaccttcgagatccaacgatgcgagacttgaatccagacaccgcgaggtgcgttgtcattgccggtaccaagccaaccgaggaaggacgccggcgcagcttcgagatattccgcaacgcctgcaaagatgtcgaggtcgttacctttgatgaactgctaggcaagctgcggatgctggcccagcacctgacgcccgcagctccggccgacctcccagatattttctga

SEQ ID NO: 61378 - DNA, 1602 bp, Pseudomonas syringae pv. aptata; identical to SEQ ID NO: 61363

SEQ ID NO: 61379 - DNA, 1437 bp, Pseudomonas syringae pv. aptata
atggcctactgccatcctagattgctagtctgtgagacaataatggtaattccaaatgctccaaaaccagcagatagacaaggtgacattgaaattaaggccctaaaaaacaatcaatacaatggcctttacactcctcgagcagcaatggctgaggcggcagggttgaaacttggtgtgtcagcgaaaatgctgcatctggacctagcacagcagagtttaacaatctacccactaatcacttggcctgaccatgaggaatttctgcaaccaaaatataaaaaaattcaaaaaatatggtttcctattgatgaaaaaactagcgatttctacaagaaaaaaactccgcttacctctgaagacttactagaattacttcgtgaaactttacttcctggctttactttggatcccgattatggacttggcattgcccgagaactaaaggatattatcgatgcggtagagttgcactcggactgcagtgaaataagcttctctgaaagcgagcaaacatgcataagcaacaataaaaaaatattcaccttcagtactgaagattattatgaggcgacaaagaatatacgaagcatatctagtcttggtcagaaagcagctgccgaggttaaagatggcactatatacaatttgctagctggcaagttagataaacctctaaaaacaattgcaattggtcgaagcccagtaaggcacttgattactgctgctgcactaggcaaaccaccgctgagctccggcgatcaagatagcgttattactattctcaaaactcatagcaaacagatagccgaagctaaacctgaagctctcgccaagttgcaagatgaaatagaattagtaaccctagaggtgttgataaaaaaatatgaggagaaattaaaaaggaccacgatagagagtgaatggcaggatttttttgactcaaataaatttatacttaccatggcttttggttatccgattgtacagattcttgggcaagcttcagttgggggtggccaattgatcggcggtggtagcaagtttgctgactttatttcgagaaatagccaaactaacaatgccgcgatatttgaaattaagactccaggaacaccacttctgaataaaacgcccttccgaggaaaggtgtattcagcaacaaaagagttcaccggcgcaatggtgcaaatattagaccaaaaatatcagctcgcaaaaaatctgcctatcttgaaaagcaacgatcgagatttaatgctagaggcttatgctgttcattgctgcctaataatcggtagtaccccaaagggtctagacgaacaaaagtcttttgagttattccgtcgaaactctagggaagtggaggtcattacctttgatgagctcttggaaaaactcaaacagcttcatgcgtttttatcatcaaatacctaa

SEQ ID NO: 61380 - DNA, 1146 bp, Pseudomonas syringae ICMP 11293
atgaaagctgaattactcaaagccttcgatgtactcatgccacactgcgatgtcagcgctgccttatgtgaagcagcaggtcaaggtgccctagatacgcccctggacgtgcactccatttgtactcgtgtcggactttcgcaggcacgagctgcggcagtagagcggacgttgatgatggggcaaacgtgcaatttgtttacgcagtcaacgccacacaaatggcaagtaggtgatcgtgctctggcgttagagttagctccctttttacacggcgcccggctttatcgagttcgtgttagcgatgctggtggggagttccaaacccgcatgcagcacgtggttatgacgggtattcccgcgcccagcaattcagaaattggtacggagtctgaaaacacgaaccagttggatctcgcgctagggctcaaccgctttggtccatcgcaacgtccagtaaacgctgctgaagttcgtcggcgtgcggtggtaaaagtccgagaggatcttccggcgcttgccgctgagcaccctcttacgttgatggcgctgcatgccgatatcgagcgggtctcgctgcagcaaatgatcgactcatatcgcgacatgcttgctcaacaactgagcgagaacttatggcagcaatttttcgatcagaatatcttcatactgacgatgttgttttgtggacccgtgcatttggtaagcgcgcagtttcatgcccagcccagtggaatcagaggtacaggagcccaaataggcgactatctttttcgaggggccggccaggttttgtcaattgtcgagatcaaaaagccctctacgcctctagtacaaaaaagagagtaccgcagcggcggcggagttcatgccccagactcggagttaagcggggcagtcagtcaggtgttgtatcaacgccactcgctacagacggcgtgggggattcatcgtgatgatgaggcgcttgcaggctctcggccggacaatacccggtgtgtggtaatcgccggaacactccccgccgagtcaaagctactacgttcgtttgagacgtttagatgttcctataaggatgtcgaaataatcaccttcgatgagctcctgcgaaagttggagctctttctgacgcacctggctgaatag

SEQ ID NO: 61381 - DNA, 903 bp, Pseudomonas syringae pv. syringae
atggcgttagagttagccccctttttacacggcgcccggctttatcgaatacgtgtcagccatgctggtgggcaatccccaacccgcatgcagcaagtggttatgacggaaactcccgcgcccagcaattctgaaatcgttacggagcctgaacgcacgaacgaattggagcccgcgtcagggctaaactgcctggatccatcgctacgtccaatggacgcagctgaagttcgccagcgtgcggtggcaaaagtgaggaaggatcttacggcgcttgctgctgagcacccacttaccttgatggcgctgcatgcagatatagagcgagtctcgctgcagcaaatgatcgactcatatcgtgacatgcttgctcaacagctgagcgagaatatatggcagaaattcttcgatcagaatattttcatactcacgatgttgttttgtggacccgttcatttggtaagcagtcagtttcatgcccagccaagtgggatcagaggcacaggagcccaaataggtgactatctttttcgaggagcaggtcaggttctgtcaattgtcgagataaaaaagccctctacgcctctagtacaaaaaagagagtaccgcagcggcggcggagttcatgccccagactcggagttaagcggggcagtcagtcaggtgttgtatcaacgccactcactacagacggcgtgggggattcatcgtgataatgaggcgcttgcaggctctcggccggacaatacccggtgtgtggtaatcgccggaacactccccgccgagtcaaagctactacgttcgtttgagacgtttagatgttcctataaggatgtcgaaataatcacctttgatgagctcctgcgaaagttggagctctttctgacgcacctggctgaatag

SEQ ID NO: 61382 - DNA, 1224 bp, Burkholderia glumae LMG 2196 = ATCC 33617
atgggtgatgattacgagtattttcgcaacaagcgcgccgatcgtgtttatctgagccgttcgctgtccgatacgcaatatcggaagggcgaagacggaagcgtggaggaatttgagcgcccttttcgcatcgtctccaaagtcatcgattgcgctgagtcgcaccaattttttcgcgacggtaagcaggtatcgcttcgaattactgaaggcgcgcgacaggagatcaaggcgaagttctatgaagatactcgcggcgtctcgacgttgactattcaacggtatacagttgaaagcgggagtccgcacggcacctacttcaccttcattaacgacgaaattgcgatcctgtacaacttcctcagaaacgttcagtttctgccgctaaaggacgagcagagcgcgaagctcgacgataagttcgtggaaagcctcgtactgagtcgcgaacaggctctcgaactgctgaatcagcagcctgatcttcttgacgagctggtccgaagccgggtcacggcacgcgacgttgccgagcttagccttcgaaaggagcagcttcgcgagttcgaacgcttattgtgcgacgagaagcactttgaacaacgaaggctggagacgggaaaaggcggtggccccgaggcagtatggcaaacgtacttcgaaaagaatacgtggatttttggctacggtcttaactacgttttcaactcaacactggacgaccaaaagcttgagcaggtggtgagaggacacgacatcgcaggtgccgggaagcgtgtcgatgtccttttgaaaactcatggtctgatcagtgctgtatcgtttggtgaaatcaaaacccacgcgacgccgcttctcaagcaggttgccagcccgtatcgaaaggaatgctggcaaatctccgatgaacttgcgggagcaattgcgcaggtacagcgttcggtacaagtttctctcaccagcattcgattacggctcgatgtaaggggcgacgatggcgctcccactggggagacggtattcctttaccagccacgctcgtttctcgtgatcgggtctctggcggaattccgcacaaagcacgggatcaacgaagagaagtactcttcgtttgagctcttccgcaaaagcgtcgccgcgccggaaattatcactttcgatgaactcttcgaacgagcgagattcatagtcgaggctggagagcacaagcgccgcgacgcgtga

SEQ ID NO: 61383 - DNA, 984 bp, Xanthomonas citri subsp. citri Aw12879
ttgaacgagacaacaaagagcaagcttcaggcgcttgcttggttcattccgcatattgatcgcaccgagttctctctcaagctggaaggcttcgttaagtcgaaaaatcagccatgggtcgaggacaaggcgaagacgctcacattgacggaggcctcttctctacagcttctgaaataccttcaaacccacctcccggttgcagcacaatcgggaacgggtgagttcattctcatcaaggtatccaacggcgaagccaacgtctctgagcacaagccggaggagttggtaggggcgctgaccaaggtgctttctcaaccggagctagtccagcatctatcgactgcggaacttacgcacgagttaagcgccgcgcttcgtggttcaattcgtttgagtgagatgcgttcggctgtggcagagctacgctctaacctggggcgtgaagtcggcgagcaggtgtatcaagcttggtgcgaaaagcactgctgggcgttcggcaatgcctatgtcctgcgcgatgaggtgcggaacatttcatcgggcgacagcctcgacttgctgttgcccaacgtcatcgccggctacagagacattgttgagctgaagcggccagacaaagacgtgttggtctatgactcggcgcatcggaactactacttttctgctgatgtttccaaagccattgggcagtgccatcgatacttagacatcttgcacgagcaggcgaagcatggcttgctggatcacaaggaggtcgtcgcttatcacccacgagcgaccatcgttattgggcgttcgcacgattggagtgccgagcagcagcgctcgctgcatggcttgaatcgccgcttgcacggcatatcggtgatgacctacgaccatcttttggcccaaggcgagcgactgctggagatgatgtcgccactagatccaagtctggtggatcccagtagcgatgaagacgacgatattccttggtag

SEQ ID NO: 61384 - DNA, 1065 bp, Xanthomonas citri pv. citri
atgcaagacgcgagcaaggtgcagaggattgtcaggaaggcagccagcagcgggaagctagactatgcgcctcccgttgtcttgaacgagacaacaaagagcaagcttcaggcgcttgcttggttcattccgcatattgatcgcaccgagttctctctcaagctggaaggcttcgttaagtcgaaaaatcagccatgggtcgaggacaaggcgaagacgctcacattgacggaggcctcttctctacagcttctgaaataccttcaaacccacctcccggttgcagcacaatcgggaacgggtgagttcattctcatcaaggtatccaacggcgaagccaacgtctctgagcacaagccggaggagttggtaggggcgctgaccaaggtgctttctcaaccggagctagtccagcatctatcgactgcggaacttacgcacgagttaagcgccgcgcttcgtggttcaattcgtttgagtgagatgcgttcggctgtggcagagctacgctctaacctggggcgtgaagtcggcgagcaggtgtatcaagcttggtgcgaaaagcactgctgggcgttcggcaatgcctatgtcctgcgcgatgaggtgcggaacatttcatcgggcgacagcctcgacttgctgttgcccaacgtcatcgccggctacagagacattgttgagctgaagcggccagacaaagacgtgttggtctatgactcggcgcatcggaactactacttttctgctgatgtttccaaagccattgggcagtgccatcgatacttagacatcttgcacgagcaggcgaagcatggcttgctggatcacaaggaggtcgtcgcttatcacccacgagcgaccatcgttattgggcgttcgcacgattggagtgccgagcagcagcgctcgctgcatggcttgaatcgccgcttgcacggcatatcggtgatgacctacgaccatcttttggcccaaggcgagcgactgctggagatgatgtcgccactagatccaagtctggtggatcccagtagcgatgaagacgacgatattccttggtag

SEQ ID NO: 61385 - DNA, 1065 bp, Xanthomonas citri subsp. citri; identical to SEQ ID NO: 61384

SEQ ID NO: 61386 - DNA, 1065 bp, Xanthomonas citri subsp. citri; identical to SEQ ID NO: 61384

SEQ ID NO: 61387 - DNA, 1065 bp, Xanthomonas citri subsp. citri; identical to SEQ ID NO: 61384

SEQ ID NO: 61388 - DNA, 1065 bp, Xanthomonas citri subsp. citri; identical to SEQ ID NO: 61384

SEQ ID NO: 61389 - DNA, 1065 bp, Xanthomonas citri pv. citri; identical to SEQ ID NO: 61384

SEQ ID NO: 61390 - DNA, 1194 bp, Agrobacterium tumefaciens str. Cherry 2E-2-2
atgctgcataatctttgcatgacagatgatgctgaatatcactggaagaagcagtcggaccgcacctacataagtcgtaggatagtccctgggaacaacgaaccttcgatgcgaattgcttccaaggttttcgatgtaggcggaggctatgtctacgctagggaacatgatgaacttgtcttgcgaaagacgttttcaggtaggcatgagatagtcgttaaatttaccgaagacgacaggcaaatattcaccttaactattcaaaaattcaataaaacttctgggccatctgataagtatcacttttcattcgttggcgaagaaatagacaatcttattgaattcttgctcaacattaagaatttccattttccagatactggaaaggtgaacatttcagatagtgatctgaggcagataattattgatgaggatcaggctcgccgtgtttttttagaaaatcgcgaaatgatagagcaattggttcaaagtgaagagttgacaagagatatagtggccctcggttatcggcgaaaacagcttgatgtttttgagcgtctactaatcgatgccgagtattttgcaaaacagcaatcgagattatgcacaactgctgagggactttggcaaaaattctttgagaagaataactggattttcggatatgggctatccttttcatttttttctaacttagacgggcgaggattagaacaacctgttgtcggacattctatcgctacagtcggtaaacgggcggatgctctgctaaaaacgcaagcttatgtgagtgccctttgttacgtggaaattaagaggcacgacacggcgcttttggattcaaaggcctatcgttccggtgcgtggaaaccttcggaggaattgtcgggtggagtcgcccaatcgcaagctaccgtccaggaagcaatggaactgtattctcgaaaggttcagccgacaaatagtggtggcgatcccacaggggaggtagtcttcaactttgagccgaaatcagtgcttgttataggtagtttgaacgagtttcaaaccgacaacggcctcaatgaaaataagtatcgttcatttgaattatttcgcaaaaatctacatcgcccagagattgttacctttgatgagctttttcaccgagctaaatatatagtggagcatagcggcaatcagacgattgattga

SEQ ID NO: 61391 - DNA, 551 bp, Agrobacterium tumefaciens
acacgaacgagttcgacccgggtttcgtgcatgcgctgcaacagataaacgactggaaggcttggtttctgcgcaacaacggtgacgccttcaaaaactccctttcggcgcttctcgtgcctgacaacatgggaaagaacccaatcgtacacaagtacgtcttggtgtacggcagacgttctgagatagagaatagcgacctacggaagtcgaaaatattggcgcagcagaccgacgactttaagattatgtcgttcgacagtctggccgagggtcttcttggcaaagcgataatggatatcggcatccgtcggaacgagtacatcgatcttatcgcggacgaggtcaacgatcctgctgtactctcgtacatcgagccaacgcaatggcggatcaataagaccctgcacaccgatatcgagagcagaattaatggtaagggcatgcgtattgagaggcgagtcggcgaaaagagggtgaacggctatcaatacgtcgccgacaacattcgaacacggagcgatacggaaaagctggaagaagacgcgtag

SEQ ID NO: 61392 - DNA, 846 bp, Agrobacterium tumefaciens
atgacagacgagcgtgatgcactcaaggctgaaattgaaacactcagagctgaatatatggctctgcttgatacgggagacaaagagcaggtctatcagagatatctggaggagaacacgcgactaatccctcgagatttcgtccaaaatcatggcgtctcctgcaagatcgttctgcggaagccggcattcggggccgattacaagtcggacttctttttcttgtcgaagagcacagtcctttggcacgctgtccacatagagatcgagaagccgtcgtcgaagtattttaaagaaggtaccaacgaattccacgctgatttcgtgcatgctcaacagcagatcaacgactggcaggcttggatgtatcgcaacaacgaagcagcattccgtggcgctgtttcggccctaatggtgccgctggccaacaatccggtcgaacacaagtacgtcctcgtctacggccgccgcggagagtatatcggcaacgagatccggcgatccaagatcgccgcgctggtgaaaagcagcggcattaagatcatgtcattcgacagtcttgcggaggacctctccggaaagccaccagtgaacatcggcatcagaaagaatgaatatatcgacgttatcggcgatgagttgatgaaaccggaggcctgtgcgttcatcgagccaaccttgttccgcgtgagccagtccgcgaaggataggcttatggatatggatggcggcggcccgtatatgcgaagttttcgagtgatcgaaggtgagcgggtggacgcctacaagtatgtcggcgcaaacgtgtgggtccgcggtgaccaagaaccggttatcgaggagtaa

SEQ ID NO: 61393 - DNA, 828 bp, Agrobacterium tumefaciens
ttgacttgggaacgctatagcgagctggtgcggcgcgattggcgcgacttgcttgattccgctgagcatcacgacgaggtgatcttccaaaaatttcttgagacacatccatgcatggtccctggcgggcagagcatgtcaggtccatcggggcacagcgcgttccccgcggcaatgatcactcaaccatctctgccgggcttcagcgagcatatcccagactttctttggatcgcgactgacagtttgcacatttatgcggtacttgttgagatagaatccccgaaaaaaaagatgttcaccaaaggtggccaaccgacagctcaattcacgcaagcgcaaaatcaaatcacccattggaaaagctggttccgcgacgcttccaaccagagattgttctgtgatcattacctaatggacgggttgccgcgctggcgcaccttcgtccctcagtacgtcctgatttacggccgccgatctgaaatcgagggaaacgcgcgactgaatggccttcgtgccaacctcagtagggatagcgaatattacatgaccttcgatcgcctacatccgataaaagaccatgaccagtatatgacagtgaggtttaggaacggcggctatcaagcggtgtcaatgccggcgacattggagatgggcccactctgggcaccaaatcggtcgaaaattgaaggcaaagatctgatagtagatagtacgctctatatggcagaagaccgcaaggagtttgtgaaatcacggttgggatattgggacaaatgggcagctgatggtcaggctggcataatcaggctcggcgatcgggagtga

SEQ ID NO: 61394 - DNA, 849 bp, Agrobacterium tumefaciens
atgcttggcgtaagtgatgaactgagagaagaaattgaggcgcttaggacagattatctggcgctcctcgacaaggaagagaaagagcaagtctaccagaaataccttgaggcaaacacgcgcctgatcccgagggagttcgttcaaaaccacggtatttcctgtcgcgtagtcctccggaagctgtcgctcgggtctgactacaagtccgatttcttctttctttcgaagtcctcgacccattggaatgcggtacacatcgagatcgagaagccgtcgtcgaaatacttcaagggcaacacgaacgagttcgacccgggtttcgtgcatgcgctgcaacagataaacgactggaaggcttggtttctgcgcaacaacggtgacgccttcaaaaactccctttcggcgcttctcgtgcctgacaacatgggaaagaacccaatcgtacacaagtacgtcttggtgtacggcagacgttctgagatagagaatagcgacctacggaagtcgaaaatattggcgcagcagaccgacgactttaagattatgtcgttcgacagtctggccgagggtcttcttggcaaagcgataatggatatcggcatccgtcggaacgagtacatcgatcttatcgcggacgaggtcaacgatcctgctgtactctcgtacatcgagccaacgcaatggcggatcaataagaccctgcacaccgatatcgagagcagaattaatggtaagggcatgcgtattgagaggcgagtcggcgaaaagagggtgaacggctatcaatacgtcgccgacaacattcgaacacggagcgatacggaaaagctggaagaagacgcgtag

SEQ ID NO: 61395 - DNA, 846 bp, Agrobacterium tumefaciens; identical to SEQ ID NO: 61392

SEQ ID NO: 61396 - DNA, 1173 bp, Sinorhizobium meliloti SM11
atgagcagtgaagaagagatatttcacaactgcaaatccgacaaaacgtacgccagtcccgcgttcaaggatttcaccgggcggaagctgcgcattgcgaacaaggtcatcgacgcccagccaggctatgaatttgccaaggtgaaggaagagcttgtccttcgacaaaccgaggccgggcgctttcagatcaaggcgagcttcctcgaagatgatcgctcttaccggacagtcacgatccagaagttcacgtcgaagggcaatgcgaaggaatatttctcctttggccctcacgagatgaccgcgctcctcaaattcatggcggacatcaagcggatacattttccggacgatggccgcctcaacatatccgaccatgacctcgaagacctgctgctcaagcctgaccagctacgcaggatcgcggccgacaaccagcagctccttgccgccattgctcggaatgagatcacgactgaggacgtcgttgccttatcttatcgcaggaagcagctcggcattttcgaacgtctgctttcggacgccgcctatttcgatgagtgcgtcgataagcacggaaaaggtccggaagggctctggcagcgtttcctggagaagaacccatggattctgggatactcgctcagccttataaatttcgggccgctcgatgaccgaaagctggagcagaccgttcgcggtcatgatctcggcggcccaggaaagcgggtcgatgcactgcttcgatcacgtgcgattctgaatacggcggccttcgtggagttgaagcaccaccgaaccgagctggtatctccggaccaataccgctccggcatctgggctccgtcgaaggagctttccggcgcggtcgcacaggttcagggaactgtggccgcagcgctcgaacgttggggcgcgtcggtgcgcatcacggacaccgacggcgagtcgacaggggaaatgatctacaccaccgaaccccgatccttcgtcatctgcggtcgccttgaggaatttgaaggcgagcacggcgtgaacgagcggaaattcggatgtttcgaacgttttaggcggaatctgctccggccagagatcattacctttgacgaactttacgagcgggcgcggctgatcgtgtccgccaatgatccgaatgattccggtcagccataa

SEQ ID NO: 61397 - DNA, 1425 bp, Sinorhizobium meliloti Rm41
gtggtatcgctgcgaccatctgattttaatcaacgagaaagggccgacggggggccatttctacatttttacgaacctggggaggaaacaggcttcgttgaagtatatttcagcgacttcgccgaccccagcattggcgacggccggctactacttcgtgtctttcccgaagcgttgttcataaacccaatccacgttggtcaaggcagcaaaagttacctggaaccgaaatacgggtctctcaccgagatcgtggtcccgcgctccaccctagcgccctataggcttccaaagacgacagatcacgtggaagagcttctgtcctcacttcctaaaggttttgaaacgaattggcggcttggcctcgggttgctttacgagtaccggatcatttgtcaatcgatcgcgagcatcccgggggtcagcacgctagtcgttcatggccaaagtggcgaaagagacgctatcatccgtctgcccgaatacgttctcggtataaagaggtttcatgaactccgtcacgagataactcggacgactactcatttccggcgcgaagcgcgtatggaaaagcaacggtgtctgcataagagcctcttgcaggcggccgacgccatccgcttcccgcagccagaaaagaagatcaagcccgacgcaatttttgacctgacaaacggcgggaagacgcttgcaggcctatccaagcgtgacaaacgagcagcgatccgcttggtgcagggcaacgttgcaacgttggcaaaaagcgaaccacacacattgctggctctcaagagtgagattgaacttgtaacactccagcagttaattgaacggtttcaggagatgctggagaaagatctaccggaagcgcgctggcaagagttcctgaagagcaacccgtttattctgagcatggctttttctgctccggcgatcgtgattcaagagaacgcctacgtcggcggcaagcagttctatgggggcaacgggaagtttgccgattttttgatggcaaccgcgtcaagcgggaacctggcgcttgtagagatcaagaaacctcacacggaccttctgaccaaggccgcctatcgtggcaccgatgtctttccgccatcgccagaattgagcggcgccgtataccaagttctagatcaacaaagccagcttcataaaaatctactcacattcaaggacgaaacgcagcgtagcgacatccatgcgcattcaataagatgcatagtcatcgccggcagaatgccagacgtccccaatcttcgaaaatcattcgaaattgtaagaaactcatacaccaatttgacaatcattacattcgacgagctctgcgcccgtctagtggagatagaaaaggcgctgtctcctcctgctcaaacgaggtccagcacaccttggtcgggtgcattttga

SEQ ID NO: 61398 - DNA, 456 bp, Sinorhizobium meliloti GR4
atggtgatcggcgcaggcggaacggacgatcgcgacaggccgacggtcgactaccttatgaacttcacccactattccgtccttgtcgagatcaagcgtcccgatactccgatctttcaacaacgccgctccggacgcgctggcacgtggaggttcagcaacgagttcatggatgcaatctcgcaggtactcgagcagaaggccgaatggttggtgcaggctcagacagggcagaactatgacaagtccggcaaccgtcgtctcaccgcgagaacccgcgatccgaaagctatcctggtcatagggcgtcgtcgcgacttcgaaggcgatggaagcgctcgcgacgccgaggttagacgcgccacgttcgagctttttcggcgcgacacccgaaatctggatatcgtaaccttcgatgaactactcgaccgtgcgcgattcatcaccagagactaa

SEQ ID NO: 61399 - DNA, 1173 bp, Sinorhizobium meliloti RU11/001; identical to SEQ ID NO: 61396

SEQ ID NO: 61400 - DNA, 1203 bp, Rhizobium leguminosarum bv. trifolii WSM1689
atgaaagttcagtggcaggtcacaatgtcggacagcgatgagatttacttctggggccgattaccccagatcacctattactccaagcgcctcacccaaataggtgagaagaacatacctccaaagaggttcatgtatcgggtggtcgagggcaaagggggaattatagcagtgaagggaggtaaagaggtcgtcctgcggaagagcaatgccgggcgctaccagttcaaggcgacactgcacgaggacagcggcaagattagcaccctcaccttccagaaatggaacagcaagaatatgccctacgctgtcgacaccttcccgctgtacgggaaggagatagatgagctactgacgtttataaaggcctgcgagaccatgattttcgtggacgagaacggtggcaaactgcccgaccgcgcccaggtccagtcctcgttcgaccgacgccagattgccaaagccctggtggaagacccgaacctcctaaatgcggtgcttgagaccgacgtggaggcccaggaaatctataacctcgcccgtcgcaagaaagagttggcctacttcaagcggatgcttgaggacgatgcattccgcgagcgcgagaaggtggcggccaagggacgtctggaggacgcgtggcaggccttctttgagcggaacacatggatatttggctatggcctctcatacatgccgatgagcaagctagacggccagatgctgaaatccaaggtcgcgggatataacatcaccggccgcggcaaggaggtggatgggctcatgaagaccgtcgccgccatcaattcgctctgcttcgtggaaatcaagacttccgacaccgatctagtcaggagctatcggccaggcgtttttgcgccgagcttggagcttgccggtgcagtgtcccaaatacaggttacggtccaacgagcgctggaagacctaaccgaggtttttcggcctacccattccgagacgggtgacttaacgggagagactctgtttcagtttcagccccgctcatttctggtcattggcaaccttggggaactcgatagtccgaacggcgccaataaggacaagtttaggtcgttcgagttgttccgtcgctcgctccgatggcctgaggtcatgacgttcgatgagctatatgcccgagccaagtttatagtagatgatgctgagaccgtgatggaataa

SEQ ID NO: 61401 - DNA, 1455 bp, Rhizobium leguminosarum bv. trifolii CB782
atggcaacgttcggcccccaattcggtaacgacgataaagggactctattcctgcagagaaaggggcctggcctcgtcgaggtgtttttcacaccgtcggatcggcggatcgcgattgctgaccttaccaagatcaatacgacgcaagtgctcttacgcttcgatgcggccaaacacacgaccacgttgttcccgatcaacactatgccggaagccgaagccttcctgatgccgaaatatgatccgattgtctcgatcgagatcatcgaagatgaaggtttcttccagacattcaacggcttccgcgctagagaggatgtcgaagcgtacctcgctgaaggcatgccgagaggtttcgtcaaagacccgaattacggccttggcctagatcgcaagctttcgttcattttgaatgctataaggcaagtggaaggcgtgacaaacctgcggattaccgacgcgcgtgagttggacgtcgcagtgacggatggcggaacgacctacgagatcggctacaggctctttgacgagttgcgccgaaatgccaaccgcttcgagacgaaggcgcaggattcggcgagaaggaagaagctgcaggctgcatataccaacctcctcactcgcctggaccctaagaaattcccggtaaggattttcgaccgcgcccccgacgacatcgccgacgtgatcggcaatacgatcacggattcaaagctctcggaaaatgaccgggcggctgtagtcaatatggccgcggcgtccgtgcgcacctcgatgaagtcgcagcgcgtcggcctggtcaagcttcacgatgagatcgaacttgcctcgctcgacgaactgatcgctcgtatggaagagcggttagccgaaagaacgagcgaactgcaatggcagaaactcctcgaggccaacccgttcatcctcgacatggcgttcaacgtgccggtcctgctagtgcagggccaggcgcatgtgggcggaaaggtgctgaacggctccggcgaaaagatcgccgacttcctgttcaccaacaagctcaccgacagcatcgccgtgctcgagatcaaaacgcccggcacggagctgatcggtaagagggaatatcgtggcggcgtttacaccgcatcggcagagctggtcggcgccgtggcacaggtgctcgatcaaatcgacaagttgcgcagcaatatctatcggcttcagtctgagaaccgcccgatcgcgctcgaggcctacggcatcaaggggatgattttggcgggtacgattccggaaggtccgcgaaagcgtgccttcgagctgtatcgagccagcctcgccggcgtcaccgtcatcacattcgatgagctgctgttaaagctgaaatcccttcgtgaccttctgggcggaaaagccgatgtcgccgtcagcgagaaaccaaaacccgcgcaagaattcgaggatctggtttaa

SEQ ID NO: 61402 - DNA, 1083 bp, Rhizobium leguminosarum bv. trifolii CB782
atgtccgaggacattggatacttagtgaattacctgcccgataggctgtacacgcacccgggcaaggccggaacttacgcgactatcgccggtgaaggcgaagaagtgatcggcgagttcgacgtaaccacgcgatgcaagatcgcagtgtccgccttttgggttcaggacaagagcgacttcgggacgtttaagataacgaagctgatctaccacaagacgtatggttggcggtcggacggccacattcaggtcaaccacttccaactagcgcagatgaaggagttcttgtcgatcatatcgaatttgaacctaggcgacgcgacgaaggcgcgcatctcgctcgacaacgtgaacatcggcgcactaggcgcgctgttgggcagttcgaaaggggctgagctgatccgcgaactcgccgaaaccccggaacttcaccacgacatttacgccgtggccgcgaagcgaaaggcgttggcggaattcgaacagcgcatgggcaccgacgcgccggagaaggattggcaagcgttcttcgaagcgaatcaatggatatttgggcatggcctcaactacgtctcgctggatcgggcatcggacactttgacggcgcggactaccggcaacgaattcgaccgcagcggcaaaaccgtcgacgcgtttttgcggacccgtgccgaagtcagtcagttcgtcttcgttgaaatcaagaaggacacgacggatcttcttcgccgtggcgacccctaccgtcccggatgttggggagtatccgccgaagtgtcaaacgcagttacgcaggtgcaaaagaccagcttcgagttcgcccgaaagcgcttccgcattgctctgaaagacagcgagggtacggatactggcgagagggcttattcgatcgaaccacgaagttacctcatcgtcgggaattcagcggaactggagggcaacgacgacaagatcgcatgcttcgaactgtaccgccgcaacgtccgcgcacccgagatcctgacgtttgacgagcttctttatcgagcccggtttatcgtccaaaccatcagccacggggcagcggtcgcagagtga

SEQ ID NO: 61403 - DNA, 288 bp, Rhizobium tropici CIAT 899
atggatgccgtgtcccaggttctcgaacagaaggcaggatggttcattcaaggccagaccggccaaaacttcgacaagaccggcaatcgccgcatgaccgcgaggacgcgggatcccaaggcgatcctggtgattgggcggggccgcgatatcgaaggcgatggaacctcccgtgacgctgaggtcagacgcgacacattcgaactgtttcgacgttacacccggaacctggacattgtcaccttcgatgaatggcttgatcgagcgagatttattccgagagactga

SEQ ID NO: 61404 - DNA, 1524 bp, Neorhizobium galegae bv. orientalis
gtgagcatttccgaaaacgacaatacctttagcttcatcgtccatgatgtacatcccggtgcggtcggcatagatttgcaagcagggcgctacttcacctctctcgtgcaagaaaatgtcaccgagacatcagagcttcccaccgcgccgattctgcatgtggatgccaccaagggttatttttcgataagaccccggttcaccctcccaaaccctccacaccgatttttggggccgcggtatagacggctcgaagagctggtgatcgaagggcatttccgtgacgacgatctgccgcacgacgatgcatcgacgagactgtttatccgggtttacacgccccccagcttcattcacgatcccctctacgggttggggatcatgaaagagatgcacccgctcataacggcaatcgaggaactcaaaggcgtcgcgacgcttgtcatttctgaccgaaacaaaacgcatttagatgaaaacaccttctatctggcgcgcgaggattacgacgcgctgcgcgctgcctccatgaccgtcgcgcggcattaccagggcgagagtttggaagaccgcaggatcctcgcgcacaacgcaacgctccaccgcgcgcaccccgatctcttccccgaaaaggcaacaccctaccgggccggaacggttttcaagctcttgggaagcaagggcagcgcgggcgtcaagctctctccccgcgaccgcgccggcatgattgccgctctgtcgtcagaggcccggaaaatcagcaaaagcgaaaagcacgctgcgatacagcttcagcaaggcattgagctgctgaacctgaaccagttgatcgcagccttcgaaaggcgcttgtcgggaagccaggcggaaaaggaatggcaggatctatttcagagaaacccctttatcctttctatgacgttgggctacccgatcaccgtgctgcagccccatgcccacgctggcggcatgaccctgcagggaaacggcaacaaaatcgccgattttcttgccaaaacccaaaccacgcacaacgcagctctgattgaaataaaaacgccgaaaacggagctgctcggggagcaatatcgcgtgggcgtgttcggcccatctcgatttttaaccggcgcagtcgtccaggttctcgaccagcgacggctgtttatcgaagaaatcgctaccctaaagcaccgctcgcgcatccaggaccttgaggcgcatgccgtggactgcgtcatcgtcgccggccggacgccgatggagccgtcgcgccaagcctctttcgaactcatccgtcaccagtataaggatgtgaccgtactgaccttcgatgaattactggaaaagttgaaattgcttcagtccctgctcgcccaggaaacggagccgacgaccgtggccgcttatcaaacatcggaagacgcgctggacctgagtgaattgctagaagacagcgccggaggcgacgacgacttctttgccgttggtccagcggtcgacgatgaattcgaggatttgctctag

SEQ ID NO: 61405 - DNA, 1467 bp, Methylobacterium extorquens CM4
atggccctcaatccttatcgcgcgggtcgcgggatgacgccaaattacggcgacgtgatcatcaaaaccggaaaaatctgcaccctcagctttcaaccgaaccaggacgggctggatgccgctcttcggaatgaccccaccttcgtagcgccgcctaaacccatcctcattgcgcggatcgacgatgccgccgggacattggaaatctatcccctcaacacgactcgcgagagcggcgacctcttcggaccaaaatatgatcgcatcgagtcaatccggttcgagaacttcaatctctcactgtggcacccgaccgatctcgatgaagcacgccattatctagcgaagcttccagccggcttcgtgcgcgctccagagatgggctttgggatcgattacgaattgcgagcgatcactgaagcactggaggagatgtcgatcgacggcctcgtaatccgagccggccgcacgtccgggctgccacggctcgaaggtacgaagtacgtgatgtcaaaggtgcatttcgacacggttcgccgcgcggtccggcgcgtgcacgaccaagcgcttgctcgtgccggcgaagagaaggagcgtgtcgcgcacaacgaacttctaacccgcgtcgatccagcccaattcccggaacagcccccgatctaccgccctgatggggtgaccgccattatcgccactcggtcgggggatgacctttcaccccgtgatcagcaaaccgtgatcgcagccgcaggcgccgttgcgaaagcagcgacgaaacggaaccaagcgcctctcctccagcttagccgcaagattgaaacggttacactcgatgagctgattagccgattccggaatttgctgaatgacaagtcttcagagaataagtggcaaactttctttcgcgacaatcccttcgttttgcggctggccttcggctttccagtagtccagatgggcgaacaagtttcggttggtggcggaaaattcacagggacaggtgggaagatctcggattttgtcgtcaaggcggcggcgactggcaatctcgctctcatcgaaattaagaccgcggacacacccctcctggagaaattagagtaccgcggaggcgtccatgcgccacatcgtgagttgtctggcgccgtcaatcaagtactggaccagcgctacctcctgcagaagcaccttcccgccctgaaggaaaactccggtgactatgatgtcgaaggcttttccgtgcagggcctagtgatcgccggccgagcacccgagattcgcgatcagaagaaatctttcgaaattttccgtcatagccttaaatcgattgtcatcataactttcgacgaattactcaaaaaactcgagatgctttcggactttcttcgttccagtgatgttccagagatgacagcctctgatgcagccgaaaaagacgactgtgcagatggcacacacatgcaatga

SEQ ID NO: 61406 - DNA, 1089 bp, Methylobacterium extorquens DSM 13060
gtggagcccaccaaggtttacgtcgacaagcgcgacccgtcgatcagcccgaaccttcttgggcgtaaggagtgcgtgctgaaggacgggcaggcggatcggtcgaaggtccgccggatcgcgcggctgacgagtgtccgtgatcagcacacgggcgagcaccaccacgacacactcaccatcaagaccatcgccttgtcgaagacggcttgcgaggtcgaccgcaagcggagcgtccaactcggcggcgacgagacccgtcgcctagccgacttcctagcggcgtccgggagcggctcggtcccgtccgacacgggcggctacatcgtcatgccggcgaagggcagccccgccaacgtgatccgcgccctgcaggacctgaccgcgacggaccgcatggatgccctcgcgatgctgctgcgcgaggcgtccgagaagccggccatcctcggcgacctggtggcccgcttggcggcggacgaaggcttcatcgagaaggcggtcgccgccatgaacctggccgtctaccggcaggtcctcgcccggctggaggcgatgattgaggatccggccacaaaagagggtcagttccagaagctactggaggagcagccctggctgttcggcagcgagtattcttgcatcctggaccgccgccgctggaccagagacgagatcaccgacttcgtgccacgacggtcgacggacggtcgcgtcgagctcattgagattaagacgccgctgcacggcaagacgctctttaactgggacgcctcccacaaggtctgggctccaggcatcgagctctcgcgcgtcgtcgcccaggccgagcactacctcgaaaggctcgaccggaaccgcgacagcatcctcgccaacgatcgcgaggacgtcaccaagatgcgcgcccgcatcatcatcggcagggacaaggacgacgaccagcggaacgcgctgcgccggcacaacggccacctccatcggatcgagatcatcacgttcgacggcctgctggctatcgcgcggcgcgtcctccggtattttgaggatacggctacagagggagccgcggtccacacagataggtga

SEQ ID NO: 61407 - DNA, 1128 bp, Legionella pneumophila subsp. pneumophila str. Philadelphia 1
ctgtctaaaaaacaaagggtaataatggggacgattacttatagttataaatctacctcgagctcctcagcagaaattgaggatattgagtttagtagaacatcaacaacacgaagaataattcgacctatgattgttgagaataatgagcgaccagatgctagtatcaaaattgagattattcatcaaaaagcagaaaaaggattgttcgaagatattccaactgaaaaattgtctaagtataaggctaaagatattggtaagttagttctaagtagtgaggagacattgtctctttttaatcatctttgcaacctatacttaattcataaagaaaatggaattccgtctggctatcatgaatttgaagttgatgaaaatagtagattaatgtcaatagactcgaaaagagcagctattattgaaacactaattcagcagggatactcagaagaagtatgggaaaaattggttgaaaattctcctgacttagcgactaaacttagtatagctcggttatatcaaacacgcatgactgccttagagcaatttagaacaatgctatcctgtgatcatagtgagcaagattggcaatccttttttgagaataataattggatatttggttatggattgaattataaaattttaaaagccattacaggacaacctcattatggaggcgtagtaattgatggaagtggaactaataagggagatttcttaagtgctactcaaggatatttaaaatttacggtattagttgaaattaaaagatcagacaccaagctattagcctcaaaaagatatagaaatgatgtggtattacctagtgaagatttaataggaggggtttctcaattaagagtgaatggtagaacctgggagcagcaaggatctcaactaccaaaaaatagagatctcctagaagatgactctatttatactattcagccacgaaaaattttggttatcggcaatactaatgaattaaacgatcgattaaagcgtgaaaactttgagttatttcgtagaggacaaagtgatattgaaatcctaaccttcgatgaactgttaaatcgggcacaattcataacagaacacactgaggcaatcaaagatggctag

SEQ ID NO: 61408 - DNA, 1128 bp, Legionella pneumophila subsp. pneumophila ATCC 43290; identical to SEQ ID NO: 61407

SEQ ID NO: 61409 - DNA, 1104 bp, Legionella pneumophila subsp. pneumophila LPE509
atggggacgattacttatagttataaatctacctcgagctcctcagcagaaattgaggatattgagtttagtagaacatcaacaacacgaagaataattcgacctatgattgttgagaataatgagcgaccagatgctagtatcaaaattgagattattcatcaaaaagcagaaaaaggattgttcgaagatattccaactgaaaaattgtctaagtataaggctaaagatattggtaagttagttctaagtagtgaggagacattgtctctttttaatcatctttgcaacctatacttaattcataaagaaaatggaattccgtctggctatcatgaatttgaagttgatgaaaatagtagattaatgtcaatagactcgaaaagagcagctattattgaaacactaattcagcagggatactcagaagaagtatgggaaaaattggttgaaaattctcctgacttagcgactaaacttagtatagctcggttatatcaaacacgcatgactgccttagagcaatttagaacaatgctatcctgtgatcatagtgagcaagattggcaatccttttttgagaataataattggatatttggttatggattgaattataaaattttaaaagccattacaggacaacctcattatggaggcgtagtaattgatggaagtggaactaataagggagatttcttaagtgctactcaaggatatttaaaatttacggtattagttgaaattaaaagatcagacaccaagctattagcctcaaaaagatatagaaatgatgtggtattacctagtgaagatttaataggaggggtttctcaattaagagtgaatggtagaacctgggagcagcaaggatctcaactaccaaaaaatagagatctcctagaagatgactctatttatactattcagccacgaaaaattttggttatcggcaatactaatgaattaaacgatcgattaaagcgtgaaaactttgagttatttcgtagaggacaaagtgatattgaaatcctaaccttcgatgaactgttaaatcgggcacaattcataacagaacacactgaggcaatcaaagatggctag

SEQ ID NO: 61410 - DNA, 1104 bp, Legionella pneumophila subsp. pneumophila str. Thunder Bay; identical to SEQ ID NO: 61409

SEQ ID NO: 61411 - DNA, 1104 bp, Legionella pneumophila; identical to SEQ ID NO: 61409

SEQ ID NO: 61412 - DNA, 1104 bp, Legionella pneumophila; identical to SEQ ID NO: 61409

SEQ ID NO: 61413 - DNA, 1104 bp, Legionella pneumophila; identical to SEQ ID NO: 61409

SEQ ID NO: 61414 - DNA, 1020 bp, Legionella pneumophila
atgtcagagatagtaaaagtaaaatccgtcagccgtgattttgccaagacaaatggcgttttgttaggggaaacttcaacaacagccttagtattttatcctgaaattcaccccggtggtgtgcgtggtcatcttgttaggttaaaaaagaaaaagggggagccatgggagaaaattccagagcaagatttcaaaaaattgcaactatatgaaggggtgcatatagagctgggcacggagcaaataacgaaattttgtgatgaaattgcaaaaagaaaacctatagcatctcagataccaataggccaagccacatatagagtatctactgatgaggatcatctaaacagcatattaatgcaaatagtcgatcaggggcaattaccagcactgttagagatgcttgaagattcagcccctaatatggccgataaattgactgctggccttattcagttacggcgaaaaaaaattattgaagaattaaaatatcgactaactcaaagttaccacgaaacaaagggcgaggattcatggcagagatggatttataagaattgttggatattcggagcaaattatcagcagccaattgaaaaacagaaaataaacatcagtgggattatgccagattatctatttccaaccatggataattttgtggacgttcttgaaataaaattacctacattttctgtcattgaagaagatcctaatcacaaaggatcatgggtttggtcaaaggaatcaaattatgcaatcggtcaggttgtaacataccttggcgaaatagaaagacaacgattagagcttgaacgttcaatcaaacaatatcatacaatagaagtttttatgttaaagccccgagcatatgttcttattggtcgaagtgaagattggactgcggaaaagaaagagggattaaaaaagcttaactatcatctacacggtatagagatattaacgtattctgatttattgaaaaaaggcgaggcatttcttcatttcccaccaaaataa

SEQ ID NO: 61415 - DNA, 1020 bp, Legionella pneumophila; identical to SEQ ID NO: 61414

SEQ ID NO: 61416 - DNA, 1104 bp, Legionella pneumophila; identical to SEQ ID NO: 61409

SEQ ID NO: 61417 - DNA, 1020 bp, Legionella pneumophila; identical to SEQ ID NO: 61414

SEQ ID NO: 61418 - DNA, 1104 bp, Legionella pneumophila; identical to SEQ ID NO: 61409

SEQ ID NO: 61419 - DNA, 1104 bp, Legionella pneumophila; identical to SEQ ID NO: 61409

SEQ ID NO: 61420 - DNA, 1020 bp, Legionella pneumophila; identical to SEQ ID NO: 61414

SEQ ID NO: 61421 - DNA, 1104 bp, Legionella pneumophila; identical to SEQ ID NO: 61409

SEQ ID NO: 61422 - DNA, 1104 bp, Legionella pneumophila; identical to SEQ ID NO: 61409

SEQ ID NO: 61423 - DNA, 1104 bp, Legionella pneumophila; identical to SEQ ID NO: 61409

SEQ ID NO: 61424 - DNA, 1104 bp, Legionella pneumophila; identical to SEQ ID NO: 61409

SEQ ID NO: 61425 - DNA, 1104 bp, Legionella pneumophila; identical to SEQ ID NO: 61409

SEQ ID NO: 61426 - DNA, 1104 bp, Legionella pneumophila; identical to SEQ ID NO: 61409

SEQ ID NO: 61427 - DNA, 1104 bp, Legionella pneumophila; identical to SEQ ID NO: 61409

SEQ ID NO: 61428 - DNA, 1104 bp, Legionella pneumophila; identical to SEQ ID NO: 61409

SEQ ID NO: 61429 - DNA, 1104 bp, Legionella pneumophila; identical to SEQ ID NO: 61409

SEQ ID NO: 61430 - DNA, 1104 bp, Legionella pneumophila; identical to SEQ ID NO: 61409

SEQ ID NO: 61431 - DNA, 1104 bp, Legionella pneumophila; identical to SEQ ID NO: 61409

SEQ ID NO: 61432 - DNA, 1104 bp, Legionella pneumophila; identical to SEQ ID NO: 61409

SEQ ID NO: 61433 - DNA, 1104 bp, Legionella pneumophila; identical to SEQ ID NO: 61409

SEQ ID NO: 61434 - DNA, 1020 bp, Legionella pneumophila
atgccagagatagtaaaagtaaaatccgtcagccgtgattttgccaaaacaaatggagtattgttagaggaaacttcaacaacagccttagtattttatcctgaaattcaccccggtggtgtgcgtggccatcttgttaggttaaaaaagaaaaagggtgagccatgggagaaaattccagaacaagatttcaaaaagctgcagctatatgaaggggtacatatagagctgggcactgagcaaataacaaaattttgtgatgaaattgcaaaaagaaaacccatagcatctcagatacccataggccaagccacatatagagtatctactgaggaggatcatctaaacggcgtatttatgcagttggtcgatcagggacaactacctgcactgatggagatgcttgaggattcagctcctaatatggccgataaattgactgctggccttattcagttacggcgaaaaaaaatcattgaagaattaaaatatcgactaactcaaagttaccacgaaacaaaaggcgaggattcatggcaaagatggatttatgaaaactgttggatatttggagcaaattatcagcaacctattgaaaaacaaaaaataaacattagtgggattatgccagattatctatttccaaccatggataattttgtggacgttcttgaaataaaattacccaccttttctgtaattgaagaagacccccatcacaaaggatcatgggtttggtcaaaggaatcaaattatgcaatcggtcaggttgtaacatacctaggcgaaatagaaagacaacgattggagattgaacgttcaatcaaacaataccatcaaatagaaattttcatgttaaagcctcgagcatttattcttattggtcgaagtgaagactggactactgaaaagaaagagggattaaaaaaacttaattatcatctgcatggtatagaggtattaacatattctgatttattgaaaagaggtgaggcatttcttcactttccacaaaactag

SEQ ID NO: 61435 - DNA, 1104 bp, Legionella pneumophila; identical to SEQ ID NO: 61409

SEQ ID NO: 61436 - DNA, 1104 bp, Legionella pneumophila; identical to SEQ ID NO: 61409

SEQ ID NO: 61437 - DNA, 1104 bp, Legionella pneumophila; identical to SEQ ID NO: 61409

SEQ ID NO: 61438 - DNA, 1104 bp, Legionella pneumophila; identical to SEQ ID NO: 61409

SEQ ID NO: 61439 - DNA, 1020 bp, Legionella pneumophila; identical to SEQ ID NO: 61414

SEQ ID NO: 61440 - DNA, 1104 bp, Legionella pneumophila; identical to SEQ ID NO: 61409

SEQ ID NO: 61441 - DNA, 1104 bp, Legionella pneumophila; identical to SEQ ID NO: 61409

SEQ ID NO: 61442 - DNA, 1020 bp, Legionella pneumophila
atgccagagatagtaaaagtcaaatcagtcagccgtgattttgccaaaacaaatggagtattgttagaggaaacctcaacaacagccttagtattttttcctgaaactcaccccggtggcgtacgcggacatcttgttaggttaaaaaagaaaaagggggaaccatgggagaaaattccagaacaagatttcaaaaaactgcggctatatgaaggtgtgcatatagagctgggtacggagcaaataacgaaactttgtgatgaaatcgcaaaaagaaaacctatagcatctcagttacctataggccaagccacatatagagtatctactgatgaggataatctaaacggcgtaatcacgcagttggtcaatcagggacaattacctgcactgttggagatgcttgaagattcggatcctaatacggccgataaattgactgctggccttattcagttaaggcgaaaaaaaatcattgaggaattaaaatatcgattaactcaaagttaccacgaaacaaaaggcgaggattcatggcaaagatggatttatgaaaactgttggatatttggagcaaattatcagcaacctattgaaaaaacgaaaataaacattagtgggattatgccagattatctatttccaactatggataattttgtggacgttcttgaaataaaattacccaccttttctgtgattgaagcagaccctaatcacaaaggatcatgggtttggtcaaaggaatcaaattatgcaattggtcaggttgtaacataccttggggaaatagaaagacaacgattggagcttgaacgctcaatcaaacagtatcaccaaatagaaattttcatgttaaagccacgagcatacatccttattggtcgaagtgatgattgggcagctgaaaagaaagagggattaaaaaaacttaattatcatctgcatggtatagaggtattaacgtattctgatttattgaaaagaggcgaggcatttcttcatttcccccaaaactaa

SEQ ID NO: 61443 - DNA, 1104 bp, Legionella pneumophila; identical to SEQ ID NO: 61409

SEQ ID NO: 61444 - DNA, 1104 bp, Legionella pneumophila; identical to SEQ ID NO: 61409

SEQ ID NO: 61445 - DNA, 1104 bp, Legionella pneumophila; identical to SEQ ID NO: 61409

SEQ ID NO: 61446 - DNA, 1020 bp, Legionella pneumophila; identical to SEQ ID NO: 61414

SEQ ID NO: 61447 - DNA, 1104 bp, Legionella pneumophila; identical to SEQ ID NO: 61409

SEQ ID NO: 61448 - DNA, 1104 bp, Legionella pneumophila; identical to SEQ ID NO: 61409

SEQ ID NO: 61449 - DNA, 1104 bp, Legionella pneumophila; identical to SEQ ID NO: 61409

SEQ ID NO: 61450 - DNA, 1104 bp, Legionella pneumophila; identical to SEQ ID NO: 61409

SEQ ID NO: 61451 - DNA, 1104 bp, Legionella pneumophila; identical to SEQ ID NO: 61409

SEQ ID NO: 61452 - DNA, 1104 bp, Legionella pneumophila; identical to SEQ ID NO: 61409

SEQ ID NO: 61453 - DNA, 1104 bp, Legionella pneumophila; identical to SEQ ID NO: 61409

SEQ ID NO: 61454 - DNA, 1020 bp, Legionella pneumophila
atgtcagagatagtaaaagtaaaatccgttagccgtgattttgccaagacaaatggcgttttgttagaggaaacttcaacaacagccttagtattttatcctgaaattcaccccggtggtgtgcgtggtcatcttgttaggttaaaaaagaaaaagggggagccatgggagaaaattccagaacaagatttcaaaaaactgcaactatatgaaggggtgcatatagagctgggcacagagcaaataacgaaattttgtgatgaaattgcaaaaagaaaacccatagcatctcagatacccataggccaagccacatatagagtatctacagatgaggatcatctaaacagcatatttaggcaaatagtcgatcagggtcaattacctgcactgttagaaatgcttgaagattcagcccctaatatggccgataaattgactgctggccttattcagttacggcgaaaaaaaatcattgaagaattaaaataccgactaactcaaagttaccacgaaacaaagggcgaggattcatggcagagatggatttataaaaattgttggatattcggagcaaattatcagcagccaattgaaaaacagaaaataaacatcagtgggattatgccagattatctatttccaaccatggacaattttgtggacgttcttgaaataaaattacctaccttttctgtcattgaagaggaccctaatcataaaggatcatgggtttggtcaaaggaatcaaattatgcaatcggtcaggttgtaacataccttggcgaaatagaaagacaacgattagagcttgagcgttcaatcaaacaatatcatcaaatagaagtttttatgctaaaaccccgggcatatattcttattggtcgaagtgaagattggactgcggagaagaaagagggattaaaaaagcttaattatcatctgcacggtatagaggtattaacgtactctgatttattgaaaagaggcgaggcatttcttcatttcccacaaaactga

SEQ ID NO: 61455 - DNA, 1104 bp, Legionella pneumophila; identical to SEQ ID NO: 61409

SEQ ID NO: 61456 - DNA, 1104 bp, Legionella pneumophila; identical to SEQ ID NO: 61409

SEQ ID NO: 61457 - DNA, 1104 bp, Legionella pneumophila; identical to SEQ ID NO: 61409

SEQ ID NO: 61458 - DNA, 1104 bp, Legionella pneumophila; identical to SEQ ID NO: 61409

SEQ ID NO: 61459 - DNA, 1104 bp, Legionella pneumophila; identical to SEQ ID NO: 61409

SEQ ID NO: 61460 - DNA, 1104 bp, Legionella pneumophila; identical to SEQ ID NO: 61409

SEQ ID NO: 61461 - DNA, 1104 bp, Legionella pneumophila; identical to SEQ ID NO: 61409

SEQ ID NO: 61462 - DNA, 1104 bp, Legionella pneumophila; identical to SEQ ID NO: 61409

SEQ ID NO: 61463 - DNA, 1104 bp, Legionella pneumophila; identical to SEQ ID NO: 61409

SEQ ID NO: 61464 - DNA, 1104 bp, Legionella pneumophila; identical to SEQ ID NO: 61409

SEQ ID NO: 61465 - DNA, 1104 bp, Legionella pneumophila; identical to SEQ ID NO: 61409

SEQ ID NO: 61466 - DNA, 1104 bp, Legionella pneumophila; identical to SEQ ID NO: 61409

SEQ ID NO: 61467 - DNA, 1104 bp, Legionella pneumophila; identical to SEQ ID NO: 61409

SEQ ID NO: 61468 - DNA, 1020 bp, Legionella pneumophila
atgtcagagatagtaaaagtaaaatccgtcagccgtgattttgccaagacaaatggcgttttgttaggggaaacttcaacaacagccttagtattttatcctgaaattcaccccggtggtgtgcgtggtcatcttgttaggttaaaaaagaaaaagggggagccatgggagaaaattccagagcaagatttcaaaaaattgcaactatatgaaggggtgcatatagagctgggcacggagcaaataacgaaattttgtgatgaaattgcaaaaagaaaacctatagcatctcagataccaataggccaagccacatatagagtatctactgatgaggatcatctaaacagcatattaatgcaaatagtcgatcaggggcaattaccagcactgttagagatgcttgaagattcagcccctaatatggccgataaattgactgctggccttattcagttacggcgaaaaaaaattattgaagaattaaaatatcgactaactcaaagttaccacgaaacaaagggcgaggattcatggcagagatggatttataagaattgttggatattcggagcaaattatcagcagccaattgaaaaacagaaaataaacatcagtgggattatgccagattatctatttccaaccatggataattttgtggacgttcttgaaataaaattacctacattttctgtcattgaagaagatcctaatcacaaaggatcatgggtttggtcaaaggaatcaaattatgcaatcggtcaggttgtaacataccttggcgaaatagaaagacaacgattagagcttgaacgttcaatcaaacaatatcatacaatagaagtttttatgttaaagccccgagcatatgttcttattggtcgaagtgaagattggactgcggaaaagaaagagggattaaaaaagcttaactatcatctacacggtatagaggtattaacgtattctgatttattgaaaagaggcgaggcatttcttcatttcccaccaaaataa

SEQ ID NO: 61469 - DNA, 1104 bp, Legionella pneumophila; identical to SEQ ID NO: 61409

SEQ ID NO: 61470 - DNA, 1104 bp, Legionella pneumophila; identical to SEQ ID NO: 61409

SEQ ID NO: 61471 - DNA, 1104 bp, Legionella pneumophila; identical to SEQ ID NO: 61409

SEQ ID NO: 61472 - DNA, 1104 bp, Legionella pneumophila; identical to SEQ ID NO: 61409

SEQ ID NO: 61473 - DNA, 1104 bp, Legionella pneumophila; identical to SEQ ID NO: 61409

SEQ ID NO: 61474 - DNA, 1104 bp, Legionella pneumophila; identical to SEQ ID NO: 61409

SEQ ID NO: 61475 - DNA, 1104 bp, Legionella pneumophila; identical to SEQ ID NO: 61409

SEQ ID NO: 61476 - DNA, 1104 bp, Legionella pneumophila; identical to SEQ ID NO: 61409

SEQ ID NO: 61477 - DNA, 1104 bp, Legionella pneumophila; identical to SEQ ID NO: 61409

SEQ ID NO: 61478 - DNA, 1020 bp, Legionella pneumophila; identical to SEQ ID NO: 61414

SEQ ID NO: 61479 - DNA, 1020 bp, Legionella pneumophila; identical to SEQ ID NO: 61414

SEQ ID NO: 61480 - DNA, 1020 bp, Legionella pneumophila; identical to SEQ ID NO: 61414

SEQ ID NO: 61481 - DNA, 1020 bp, Legionella pneumophila; identical to SEQ ID NO: 61414

SEQ ID NO: 61482 - DNA, 1020 bp, Legionella pneumophila; identical to SEQ ID NO: 61414

SEQ ID NO: 61483 - DNA, 1020 bp, Legionella pneumophila; identical to SEQ ID NO: 61414

SEQ ID NO: 61484 - DNA, 1020 bp, Legionella pneumophila; identical to SEQ ID NO: 61414

SEQ ID NO: 61485 - DNA, 1020 bp, Legionella pneumophila; identical to SEQ ID NO: 61414

SEQ ID NO: 61486 - DNA, 1020 bp, Legionella pneumophila; identical to SEQ ID NO: 61414

SEQ ID NO: 61487 - DNA, 1020 bp, Legionella pneumophila; identical to SEQ ID NO: 61414

SEQ ID NO: 61488 - DNA, 1104 bp, Legionella pneumophila; identical to SEQ ID NO: 61409

SEQ ID NO: 61489 - DNA, 1104 bp, Legionella pneumophila; identical to SEQ ID NO: 61409

SEQ ID NO: 61490 - DNA, 1020 bp, Legionella pneumophila
atgtcagagatagtaaaagtaaaatccgttagccgcgattttgccaagacaaatggcgttttgttaggggaaacttcaacaacagccttagtattttatcctgaaattcatcccggtggtgtgcgtggtcatcttgtcaggttaaaaaagaaaaagggggagccatgggagaaaattccagaacaagatttcaaaaaactgcaactatatgaaggggtgcatatagagctgggcacggagcaaataacaaaattttgtgatgaaattgcaaaaagaaaacctatagcatctcagatacccataggccaagccacatatagagtatctacagatgaagagcatttaaacagcatatttaggcaaatagtcgatcaaggacaattacctgcactgttagagatgcttgaagattcagcccctaatatggccgataaattgactgctggccttattcagttacggcgaaaaaaaatcattgaagaattaaaatatcgactaactcaaagttaccacgaaacaaagggcgaggattcatggcagagatggatttataaaaattgttggatattcggagcaaattatcagcagccaattgaaaaacagaaaataaacatcagtgggattatgccagattatctatttccgaccatggacaattttgtggacgttcttgaaataaaattacctaccttttctgtcattgaagaggaccctaatcataagggatcatgggtttggtcaaaggaatcaaattatgcaatcggtcaggttgtaacataccttggcgaaatagaaagacaacgattagagcttgagcgttcaatcaaacaatatcatcaaatagaagtttttatgttaaagccccgggcatatattcttattggtcgaagtgaagattggactgcggaaaagaaagagggattaaaaaagcttaattatcatctgcacggtatagaggtattaacgtactctgatttattgaaaagaggcgaggcatttcttcatttcccacaaaactga

SEQ ID NO: 61491 - DNA, 1104 bp, Legionella pneumophila; identical to SEQ ID NO: 61409

SEQ ID NO: 61492 - DNA, 1104 bp, Legionella pneumophila; identical to SEQ ID NO: 61409

SEQ ID NO: 61493 - DNA, 1104 bp, Legionella pneumophila; identical to SEQ ID NO: 61409

SEQ ID NO: 61494 - DNA, 1104 bp, Legionella pneumophila; identical to SEQ ID NO: 61409

SEQ ID NO: 61495 - DNA, 1104 bp, Legionella pneumophila; identical to SEQ ID NO: 61409

SEQ ID NO: 61496 - DNA, 1104 bp, Legionella pneumophila; identical to SEQ ID NO: 61409

SEQ ID NO: 61497 - DNA, 1104 bp, Legionella pneumophila; identical to SEQ ID NO: 61409

SEQ ID NO: 61498 - DNA, 1104 bp, Legionella pneumophila; identical to SEQ ID NO: 61409

SEQ ID NO: 61499 - DNA, 1104 bp, Legionella pneumophila; identical to SEQ ID NO: 61409

SEQ ID NO: 61500 - DNA, 1104 bp, Legionella pneumophila; identical to SEQ ID NO: 61409

SEQ ID NO: 61501 - DNA, 1104 bp, Legionella pneumophila; identical to SEQ ID NO: 61409

SEQ ID NO: 61502 - DNA, 1104 bp, Legionella pneumophila; identical to SEQ ID NO: 61409

SEQ ID NO: 61503 - DNA, 1104 bp, Legionella pneumophila; identical to SEQ ID NO: 61409

SEQ ID NO: 61504 - DNA, 1104 bp, Legionella pneumophila; identical to SEQ ID NO: 61409

SEQ ID NO: 61505 - DNA, 1104 bp, Legionella pneumophila; identical to SEQ ID NO: 61409

SEQ ID NO: 61506 - DNA, 1104 bp, Legionella pneumophila; identical to SEQ ID NO: 61409

SEQ ID NO: 61507 - DNA, 1104 bp, Legionella pneumophila; identical to SEQ ID NO: 61409

SEQ ID NO: 61508 - DNA, 1104 bp, Legionella pneumophila; identical to SEQ ID NO: 61409

SEQ ID NO: 61509 - DNA, 1104 bp, Legionella pneumophila; identical to SEQ ID NO: 61409

SEQ ID NO: 61510 - DNA, 1104 bp, Legionella pneumophila; identical to SEQ ID NO: 61409

SEQ ID NO: 61511 - DNA, 1104 bp, Legionella pneumophila; identical to SEQ ID NO: 61409

SEQ ID NO: 61512 - DNA, 1104 bp, Legionella pneumophila; identical to SEQ ID NO: 61409

SEQ ID NO: 61513 - DNA, 1104 bp, Legionella pneumophila; identical to SEQ ID NO: 61409

SEQ ID NO: 61514 - DNA, 1020 bp, Legionella pneumophila; identical to SEQ ID NO: 61414

SEQ ID NO: 61515 - DNA, 1020 bp, Legionella pneumophila; identical to SEQ ID NO: 61414

SEQ ID NO: 61516 - DNA, 1104 bp, Legionella pneumophila; identical to SEQ ID NO: 61409

SEQ ID NO: 61517 - DNA, 1104 bp, Legionella pneumophila; identical to SEQ ID NO: 61409

SEQ ID NO: 61518 - DNA, 1104 bp, Legionella pneumophila; identical to SEQ ID NO: 61409

SEQ ID NO: 61519 - DNA, 1104 bp, Legionella pneumophila; identical to SEQ ID NO: 61409

SEQ ID NO: 61520 - DNA, 1020 bp, Legionella pneumophila; identical to SEQ ID NO: 61442

SEQ ID NO: 61521 - DNA, 1104 bp, Legionella pneumophila; identical to SEQ ID NO: 61409

SEQ ID NO: 61522 - DNA, 1104 bp, Legionella pneumophila; identical to SEQ ID NO: 61409

SEQ ID NO: 61523 - DNA, 1104 bp, Legionella pneumophila; identical to SEQ ID NO: 61409

SEQ ID NO: 61524 - DNA, 1104 bp, Legionella pneumophila; identical to SEQ ID NO: 61409

SEQ ID NO: 61525 - DNA, 1104 bp, Legionella pneumophila; identical to SEQ ID NO: 61409

SEQ ID NO: 61526 - DNA, 1104 bp, Legionella pneumophila; identical to SEQ ID NO: 61409

SEQ ID NO: 61527 - DNA, 1104 bp, Legionella pneumophila; identical to SEQ ID NO: 61409

SEQ ID NO: 61528 - DNA, 1104 bp, Legionella pneumophila; identical to SEQ ID NO: 61409

SEQ ID NO: 61529 - DNA, 1104 bp, Legionella pneumophila; identical to SEQ ID NO: 61409

SEQ ID NO: 61530 - DNA, 1104 bp, Legionella pneumophila; identical to SEQ ID NO: 61409

SEQ ID NO: 61531 - DNA, 1104 bp, Legionella pneumophila; identical to SEQ ID NO: 61409

SEQ ID NO: 61532 - DNA, 999 bp, Acinetobacter baumannii ACICU
atgtttaagaatatagatgatcgtttagttataaaatgtgaggagttaaatgtaaaacttaatttattaaatattagtctaagtttatcgcaagtaatttcgactcttacatttggtgcttatggggaagtacttgatataaaattaccgacctcagcggactcatttggtataccatttataatggagaaaattggttttttccctgctgatcttaacaataaaagattttttaattatattgaaatatatggtcatgcctcttcatgtgcatgggatgcacgtttaatgaatcttagagttaagaatgatttaagaagagattttgctaaacatcttgctaatttagatgataaaaagggaggggttatttcattcggtgaaaacatggagtgggttgaaaattatactaacagactattgaatttagaagttgcaattaatgagttcagacaagttttacattttcattcacatgagacagaagaagtttttcataagcttatggaaaagcatcctttattacttgatgtatatggaaaagttgaaagtaaacctaaattagtttatcccgctggtgagttttctcctattggaaaaacatatgtagagcctgattttataatttcctattcagatcagtcctataaattgatcgaattagaacgtgcttcaaaaaatgttgttacaagccaaggacaacctagagcggaagtaggacaagcagcttttcagacagctgaatggacacattttattagtgaacattataatttaattaggaagcaataccccagtatcaatgtgaagtgtaaaacatgtttaataatgagccgttcgtcacagctcagttttaaaaactcagttgatattaatcgatataaagagctaattattaaacaatattctttagatgagtttttaacatatgacgatttatttgatagagcttgccaagcttatacattcttaacaggtctatcgccacaaaataattaa

SEQ ID NO: 61533 - DNA, 1200 bp, Acinetobacter baumannii 1656-2
atgcaacaaagccaagttgctcctgaaccagattatcaatggtatatagcaggaggtcctgccttaaaaatagattatgaaccaacaaaaactccaaaacatattatagaattattaaaaaaaaataatttatatgggaaacctattggtatttatagaatagtttcaaaaaaatatataagtgctcctgtatggaaagggatgtttaagaatatagatgatcgtttagttataaaatgtgaggagttaaatgtaaaacttaatttattaaatattagtctaagtttatcgcaagtaatttcgactcttacatttggtgcttatggggaagtacttgatataaaattaccgacctcagcggactcatttggtataccatttataatggagaaaattggttttttccctgctgatcttaacaataaaagattttttaattatattgaaatatatggtcatgcctcttcatgtgcatgggatgcacgtttaatgaatcttagagttaagaatgatttaagaagagattttgctaaacatcttgctaatttagatgataaaaagggaggggttatttcattcggtgaaaacatggagtgggttgaaaattatactaacagactattgaatttagaagttgcaattaatgagttcagacaagttttacattttcattcacatgagacagaagaagtttttcataagcttatggaaaagcatcctttattacttgatgtatatggaaaagttgaaagtaaacctaaattagtttatcccgctggtgagttttctcctattggaaaaacatatgtagagcctgattttataatttcctattcagatcagtcctataaattgatcgaattagaacgtgcttcaaaaaatgttgttacaagccaaggacaacctagagcggaagtaggacaagcagcttttcagacagctgaatggacacattttattagtgaacattataatttaattaggaagcaataccccagtatcaatgtgaagtgtaaaacatgtttaataatgagccgttcgtcacagctcagttttaaaaactcagttgatattaatcgatataaagagctaattattaaacaatattctttagatgagtttttaacatatgacgatttatttgatagagcttgccaagcttatacattcttaacaggtctatcgccacaaaataattaa

SEQ ID NO: 61534 - DNA, 999 bp, Acinetobacter baumannii ABNIH3; identical to SEQ ID NO: 61532

SEQ ID NO: 61535 - DNA, 636 bp, Acinetobacter baumannii Naval-72
atggtttttgatttagtaaaagtaaaagagcagctaaaaaatgcaagagttaaatcttctgaaagagaacttctacaattactaaaagaaaatagttttcttttctctgagttattttcaagacattggggaatacaaccaattttttcagaagttagttttggtaataattttagatgtgatttttgttggttaaatgataattcagatggtcctgagtgggttttagtcgaaattgaaaaacctaatgtaagactctttaacaaaaaaaatgaacctagtgctgagttaaatcatggaattgaacaagtaaaaagttggcaaagatattttaatttttaccctgctgagaaaagcaggatctttggagcggtgagcaaatttagatatatcttagtaattggtgaaaaaaatgattgggaacagaaagaggctagcttatggagaacttttgaaaatcagaaaagtatcgaaattcgatctatggacatttttgatagagctatcgaaaattatgaaaaaaatcccaatcattactggagttttgaagaaaattcgtgtgtattaaactctacagaacttcaaaactattgggaaaaatatccgtatataatgagatggaaaacaatgctatag

SEQ ID NO: 61536 - DNA, 1374 bp, Acinetobacter baumannii OIFC338
atgaaagttgagttaaaagaattaggggagaatattcgattttatatagaaaaatatagggaaaactataaattttttacatcaacaccacctcatggcgctggttatccaaaattgttagtttctccttatttaacggctaaagaatttgatatctatttggctgaggatggagtagtcattaatgaagttgctcctgaaccagattatcaatggtatatagcaggaggtcctgccttaaaaatagattatgaaccaacaaaaactccaaaacatattatagaattattaaaaaaaaataatttatatgggaaacctattggtatttatagaatagtttcaaaaaaatatataagtgctcctgtatggaaagggatgtttaagaatatagatgatcgtttagttataaaatgtgaggagttaaatgtaaaacttaatttattaaatattagtctaagtttatcgcaagtaatttcgactcttacatttggtgcttatggggaagtacttgatataaaattaccgacctcagcggactcatttggtataccatttataatggagaaaattggttttttccctgctgatcttaacaataaaagattttttaattatattgaaatatatggtcatgcctcttcatgtgcatgggatgcacgtttaatgaatcttagagttaagaatgatttaagaagagattttgctaaacatcttgctaatttagatgataaaaagggaggggttatttcattcggtgaaaacatggagtgggttgaaaattatactaacagactattgaatttagaagttgcaattaatgagttcagacaagttttacattttcattcacatgagacagaagaagtttttcataagcttatggaaaagcatcctttattacttgatgtatatggaaaagttgaaagtaaacctaaattagtttatcccgctggtgagttttctcctattggaaaaacatatgtagagcctgattttataatttcctattcagatcagtcctataaattgatcgaattagaacgtgcttcaaaaaatgttgttacaagccaaggacaacctagagcggaagtaggacaagcagcttttcagacagctgaatggacacattttattagtgaacattataatttaattaggaagcaataccccagtatcaatgtgaagtgtaaaacatgtttaataatgagccgttcgtcacagctcagttttaaaaactcagttgatattaatcgatataaagagctaattattaaacaatattctttagatgagtttttaacatatgacgatttatttgatagagcttgccaagcttatacattcttaacaggtctatcgccacaaaataattaa

SEQ ID NO: 61537 - DNA, 1374 bp, Acinetobacter baumannii NIPH 24; identical to SEQ ID NO: 61536

SEQ ID NO: 61538 - DNA, 1374 bp, Acinetobacter baumannii NIPH 1362; identical to SEQ ID NO: 61536

SEQ ID NO: 61539 - DNA, 801 bp, Acinetobacter baumannii NIPH 67
atgcatctttcaatacaagaagctattcaaaaaaaagcagaattcttagagttattagatcaaggggaaaacgaacaaatctatcaagactatcttgaaaagaatacggtatttattccccgagaatttgaacaaaatcatggtatacatttttctacagtgttcagaaaaatgcccttgtctagcgactataaaccagactttctgtatctttcaaaaagttcagataattggaacgttgttttagttgaaatagaaaagccatcttctaaatattttagaaattcatcaactacatttcatgctgattttaatgccgctttacaacaaataaactcatggagagcatggctttctgatgaggcaaatagattacatctaaaaaataacatcttacaaggttttatacctgcacatatgagcagaaaccccttcaattttaaatatgttttagtacatgggcgcagatctgagtttgaaaataattctttaaaaacatctttgattagaggtcaggaaagagatgatttttcaataatttcttatgatagcttggcagaaaatttagaaagaaaatataaattgtatattgctgtaaaaaagaatagtcattacgaattagtatcacatgagtttgttgacgaaggagtattttcgggtgttaatactgattatttagcaataacccaagctattaaagacgatgctttagctaaatcctcagattggcattattatcgatccatgggtgtgaaagtcatggaacaagtattacctgaaataaagattattaataattaa

SEQ ID NO: 61540 - DNA, 1374 bp, Acinetobacter baumannii NIPH 528; identical to SEQ ID NO: 61536

SEQ ID NO: 61541 - DNA, 1200 bp, Acinetobacter baumannii DU202; identical to SEQ ID NO: 61533

SEQ ID NO: 61542 - DNA, 1374 bp, Acinetobacter baumannii UH0807; identical to SEQ ID NO: 61536

SEQ ID NO: 61543 - DNA, 1374 bp, Acinetobacter baumannii UH0707; identical to SEQ ID NO: 61536

SEQ ID NO: 61544 - DNA, 1374 bp, Acinetobacter baumannii UH10707; identical to SEQ ID NO: 61536

SEQ ID NO: 61545 - DNA, 1374 bp, Acinetobacter baumannii UH2907; identical to SEQ ID NO: 61536

SEQ ID NO: 61546 - DNA, 1374 bp, Acinetobacter baumannii UH2707; identical to SEQ ID NO: 61536

SEQ ID NO: 61547 - DNA, 1374 bp, Acinetobacter baumannii UH10707; identical to SEQ ID NO: 61536

SEQ ID NO: 61548 - DNA, 816 bp, Acinetobacter baumannii UH7707
atggagaaaattggttttttccctgctgatcttaacaataaaagattttttaattatattgaaatatatggtcatgcctcttcatgtgcatgggatgcacgtttaatgaatcttagagttaagaatgatttaagaagagattttgctaaacatcttgctaatttagatgataaaaagggaggggttatttcattcggtgaaaacatggagtgggttgaaaattatactaacagactattgaatttagaagttgcaattaatgagttcagacaagttttacattttcattcacatgagacagaagaagtttttcataagcttatggaaaagcatcctttattacttgatgtatatggaaaagttgaaagtaaacctaaattagtttatcccgctggtgagttttctcctattggaaaaacatatgtagagcctgattttataatttcctattcagatcagtcctataaattgatcgaattagaacgtgcttcaaaaaatgttgttacaagccaaggacaacctagagcggaagtaggacaagcagcttttcagacagctgaatggacacattttattagtgaacattataatttaattaggaagcaataccccagtatcaatgtgaagtgtaaaacatgtttaataatgagccgttcgtcacagctcagttttaaaaactcagttgatattaatcgatataaagagctaattattaaacaatattctttagatgagtttttaacatatgacgatttatttgatagagcttgccaagcttatacattcttaacaggtctatcgccacaaaataattaa

SEQ ID NO: 61549 - DNA, 1077 bp, Acinetobacter baumannii CI78
atgaaaatatctgattttatttttaattttaataaaagattaaattctgaaagtctggctttttgtagagttagatattatttagtcaatatgaaacatattgtttttataacggacttagcggagttgaattttggtcaaagtgttactaatgcaatagaatccataattgaagatttatatagttatggatatataaatcaaaaaaatattacctttgttgaacattatgaggcaacagattttaggaaagatacttttgatatagtagatcttacacctaaaacaacttggaaaaatataagtttcgagagtgttttagaactaattggagaggatctatttaaggatatcatggttaaatcttctaatgattgcaaaataatagattatgtgaagaaaatttgtttaaaaactaatccattttttgattcatcttatcggccatccaatagttttattagaaggaaaattgaaattagagatttaatgatttctaaagatgaaattactcatatgatagatagttttagtaatgaacttgatattcagaagctattgaagaaagacttatcagttctggcggaagcttatactgataatgaagagtatatttgcttctcagaatttcctataggtgacggatttgttgattttgtaattttttctggtaggtcaaggatggaggtcactttaatagaagtaaaaggagctaatttcaacttagtaaatgcaaatcattataagaattttaattctcatattagtaaagcatcttctcagattgagttgcgagtaggtaatatatttaaaaatttagagtattttagagatttttttcacaaggtgcgggaaaaagcagagaaaaatgagaaaatatataattcgtttataggaccagctggagcattactggtagatcctaataaggacatcaatattaagaccattattattggtggacgtactaatgatgacgtgttggaaagctccataagacaaaattatgaaagaagtagaattcccccaattagagttgaatcttgggatacttttatacgtcgattaaaacgataa

SEQ ID NO: 61550 - DNA, 636 bp, Acinetobacter baumannii 1043794; identical to SEQ ID NO: 61535

SEQ ID NO: 61551 - DNA, 636 bp, Acinetobacter baumannii 972082; identical to SEQ ID NO: 61535

SEQ ID NO: 61552 - DNA, 636 bp, Acinetobacter baumannii 232184; identical to SEQ ID NO: 61535

SEQ ID NO: 61553 - DNA, 636 bp, Acinetobacter baumannii 268680; identical to SEQ ID NO: 61535

SEQ ID NO: 61554 - DNA, 636 bp, Acinetobacter baumannii 766875
atggtttttgatttagtaaaagtaaaagagcagctaaaaaatgcaagagctacatcttctgaaagacaacttctacaattactaaaagaaaatagttttcttttctctgagttattttcaagacattggggaatacaaccaattttttcagaagttagttttggtaataattttagatgtgatttttgttggttaaatgataattcagatggtcctgagtgggttttagtcgaaattgaaaaacctaatgtaaagctctttaatcaaaaaaatgaacctagtgctgagttaaatcatggaattgaacaagtaaaaagttggcaaagatattttaatattcaccctgctgagaaaagcaggatctttggagcggtaagcaaatttagatatattttagtaattggtgaaaaaaatgattgggaacagaaagaggctagcctgtggagagcttttgaaaatcagaatagtatcgaaattcgatctatggatatttttgatagagctatcgaaaattatgaaaaaaaacccaatcattattggagctttgaagaaaattcgtatgtattaaactctacaaaacttcaaagctattgggaaaaatattcctacataatgaaatggagaacaatgctatag

SEQ ID NO: 61555 - DNA, 636 bp, Acinetobacter baumannii 655378; identical to SEQ ID NO: 61535

SEQ ID NO: 61556 - DNA, 636 bp, Acinetobacter baumannii 1064293_45; identical to SEQ ID NO: 61535

SEQ ID NO: 61557 - DNA, 1374 bp, Acinetobacter baumannii 16553_6; identical to SEQ ID NO: 61536

SEQ ID NO: 61558 - DNA, 1374 bp, Acinetobacter baumannii 16553_2; identical to SEQ ID NO: 61536

SEQ ID NO: 61559 - DNA, 1374 bp, Acinetobacter baumannii 16553_4; identical to SEQ ID NO: 61536

SEQ ID NO: 61560 - DNA, 1374 bp, Acinetobacter baumannii 16553_3; identical to SEQ ID NO: 61536

SEQ ID NO: 61561 - DNA, 1374 bp, Acinetobacter baumannii 16553_10; identical to SEQ ID NO: 61536

SEQ ID NO: 61562 - DNA, 1374 bp, Acinetobacter baumannii 16553_9; identical to SEQ ID NO: 61536

SEQ ID NO: 61563 - DNA, 1374 bp, Acinetobacter baumannii 16553_8; identical to SEQ ID NO: 61536

SEQ ID NO: 61564 - DNA, 1374 bp, Acinetobacter baumannii 929679-598; identical to SEQ ID NO: 61536

SEQ ID NO: 61565 - DNA, 1374 bp, Acinetobacter baumannii; identical to SEQ ID NO: 61536

SEQ ID NO: 61566 - DNA, 1374 bp, Acinetobacter baumannii; identical to SEQ ID NO: 61536

SEQ ID NO: 61567 - DNA, 1374 bp, Acinetobacter baumannii; identical to SEQ ID NO: 61536

SEQ ID NO: 61568 - DNA, 1374 bp, Acinetobacter baumannii; identical to SEQ ID NO: 61536

SEQ ID NO: 61569 - DNA, 1374 bp, Acinetobacter baumannii; identical to SEQ ID NO: 61536

SEQ ID NO: 61570 - DNA, 1374 bp, Acinetobacter baumannii; identical to SEQ ID NO: 61536

SEQ ID NO: 61571 - DNA, 1374 bp, Acinetobacter baumannii; identical to SEQ ID NO: 61536

SEQ ID NO: 61572 - DNA, 1374 bp, Acinetobacter baumannii; identical to SEQ ID NO: 61536

SEQ ID NO: 61573 - DNA, 1374 bp, Acinetobacter baumannii; identical to SEQ ID NO: 61536

SEQ ID NO: 61574 - DNA, 1374 bp, Acinetobacter baumannii; identical to SEQ ID NO: 61536

SEQ ID NO: 61575 - DNA, 1374 bp, Acinetobacter baumannii; identical to SEQ ID NO: 61536

SEQ ID NO: 61576 - DNA, 1374 bp, Acinetobacter baumannii; identical to SEQ ID NO: 61536

SEQ ID NO: 61577 - DNA, 1374 bp, Acinetobacter baumannii; identical to SEQ ID NO: 61536

SEQ ID NO: 61578 - DNA, 1374 bp, Acinetobacter baumannii; identical to SEQ ID NO: 61536

SEQ ID NO: 61579 - DNA, 1374 bp, Acinetobacter baumannii; identical to SEQ ID NO: 61536

SEQ ID NO: 61580 - DNA, 1374 bp, Acinetobacter baumannii; identical to SEQ ID NO: 61536

SEQ ID NO: 61581 - DNA, 1374 bp, Acinetobacter baumannii; identical to SEQ ID NO: 61536

SEQ ID NO: 61582 - DNA, 1374 bp, Acinetobacter baumannii; identical to SEQ ID NO: 61536

SEQ ID NO: 61583 - DNA, 1374 bp, Acinetobacter baumannii; identical to SEQ ID NO: 61536

SEQ ID NO: 61584 - DNA, 1374 bp, Acinetobacter baumannii; identical to SEQ ID NO: 61536

SEQ ID NO: 61585 - DNA, 1374 bp, Acinetobacter baumannii; identical to SEQ ID NO: 61536

SEQ ID NO: 61586 - DNA, 1374 bp, Acinetobacter baumannii; identical to SEQ ID NO: 61536

SEQ ID NO: 61587 - DNA, 1374 bp, Acinetobacter baumannii; identical to SEQ ID NO: 61536

SEQ ID NO: 61588 - DNA, 1374 bp, Acinetobacter baumannii; identical to SEQ ID NO: 61536

SEQ ID NO: 61589 - DNA, 1374 bp, Acinetobacter baumannii; identical to SEQ ID NO: 61536

SEQ ID NO: 61590 - DNA, 1374 bp, Acinetobacter baumannii NCGM 237; identical to SEQ ID NO: 61536

SEQ ID NO: 61591 - DNA, 1374 bp, Acinetobacter baumannii; identical to SEQ ID NO: 61536

SEQ ID NO: 61592 - DNA, 1374 bp, Acinetobacter baumannii; identical to SEQ ID NO: 61536

SEQ ID NO: 61593 - DNA, 1374 bp, Acinetobacter baumannii; identical to SEQ ID NO: 61536

SEQ ID NO: 61594 - DNA, 1374 bp, Acinetobacter baumannii; identical to SEQ ID NO: 61536

SEQ ID NO: 61595 - DNA, 1374 bp, Acinetobacter baumannii; identical to SEQ ID NO: 61536

SEQ ID NO: 61596 - DNA, 1374 bp, Acinetobacter baumannii; identical to SEQ ID NO: 61536

SEQ ID NO: 61597 - DNA, 636 bp, Acinetobacter baumannii
atggtttttgatttagtaaaagtaaaagagcagctaaaaaatgcaagagttaaatcttctgaaagagaacttctacaattactaaaagaaaatagttttcttttctctgagttattttcaagacattggggaatacaaccaattttttcagaagttagttttggtaataattttagatgtgatttttgttggttaaatgataattcagatggtcctgagtgggctttagtcgaaattgaaaaacctaatgtaagactctttaacaaaaaaaatgaacctagtgctgagttaaatcatggaattgaacaagtaaaaagttggcaaagatattttaatttttaccctgctgagaaaagcaggatctttggagcggtgagcaaatttagatatatcttagtaattggtgaaaaaaatgattgggaacagaaagaggctagcttatggagaacttttgaaaatcagaaaagtatcgaaattcgatctatggacatttttgatagagctatcgaaaattatgaaaaaaatcccaatcattactggagttttgaagaaaattcgtgtgtattaaactctacagaacttcaaaactattgggaaaaatatccgtatataatgagatggaaaacaatgctatag

SEQ ID NO: 61598 - DNA, 636 bp, Acinetobacter baumannii; identical to SEQ ID NO: 61535

SEQ ID NO: 61599 - DNA, 1374 bp, Acinetobacter baumannii; identical to SEQ ID NO: 61536

SEQ ID NO: 61600 - DNA, 1374 bp, Acinetobacter baumannii; identical to SEQ ID NO: 61536

SEQ ID NO: 61601 - DNA, 1121 bp, Acinetobacter baumannii
aaccaacaaaaactccaaaacatattatagaattattaaaaaaaaataatttatatgggaaacctattggtatttatagaatagtttcaaaaaaatatataagtgctcctgtatggaaagggatgtttaagaatatagatgatcgtttagttataaaatgtgaggagttaaatgtaaaacttaatttattaaatattagtctaagtttatcgcaagtaatttcgactcttacatttggtgcttatggggaagtacttgatataaaattaccgacctcagcggactcatttggtataccatttataatggagaaaattggttttttccctgctgatcttaacaataaaagattttttaattatattgaaatatatggtcatgcctcttcatgtgcatgggatgcacgtttaatgaatcttagagttaagaatgatttaagaagagattttgctaaacatcttgctaatttagatgataaaaagggaggggttatttcattcggtgaaaacatggagtgggttgaaaattatactaacagactattgaatttagaagttgcaattaatgagttcagacaagttttacattttcattcacatgagacagaagaagtttttcataagcttatggaaaagcatcctttattacttgatgtatatggaaaagttgaaagtaaacctaaattagtttatcccgctggtgagttttctcctattggaaaaacatatgtagagcctgattttataatttcctattcagatcagtcctataaattgatcgaattagaacgtgcttcaaaaaatgttgttacaagccaaggacaacctagagcggaagtaggacaagcagcttttcagacagctgaatggacacattttattagtgaacattataatttaattaggaagcaataccccagtatcaatgtgaagtgtaaaacatgtttaataatgagccgttcgtcacagctcagttttaaaaactcagttgatattaatcgatataaagagctaattattaaacaatattctttagatgagtttttaacatatgacgatttatttgatagagcttgccaagcttatacattcttaacaggtctatcgccacaaaataattaa

SEQ ID NO: 61602 - DNA, 636 bp, Acinetobacter baumannii; identical to SEQ ID NO: 61535

SEQ ID NO: 61603 - DNA, 882 bp, Neisseria elongata subsp. glycolytica ATCC 29315
atgaaaatattagattttgtttttgattttggtaaagcatcattgaatgggactggaggcttatgtcgggtacgtacatacgcaggaaaagacagtaaacccgttacttttttaactgagttggataaaaatgatggtcaatctgtaacaaatgctgtggaatttattatagagaaattaatcttagatagaggatttaataatcatatttttatagaacactatgaacgagataataatgtattttttcatgatactttttatatagtttttattaaaaatcaaaaacctaagtggaatcaattgagtcaaattgaagttgaaaatcttattggtaatgataattttaccgatttaaaaaatgatagatcatcgaaaaatgaaagaatattaaagcaagctgatagtattagatttaaaagaaatccgtggattgattcaccataccaacagagtgattctttcattcaaagaaaattgtcaattgaaaaacaaatgaaatctaaaaatgatcttatcaaattagttgaaagtaaatgtatagagcagaatcttttgactttcctaaaacaagatttatcattttttggggaggtatattctaatcctgaagatgaatatattgtattttctgagtttccaattgaaaatggttcaaaagataaaaatggttttatagattttgttgtattcacaggtcggagtagaatggatgtaatattaattgaaataaaaggagcaaattttaatttatttaatcaaaatggatatcaacaacctcacgcagatatttcgaaggctgaacagcaaatacgagatcgattagaagctgtctattacaaagacatgtctagcttcagaaagcagtgtcacattttttag

SEQ ID NO: 61604 - DNA, 1146 bp, Neisseria elongata subsp. glycolytica ATCC 29315
atgaaaatattagattttgtttttgattttggtaaagcatcattgaatgggactggaggcttatgtcgggtacgtacatacgcaggaaaagacagtaaacccgttacttttttaactgagttggataaaaatgatggtcaatctgtaacaaatgctgtggaatttattatagagaaattaatcttagatagaggatttaataatcatatttttatagaacactatgaacgagataataatgtattttttcatgatactttttatatagtttttattaaaaatcaaaaacctaagtggaatcaattgagtcaaattgaagttgaaaatcttattggtaatgataattttaccgatttaaaaaatgatagatcatcgaaaaatgaaagaatattaaagcaagctgatagtattagatttaaaagaaatccgtggattgattcaccataccaacagagtgattctttcattcaaagaaaattgtcaattgaaaaacaaatgaaatctaaaaatgatcttatcaaattagttgaaagtaaatgtatagagcagaatcttttgactttcctaaaacaagatttatcattttttggggaggtatattctaatcctgaagatgaatatattgtattttctgagtttccaattgaaaatggttcaaaagataaaaatggttttatagattttgttgtattcacaggtcggagtagaatggatgtaatattaattgaaataaaaggagcaaattttaatttatttaatcaaaatggatatcaacaacctcacgcagatatttcgaaggctgaacagcaaatacgagatcgattagaagctgtctattacaaagacatgtctagcttcagaaagcagtgtcacatttttagagatgaggctgaaaatggaaaatccacatttaaaaattacttagtaggagcagaaggaaagctattagtagatccaaataaagaaattaaaattcgaactgtaattattggaggtagaacacaagatgaccaaaaagaaagtttggaaaggcataagttcgaaagagcacacactatacctattactttagaatcttgggatacgtggattagaaaattgaaacgagaaaaccaatttgaaattatttcagtgattagctattaa

SEQ ID NO: 61605 - DNA, 408 bp, Neisseria macacae ATCC 33926
atggatgtaatattaattgaaataaaaggagcgaatttcaatttatttaatcaaaatggatattgccaacctcacgcagatatttcgaaagctcaccagcaaatacgagacagattacacgtagcctattacgagaacatgtctagtttcagaaagcaatgtcatatttttagaaatgaagctgaaaatggaaaatcctcatttaaaaattacttagtgggggcggaaggaaaactacaagtagatccaaataaagaaattaaaattcgaacagtaattattggaggtagaacacaagatgaccaaaaagaaagtttggaaaggcataagtttgaaagatcacacactatacctattactttagaatcttgggatacatggattagaaaattgaaacgagaaaactaa

SEQ ID NO: 61606 - DNA, 1542 bp, Alcaligenes faecalis
atgaacaaaaacacgacggaccagaacgacgacttcgacttcgagttcgactggggcgacgaagccgtctcagatgaaccagagaccaccggcggcgcaagcgatcaagaggatgatgtagattctgatcgagatccaaacgcgctgccggtgactttgaaaaccggtatcttcaatggcgaggactgcgtcgagttttacgcgcacggcgaagccatgtcctatgagacggggaagatgaccgagcgtgccgtgttgctcgcgcgcgtctccaagcgcgagcttaccatgttcccgctggacgcaaattcgagtcggcataattttttgcagccgaaatatgaagagctcgcatgtatcactgttcttcccgagcaaggccggtcctggtggctcccggagtcgcttcgcgatttcgaagaaatgctcaaaaagctgccgacgggcttcgctaggcgcgtcatctacggactcggcctccggtgggaataccggctgatcccggaagccatccttgaattggtaggcgtcacgcacttgatcattgaaccaggcgatggcgccaaagcggagttgcccgcgttcaggttgggggtggagcgattcattaggatccgcaaggccatcgacaccatcacggccagggcttcatcgcgctcgttgagagcccgtaggcttgccgcctacaacgaaacgctgcatgccgcgctccccgatcaatttgaacatcgctatccgccagtaaaagctggcgaaatctatgaattggttcaactgcgtggtcggacgtcaaatcatagcgctaaggacagcatcgctgccgcccaattggttcaggaaaatgcgcagacgatcgcgagcgaagagccatcgaaactattggagctcaaggccgtcatcgaacaggtcacgttggcgcagctcattggcgagttcgaggctatgttgcaaaagaatttgctggaaccgaagtggcagtcgttcttcaaagctaacccgttcatcctcggcctggccttcccctatcccgtcatcctgtttcaggaccaagccagcgttggggggaccacaatccgcggcaacggagagagcatcgtcgacttcctgatggcgcagcaattcactgggaacctggccattgtcgaaatcaagcgcccgtccaccgcgctggtcgaacccaggccctatcgcggcgatctgcatgcgccgcatcgggacctcacggcctcgatggcgcaggtgctagatcagcgggctgtgctgctgcaccacttcgccgcgaagaagtctttcgacccaaccctggccgacgcccacgtttcctcggtcaactgcgtcgttgtcgttggcacgctgccgaagggcaccgcgcaagttcgctcgctggacctattccgccattcatccaaagatgtcgtggtggtcacattcgacgaactgctggccaaactcaaggaactgcatcgcttgatgtcggctgccgcacccacgccagaggcgtcgcccgccgcacctgaagagcccaacgcagatttgttctga

SEQ ID NO: 61607 - DNA, 1239 bp, Bordetella bronchiseptica Bbr77
atgcgcaagtgctacaccttacttgaccgctccaatggaagctggcacgtagacatccttatcttctggcccaccatgacagacgaagtcgactatcactttaacaagctgcccggaaagacctacattagccggcgtatcgttaccagccttggcgaaaacttgcggcacgcgtcgaaggtcatggataaggacgagggcttcctctatgccaaggaaaagggagaactggtaattcgccacacacctggcggacgaaaagagatcgtggccaagttctttgaagacagtcgaaaaatggaagtcgtaactattcaaagcttcaatccagagaagggcatcccccacaagacttactttactttcatcggatcggaaattgaccaactggttgagttcttcgctaacctttcaaagatcaagtttcacgatgacgcagggctgaatatcagcgatcacgagctaagaagggtctttctctcgaaagatcaggcgcgggatttggtccacgagaaccagaacctcttttctgaacttgtaaggtccgaggttacgaaggaagacgttgtagcgctcggctaccgaaagaagcagctagacgttttcggccgattactcagtgatgacgactactttgaaatcatcaagactcagaaagcctgtcgcggcgatgaagacctgtggcagaagttctttgagcgcaaccagtggatttttggttacggccttcactatgtatttgtcaccggattcgaagaccgaaagcttgaacagatcgtacagggcaacgatcttatgaaccgaggcaagagagcggatgcactgatgatgacccgtggaattgtcaattctctgtgcttcgctgaaatcaaaacccatcgtacgccattgctcgataagtcgagctacagacctgcttgttgggcgccgtcgcgcgaattggccggcgcagttgctcaggtacaaggaaccgttgcatcggccatcagaaacttatcagaccgtattcgcccttgcaccgatgacggcgatccgactggagaggaagtattcaactacaaaccgcgcgcattcgtcgtcgttggaagtctaagcgagttcgttggagagcatggggttaatgcagaaaagcttcgatcattcgagctttatcgcaatagcattgttggggtcgagctcattacgttcgacgaacttcatgaacgaacaaaattcatcgtcgccgcagccgatctctaa

SEQ ID NO: 61608 - DNA, 1458 bp, Bordetella bronchiseptica E014
atggcagatggaaatcttcaggaacaggctgggtcgtacacggatggtcaggtcatggaaccagcgttccagatccaatctggtgtagtcgatggtctggagtacagggacctgtttatgcagaccttcttcgtagaggaggacatgcaacatcggcgttggcagagccagcccgaaaacaaatggcattggctagcccgagtgttctcagaccgcatcgtcacctatcccgtatttaccaatcctcatgcgctgcgctacctgtctgctcgacacggccgattcactaccgtcgtttacgaacgacgcatagggaacacgctgcccgacaatcctgacgcactggtttcagatatcgagctggcgttacccagggggatgtgtaactcctgcacctatggattggggtttatcaaggagttggatgaaatctggctaggcctctcacgcttcccaaatctcaacacccttgtggtggcgcgcaacggcgaagcacggattgaaggcaacacggtacggattcccgaagaggacattgatcaaattcgccgggccttcagccgtacagcacgcaagatgcgcgatttttttagacagtccaagtcaactcacattcgcaacgcgctgctggcttcgctcgaccctgaacggtttccaccggtagtctacgtcacgaaaagcggcgagcttgtggaggtgcgcctggaccgcggagaacaaggcaaggcctccggacgctccgcgcgaaaagccacggtggaggccgtacgctcaaatgttgaaacgctagcgacggaagcccctgaggacctcttggagctgcatgccgaaatcgaacgggtcactcttgcgcggatgattgagaagtacgatgacatgctgaaaaagaacttgccagaacccacatggcagaaattcttcgaacgcaacgtcttcatcctcacaatggttttcgcccgtccagtcaggctccttcatgcccagttccacgcccagggtgggggcctggacggcaccggcgctcagattggcgacttcctgctcgctgaaaagggtttcgcgatggccatcgtggaaatcaagagaccaggaagcccactgctacgcgaaaaggcctaccggaatagggaggtgttcgcaccggacgaggaattgagtggcgcggtgtcgcaagtactctaccaacagagcaaacttcacgaaaactggctacttcatcggaatcgtccggagctccagaactcgcgtccggaagccatcaagtgcgtggtcatcagtggattgttgcccacaaacgagatgcaacgacagagccttgaggtgtttcgcaacgcttgcaagaacgtggaaatcattaccttcgatgagcttctggacaagctgcgactgttgttggagcacctgacaccgcctgcccacccggagctcaccacgcccgaggatgatgtgccgttctag

SEQ ID NO: 61609 - DNA, 1377 bp, Bordetella bronchiseptica MBORD675
ttggtattgaggtcgacgatgccctcgaaatggcagagcagaccgaagtatgatggcttgaaggctggcaagcggtcgcttgccagccagcagcggacatggatcaattgttcttgtcgctccccgacgcgggctcccatgcgcaagtgctacaccttacttgaccgctccaatggaagctggcacgtagacatccttatcttctggcccaccatgacagacgaagtcgactatcactttaacaagctgcccggaaagacctacattagccggcgtatcgttaccagccttggcgaaaacttgcggcacgcgtcgaaggtcatggataaggacgagggcttcctctatgccaaggaaaagggagaactggtaattcgccacacacctggcggacgaaaagagatcgtggccaagttctttgaagacagtcgaaaaatggaagtcgtaactattcaaagcttcaatccagagaagggcatcccccacaagacttactttactttcatcggatcggaaattgaccaactggttgagttcttcgctaacctttcaaagatcaagtttcacgatgacgcagggctgaatatcagcgatcacgagctaagaagggtctttctctcgaaagatcaggcgcgggatttggtccacgagaaccagaacctcttttctgaacttgtaaggtccgaggttacgaaggaagacgttgtagcgctcggctaccgaaagaagcagctagacgttttcggccgattactcagtgatgacgactactttgaaatcatcaagactcagaaagcctgtcgcggcgatgaagacctgtggcagaagttctttgagcgcaaccagtggatttttggttacggccttcactatgtatttgtcaccggattcgaagaccgaaagcttgaacagatcgtacagggcaacgatcttatgaaccgaggcaagagagcggatgcactgatgatgacccgtggaattgtcaattctctgtgcttcgctgaaatcaaaacccatcgtacgccattgctcgataagtcgagctacagacctgcttgttgggcgccgtcgcgcgaattggccggcgcagttgctcaggtacaaggaaccgttgcatcggccatcagaaacttatcagaccgtattcgcccttgcaccgatgacggcgatccgactggagaggaagtattcaactacaaaccgcgcgcattcgtcgtcgttggaagtctaagcgagttcgttggagagcatggggttaatgcagaaaagcttcgatcattcgagctttatcgcaatagcattgttggggtcgagctcattacgttcgacgaacttcatgaacgaacaaaattcatcgtcgccgcagccgatctctaa

SEQ ID NO: 61610 - DNA, 1248 bp, Bordetella bronchiseptica M85/00/2
gtgttctcagaccgcatcgtcacctatcccgtatttaccaatcctcatgcgctgcgctacctgtctgctcgacacggccgattcaccaccgtcgtttacgaacggcgcattgggaacacgctgcccgacaatcctgacgcactggtttcagatatcgagcgggcgctaccctgggggatgtgcaactcctgcacctatggattggggtttatcaaggaactggatgaaatctggctaggcctctcacgcttccaaaatctcaacactcttgtggtggcgcgcaacgtcgaagcacggattgaaggcaacatggtatggattcccgaggaggacattgatcaaattcgccgggccttcagccgtacagcacgcaagatgcgcgatttttttagacagtccaagtcaactcacattcgcaacgcgctgctggcttcgctcgatcctgaacggtttccaccgatagtccacgtcacgaaaagcggcgagcttgtggaggtgcgcctggaccgcggaaaacggggcaaggcctccgaacgctccgcgcgaaaagccacggtggaggccgtacgctcaagtgtggaaacgctagcgaaggaagcccctgaggacctcttggagctgcatgccgaaatcgaacgggtcactcttgcgcagatgattgagaagtacgatgacatgctgaaaaagaacttgccggaacccatatggcagaaattcttcgaacgcaacatcttcattctcacaatggttttcgcccgtccagtcaggctccttcatgcccagttccacgcccagggtgggggcctggacggcaccggcgctcagattggcgacttcctgctcgcagaaaagggtttcgcgatggccatcgtggaaatcaagagaccaggaagcccactgctgcgcgaaaaggcctaccggaacagggaggtgttcgcaccggacgaagaattgagtggcgcggtgtcgcaagtactctaccagcagagcaaacttcacgaaaactggctacttcatcggaatcgcccggagctccagaactcgcgtccggaagccatcaagtgcgtggtcatcagtggattgttgcccacaaatgagatgcaacgacagagccttgaggtgtttcgcaacgcttgcaagaacgtggaaatcattaccttcgatgagcttctggacaagctgcgactgttgttggagcacctgacaccgcctgagctcaccacgcccggggatgatgtgccgttctag

SEQ ID NO: 61611 - DNA, 621 bp, Ochrobactrum anthropi
atgtcggacatcatcgagagtatgtcaagggaacttgttaatcgaaggaaagagggattttggcaggagtatttcatccaaaaccccttcgtgttgaagatgctattcggcctgcccgtgatcatgtacacggaccaagcatcagttggaggtatgggcctcaagcgctccggcgagaaatatgcggactatcttgtcgaggcgggtatgctaggcaatctcggtatcgtcgagatcaaaaccaccgaaaccccgctgttgacaaaagacccttaccgcccgccgacactatatgggccatctgcggacttgtccggcggagtaaaccagttactcgaccaaaagctcaggttgatcaagggtatcgcggcaaagaaggaagatgacgaccaaccccatattcaggcttggtcggttccgtgcatcctgatcatcggcaggctaccggaaatgcgggaattgaaaaggtcgttcgagatctatcgcggaagccaacgcgatgtgttgatcatcacgttcgacgaacttttggccaagctgaaggcgttgcatgaattcctatcgactaagccggacgagcccaaggaagagctctcggaccaatacgccgatctgttgtga

SEQ ID NO: 61612 - DNA, 981 bp, Citrobacter koseri ATCC BAA-895
atggaatttgaggcggaaaaagtaacctttgagagaaaggtaagacgttatctctccgctagcgtgaagcggcaggtagctatattgagcggctatcgatgctcgtttccaggttgtgatcaaaacctcatgcttcaggactcatcatttattggggaaatagcttcgattgaagccattcactctcacgggccaagatacaacccttctacaaatgcagaccaactacttcaaacagaaaactatcttctgttgtgcccgaatcatcatgcgattattgacaggcagccggaaatatattcggctgagtggctaagaaaggccaggaaagaacatttaaataaaatatcagaaatagtgtctgcctctaagtgtgtagcagaggtcaagctggatgagcaggtcgaaatctctttagaggaagcaataggtgtctggaaagtaaatcgtgaaaatgcatccgaggaattctggcaaactcttctacaaaaatgtcctgctgtattatcacagatatttccacaaagtatgtttcagttaggcagtaaatgctatgttggtggaaaatcaataaacaattcgggtggtaatcttgtcgactttatctacgcaagcaggctgactggaaatatagtattggtcgaaataaagaccccaaagacgatattactggggagaagatatagaactaatgcctattcaattagcgaagaactatctggggcgtttgttcaggtgttaaattataaagaccaattaatgaaggaatatttcaaactaagtgaaggtaacggaggtgattcattttcggcattcaatcctaaatgcttaattgttattggtacacttgagtcggagcttaaaaataatagtcaatacaaatcatttgagctattcagaaatagtatgacaaacgttgagattgtcacttatgacgagctatttcaaaaggctcaagacattctggatatgatcaaataa

SEQ ID NO: 61613 - DNA, 981 bp, Citrobacter koseri
atggaatttgaggcggaaaaagtaacctttgagagaaaggtaagacgttatctctccgctagcgtgaagcggcaggtagctatattgagcggctatcgatgctcgtttccaggttgtgatcaaaacctcatgcttcaggactcatcatttattggggaaatagcttcgattgaagccattcactctcacgggccaagatacaacccttctacaaatgcagaccaactacttcaaacagaaaactatcttctgttatgcccgaatcatcatgcgattattaacaggcagccggaaatatattcgactgagtggctaagaaaggccaggaaagaacatttaaataaaatatcagaaatagtgtctgcctcgaagtgtgtagcagaggtcaagctggatgagcaggtcgaaatctctttagaggaagcaataggtgtctggaaagtaaatcgtgaaaatgcatctgaggaattctggcaaactcttctacaaaaatgtcctgctgtattatcacagatatttccacaaagtatgtttcagttaggcagtaaatgctatgttggcggaaaatcgataaacaattcgggtggtaatcttgtcgattttatctacgcaagcagactgactggaaatatagtattggtcgaaataaagaccccaaagacgatattgctggggaaaagatatagaactaatgcctattcaattagcgaagaactatctggggcatttgttcaggtgttaaattataaagaccaattaatgaaggaatatttcaaactaagtgaaggtaacggaggtgattcatttttggcattcaaccctaaatgcttaattgttattggtacacttgagtcggagcttaaagataatagtcaatacaaatcatttgagctattcagaaatagtatgacaaacgttgagattgtcacttatgacgagctatttcaaaaggctcaagacattctggatatgatcaaataa

SEQ ID NO: 61614 - DNA, 981 bp, Citrobacter koseri
atggaatttgaggcggaacaagtaacctttgagagaaagataagacgttatctctccgctagcgtgaagcggcaggtagctatattgagcggctatcgatgctcgtttccaggttgtgatcaaaacctcatgcttcaggactcatcatttattggggaaatagcttcgattgaagccattcactctcacgggccaagatacaacccttctacaaatgcagaccaactacttcaaacagaaaactatcttctgttgtgcccgaatcatcatgcgattattgacaggcagccggaaatatattcggctgagtggctaagaaaggccaggaaagaacatttaaataaaatatcagaaatagtgtctgcctctaagtgtgtagcagaggtcaagctggatgagcaggtcgaaatctctttagaggaagcaataggtgtctggaaagtaaatcgtgaaaatgcatccgaggaattctggcaaactcttctacaaaaatgtcctgctgtattatcacagatatttccgaaaagtatgtttcagttaggcagtaaatgctatgttggtggaaaatcgataaacaattcgggtggtaatcttgtcgattttatctacgcaagcaggctgactggaaatatagtattggtcgaaataaagaccccaaagacgatattactggggaaaagatatagaactaatgcctattcaattagcgaagaactatctggggcgtttgttcaggtgttaaattataaagaccaattaatgaaagaatacttcaagctaagtgaaggtaacggaggtgattcattttcggcattcaatcctaaatgcttaattgttattggtacacttgagtcagagcttaaaaataatagtcaatacaaatcatttgagctattcagaaatagtatgacaaacgttgagattgtcacttatgacgagctatttcaaaaggctcaagacattctggatatgattaaataa

SEQ ID NO: 61615 - DNA, 981 bp, Citrobacter koseri; identical to SEQ ID NO: 61614

SEQ ID NO: 61616 - DNA, 981 bp, Citrobacter koseri; identical to SEQ ID NO: 61614

SEQ ID NO: 61617 - DNA, 981 bp, Citrobacter koseri; identical to SEQ ID NO: 61614

SEQ ID NO: 61618 - DNA, 1410 bp, Citrobacter freundii; identical to SEQ ID NO: 61283

SEQ ID NO: 61619 - DNA, 1092 bp, Enterobacter aerogenes
atgaaaatcagcgattttatcttccagtatacccccgcaaatatgatgcggacagacagcttatgccgggtccggctcttcgttaacgcagaaaaactgtatgcgctgataacggatgtcggcggtaaatactgccccgcaagtgtcattaactttatcgagaatattaaagaacagcttattcaaagaggatatatatccgaaagcacgatactcattacacatgatgaggacacgttatcgggatatggatcgtttgatctcgtgacctttgggcgcagcaattctgccagatttcacgacagctcactggaaaaggtcagcgaattactgggctgttcgcaccaggaattactggataaaacgcttaaaaatagacgcctgttcgaccagcttgaacaacgccaccatctgatacgcccgtttacccgggacacgtatattgaaaattatggcgtgttatcccgacgctacaaaattaaagacaacgcaattaccaaaagtgaattagccgcttttttggccgataatcccagcgaaagagcgctggccgcattctttaaacgcgatctcgcctttttcgccgacctcttcgcttaccccgccgaagaatacatcgttgtgcccgaactcaaaattgaagagggttttgtggattatgcaatcttatccggtcggtcgcgcatggacgtcacgctgattgaaatcaaaggcgcgaactttgatttgatggggtcaacggggtatcgcaatttttcctacaaaaccaatgaagcgttacagcaggtaagaggaagagaagggactatcatcagggattaccccagataccgggcatactttcatgaaatacgtgaggcggtggaaaccggaaataatcgttatcaggcgtttcgcgggccaaagggtaaattagaggtcgaccctgataaggatattaatatccggttagtggtcattgcgggccgttcgcaaaacgatctggaagagagtattgaacgccataatcttgaaaggcacacctccctacccttaagactggaaagctgggacagtttgctgaataagatatcgggcgaccgaaacatctag

SEQ ID NO: 61620 - DNA, 801 bp, Enterobacter aerogenes
atgaatggtcaagatgctgttcagaaaagaaatgaatatatgcaattgctggatagaaatgaagttgaacaagtttaccaaaattatttagaagaaaacaccatgttcatcccaagagaatttgaacaaaatcatgggattcatttttgtaccgtacttagaaaattaccattatctagtgattacaaaccagatttcgtatatctcgcaaaaagttcagacaattggaatgtggtacttgttgaaatagaaaaaccatcctcaaaatactttaaagataaatccacagactttcatgctgattttaatatggcgttacagcagataaatacatggagagcatggattgatgaggaatcaaatagaaatcactttaaaaacaacacattacaaggttttattgagccagctcatatggcaagaaatccctttaacttcaagtatgtattagttcacggccgcagatcggaatatgaaggcaatgtattaaaaacctcattaattagaggccaacaacgggatgacttttcaataatatcatttgacagcttagctgaaaatatcgaaagaaaatatccattgtatgttgcggtaaaaaagaatagccactatgagctgatatcaaaacagtttgtagatgaaggtatattttcatggatgaatacggacttattagctatatcgaaagaaatacacgatgatgcgattgctcaatcagatagttggcatcattataaaatgaaggatggaggaagagtcaaagtcatgaatgatgtgcttccaaaaataaaaataatataa

SEQ ID NO: 61621 - DNA, 801 bp, Enterobacter aerogenes; identical to SEQ ID NO: 61620

SEQ ID NO: 61622 - DNA, 1092 bp, Enterobacter cloacae MGH 53
gtgaagatcagcgattttatatttcagtttacgccaactaacttgtcacgaacggatagcctatgcagagtacgtattttcttgaaagacaacattatgcatgcactacttacaaacattgatggaaaatacagtcccgcaagtgttacaaattccgttgaacatattagaaagcagcttatagaaaaaggatttatctcagataacactcttattatagaacattacgaagaccggttatctggctatggttcatttgatagggtaacatttggtcctggtggctcgcccagatgggagagcatttctattaataaaattagcgaacggtttggttgcaatcatcaggaactagtcgataagacactagaaaacaaaaggttattcaatgaacttgaacgactgcatgagacaattcgtccgtttaccactaacacctggattgaggactatgctgttctgtcccgacggtacaaaataatggataaagctattactaagagtgaattagcagaatttttatctgataacccgatagaaagagagctggccaaattttttaaacgtgatctcgctttttttgccgatatgtatgcttttccttcagaagaatatatcgtagttccagaacttaaaattgaagaaggttttgtggattacgccatattttctggccgttcacgaatggacgttactcttattgaaatcaaaggtgccaatttcgatttaatgggttcaacgggttaccataatttctcttataaaactaatgaagcgctacaacaagtcagaggaagacaaggcaccattatcaggaattaccaaaaatttcgggaaaattttcatggtattcgagaaatgatagaaacggacaagcataaatttgaggctttttgcggaccaaaaggaaaattactggttgatcccaataaagatgtaaatatcagaacggtggttatcgcaggccgatctaaaaacgatctggaggaaagcattgagcggcacaaccttgaaagaaattcctcgcttcccctaaggttagagagctgggacagcttgctcaataagctgtccgggcagagagcagcgtag

SEQ ID NO: 61623 - DNA, 1005 bp, Enterobacter cloacae
atgagcctgaatcactctttcctcataggctcagatgaatcaagtgagcttatgctaaacatttctggtcttgatgctaacgctaaagaagtggattccttatgtgccaatttctttgcacactgtgctaagactggcacacccaaattcacatgtaagctgacaatacaaaatcttcaaaatctctatagccatctatccagctatagcatggtatgtgatagcacttcttcaaagactggaagattcattgaggtcagagataattataatgagataatcagcattcttgaacacgctgataataattcattagttatggccttgcagcaccttgtaagcagtaagttaaccaataatgacatcaatacaatattagggagaaaggaatctctcgagacctacgaaaaaatgctcactgagcctgatagttataaggaggcagactggcaacgtttttttgaaaccaatgaatggatttttggttatggcttaaagtataaattcctaaaaattcttcaaagggaagctcacatatcaagaactgatttaaacggcggaaatgatgtaattgctgattttcttatatctgactcaagattcaccaagattgtggaattaaaaacaccaacaacaaaacttttcactaagcgacaagggcgctctgatacatggttcttatccagtgaattaaccgacgctgttagtcagatattggcgcaaaaggcaaattgggaggttgaatctcagtctagaaattacactacagatggtgaacttatacatgaagatacatttgatacagaatgcattttaattataggttcattatcttcaattgagggtaatgagcgagaaaaactaattaaaaggaaaaccctcgagctttataggaggaatctaaaaaatatagatatcttgttttatgatgagttgcttgagaggtcgcgctacattgtcagaagtgctgaagtaatagaagataagcttctctcagcattgtag

SEQ ID NO: 61624 - DNA, 1410 bp, Enterobacter cloacae; identical to SEQ ID NO: 61283

SEQ ID NO: 61625 - DNA, 1092 bp, Enterobacter cloacae; identical to SEQ ID NO: 61622

SEQ ID NO: 61626 - DNA, 1092 bp, Enterobacter cloacae; identical to SEQ ID NO: 61622

SEQ ID NO: 61627 - DNA, 1092 bp, Enterobacter cloacae
gtgaagatcagcgattttatatttcagtttacgccaactaacttgtcacgaacggatagcctatgcagagtacgtattttcttgaaagacaaagttatgcatgcactacttacaaatattgatggaaaatacagccccgcaagtgttacaaattccgttgaacatattagaaagcagcttatagaaaaagggtttatctcagataacactcttattatagaacattacgaagacaggttatctggctatggttcatttgatagcgtaacatttggtcctggtggctcgcccagatgggagagcatttctattaataaaataagcgaacgatttggttgcaatcatcaggaactagtcgataagacactagaaaacaaaaggttattcaatgaacttgaacgactgcacgagacaattcgtccgtttaccactaacacctggattgaggactatgctgttctgtcccgacggtacaaaataatggataaagcaattactaagagtgaattagcagaatttttagctgataatccgatagaaagagagctggctaaattttttaaacgtgatctcgctttttttgccgatatgtatgctttcccttcagaagaatatatcgtagttccagaacttaaaattgaagaaggttttgtggattacgccatattttctggccgatcacgaatggacgttactcttattgaaatcaaaggtgccaatttcgatttaatgggttcaacgggttaccataatttctcttataaaactaatgaagcgctacaacaagtcagaggaagacaaggtaccattatcaggaattaccaaaaatttcgggaatattttcatggtattcgagaaatgatagaaacggacaagcataaatttgagactttttgcggaccaaaaggaaaattactggttgatcccaataaagatgtaaatatcagaacggtggttatcgcaggccgatctaaaaacgatctggaagaaagcattgagcggcacaatcttgaaaggaattcctcgcttcccctaaggttagagagctgggacagtctgctcaataagctgtccgggcagagagcaacgtag

SEQ ID NO: 61628 - DNA, 1092 bp, Enterobacter cloacae
gtgaagatcagcgattttatatttcagtttacgccaactaacttgtcacgaacggatagcctatgcagagtacgtattttcttgaaagacaacattatgcatgcactacttacaaacattgatggaaaatacagtcccgcaagtgttacaaattccgttgaacatattagaaagcagcttatagaaaaaggatttatctcagataacactcttattatagaacattacgaagaccggttatctggctatggttcatttgatagggtaacatttggtcctagtggctcgcccagatgggagagcatttctattaataaaattagcgaacggtttggttgcaatcatcaggaactagtcgataagacactagaaaacaaaaggttattcaatgaacttgaacgactgcatgagacaattcgtccgtttaccactaacacctggattgaggactatgctgttctgtcccgacggtacaaaataatggataaagctattactaagagtgaattagcagaatttttatctgataacccgatagaaagagagctggccaaattttttaaacgtgatctcgctttttttgccgatatgtatgcttttccttcagaagaatatatcgtagttccagaacttaaaattgaagaaggttttgtggattacgccatattttctggccgttcacgaatggacgttactcttattgaaatcaaaggtgccaatttcgatttaatgggttcaacgggttaccataatttctcttataaaactaatgaagcgctacaacaagtcagaggaagacaaggcaccattatcaggaattaccaaaaatttcgggaatattttcatggtattcgagaaatgatagaaacggacaagcataaatttgaggctttttgcggaccaaaaggaaaattactggttgatcccaataaagatgtaaatatcagaacggtggttatcgcaggccgatctaaaaacgatctggaggaaagcattgagcggcacaaccttgaaagaaattcctcgcttcccctaaggttagagagctgggacagcttgctcaataagctgtccgggcagagagcagcgtag

SEQ ID NO: 61629 - DNA, 813 bp, Enterobacter cloacae
atgtatatgactggtcaagaaattaacgataaaaagaaagagtactttgaattattagatcgaaatgagaatgaacagacttatcaaacataccttgaagaaaatacaatgttcattcccagagaattcgagcaaaaccatgggattcacttcagtacggtatttagaaagttgcctctatcaagtgattataaacctgatttcgtatatttatcaaaaagctcggataactggaatgtagtattggtcgaaattgaaaaaccatcttcgaaatatttcaaaaacaactctacaacatttcatacagacttcaatcttgctttacagcaaatgaatacatggagagcttggtttgatgatgaatcaaacagaaatcactttaaaaacaatatactacaaggatttatagaaccggcacatatggggagaaacccgtttaatttcaagtatgttctggtccatggtcgtagagcagaatatgaaaacaacgcacaaaaaactgcgctaatcagagggcaacagagaagtgatttctctataatttcatttgatagcttggctgaaaatatagagaggaaatataaattgtatgttggagtcaaaaaaaataaccactatgaattaacatcgaaagagtttgttgatgaagggatattttcatggatgaacatagattatttagcaattacacaaagtatatatgatgatgcagtcgcaaaatcagatagttggcatcactatagaagtacagtaaatggatttgtaaaagcaatggattatgctcccccccgaattaagataattcaaaaataa

SEQ ID NO: 61630 - DNA, 1092 bp, Enterobacter cloacae
gtgaagatcagcgattttatatttcagtttacgccaactaacttgtcacgaacggatagcctatgcagagtacgtattttcttgaaagacaacattatgcatgcactacttacaaacattgatggaaaatacagtcccgcaagtgttacaaattccgttgaacatattagaaagcagcttatagaaaaaggatttatctcagataacactcttattatagaacattacgaagaccggttatctggctatggttcatttgatagggtaacatttggccctggtggctcgcccaaatgggagagcatttctattaataaaattagcgaacggtttggttgcaatcatcaggaactagtcgataagacactagaaaacaaaaggttattcaatgaacttgaacgactgcatgagacaattcgtccgtttaccactaacacctggattgaggactatgctgttctgtcccgacggtacaaaataatggataaagctattactaagagtgaattagcaaaatttttatctgataacccgatagaaagagagctggccaaattttttaaacgtgatctcgctttttttgccgatatgtatgcttttccttcagaagaatatatcgtagttccagaacttaaaattgaagaaggttttgtggattacgccatattttctggccgttcacgaatggacgttactcttattgaaatcaaaggtgccaatttcgatttaatgggttcaacgggttaccataatttctcttataaaactaatgaagcgctacaacaagtcagaggaagacaaggcaccattatcaggaattaccaaaaatttcgggaatattttcatggtattcgagaaatgatagaaacggacaagcataaatttgaggctttttgcggaccaaaaggaaaattactggttgatcccaataaagatgtaaatatcagaacggtggttatcgcaggccgatctaaaaacgatctggaagaaagcattgagcggcacaaccttgaaagaaattcctcgcttcccctaaggttagagagctgggacagcttgctcaataagctgtccgggcagagagcaacgtag

SEQ ID NO: 61631 - DNA, 1110 bp, Enterobacter cloacae
gtgtgggagaatggtagagtgaagatcagcgattttatatttcaatttactccaacgaacatgtcgcgaacagacagtttatgcagggtacgtattttttttaatgaaaacactacatatacactgctcacgaacattgacgggaaatatagtcctgccagtgtaactaatttcattgaacatatcagaaagcagctgatagaaaaaggatttatacaagataacacctttattgtagaacactatgaagatagactatctgggtatggtacatttgatttagtaacattcgggtcaggtggctcgcccagttgggaaaaaatatctcttgaaaaagtcagcgaacggtttggttgtgaccatcaggaattagtggataagactttaaaaaacaagagactattcaatcaacttgaactattacatgaaacgattcgtccgtttactactaatacctggattgagagttacgcagtgctgtctcgacgatacaaaataatagataatgcaatcacaaaaagtgaattatcaaaatttttagcgggtaatccgatagaaagagaattagcttctttctttaaacgcgatcttgctttttttgctgacctttatgcaatgccttcagaagagtatatcgttattccggaacttaacattgaaaatggatttgtggattacgccatattttctggccgatcacgtatggacgttacgcttattgaaataaaaggagccaatttcgatttaatgggctcaaccggttaccataatttctcttataaaactaatgaagctctacagcaagtcagaggaaggcaaggcaccattataagggactaccctaaatttcgggaatactttcacgatattcgcgagatgatagaaacggacaggcataaatttgaggccttttgcggacctaaaggaaaattattggttgatcccaataaggatataaatatcagaacggtggttattgcaggccgatctaaaaacgatctggaagaaagcatcgaacgacagaatctagaaagaaatgcctcgcttcctctaaggttagagagctgggacagtctgctcaataagttgtccgggcagagagcatcttag

SEQ ID NO: 61632 - DNA, 1092 bp, Enterobacter cloacae; identical to SEQ ID NO: 61627

SEQ ID NO: 61633 - DNA, 1092 bp, Enterobacter cloacae; identical to SEQ ID NO: 61622

SEQ ID NO: 61634 - DNA, 1092 bp, Enterobacter cloacae; identical to SEQ ID NO: 61627

SEQ ID NO: 61635 - DNA, 810 bp, Pectobacterium carotovorum subsp. carotovorum PC1
atgtcaccttctatatatttaaccccaacagaagccgaagacaaacgtactgagtttttatctttactagatgaaaatgaaaaggaacaaatttatcaagagtatttagaaggaaatacagaatttattccaagggaattcattcaaaatcatggattacatttgtcaatggtttttagaaaatatcctttatcaagtgactataaacctgattttttatacctggctaaaagtagtgataactggaatgtcgttttaattgaaatcgaaaaaccatcatcaaaatattttgttggtaatactacagaattccatagggattttcttagcgccattcagcaaatgaatgattggagagcatggattgatactcctgcaaatttagaatccttgaaacaaaattcattgtccagtgttttagttccatctcaaatgcacggcaacccattgaatgttaagtatttacttgttcatgggcgcagagctgagtatgaaggtaacgaattaagaaaaagtaaaataagaagtatggaacgagaggattttaaaatcatctcatatgataacctagcagttaatatcaatgaccataagaaattatacgttgctaaaaaaacaaataattacatagacatattgtcagatagttttgttgatgatggaatattcacatggatgacaccaacaacatatagaataaaccagtcgctgcacgatgatactgataaaaacaaacaccacagtaatagttatattagcgttaatgttaaagctatcgatcacaacctccccaaagtcaccatatattaa

SEQ ID NO: 61636 - DNA, 699 bp, Escherichia coli O111:H- str. 11128
atgttcataccaagagaattcgagcaaaaccatggaattcacttcagtacggtatttagaaagttgcctctatcaagcgattataaacctgatttcgtatatttatcaaaaagctcggataactggaatgtagtattagttgaaattgaaaaaccatcgtcgaaatattttaaaaacaactctacaacttttcatgcagacttcaatcttgctttgcagcaaatgaacacatggagggcttggtttgatgatgaatcaaacagaaatcactttaaaaacaatatattgcagggatttatagaaccggcacatatggggagaaatccatttaatttcaagtatgtccttgttcatggtcgtagatcagaatatgaaaataatacacagaaaactgcactaatcagagggcaacagcgaagtgacttctcaataatttcatttgatagtttggctgaaaatatagagaaaaaatataagttatatgttggagtgaaaaaaaatagtcactatgaattaatatcaaaagaatttgttgatgaagggatattttcatggatgaacatagattttttagcaattacacaaagtatatatgatgatgcaatcgcaaaatcagatagttggcatcactatataattaaagaaaatggaaccgtcaaaacaatggattatgctctccctcgaattaaaataatttga

SEQ ID NO: 61637 - DNA, 1002 bp, Escherichia coli DEC14C
atggcaacatcttctcgtcaaaaactacaacagaatgatccaagataccctgtacttaaaggttttctggaaagaacgctacaactaatcgataaagattgggataaatggagacgcgaaaaaggagtaaatgaagttaaaagcaatactccaatagtaagtgaatggctgaattctctcaaaaaacatgagagagaaagtgccgaaaagttaattggacgagtaaacacattccgtttttctggtaatgaggaagaacaaaaagcagcaagaaaaaccgtattaaaaaatacggtattagcctttgaaagacttagaattcaagacaaccttgatgcattagataaaataagcaaccttcaatcagaaaattttaaagatgtatttgcatctgtcaatgacattgaagcaagcatgttttatgaaattacttcgcaacgccttaaagtaattgaaaaattccaaaaaataactgatgaaaatcagcttgaaagagctgtacaaatgtatttatatgatcatttatggttattggatccttcatgggaaagagtcacaggcacatctgttatggagcaaacattgaccaaggaactaaaacagataaaccctgatgctgctagcggtgctcgtattgatatcgctttcaaaaccgtttctggcaagcatgtaattattgagatgaaacgacctaaagtgcacccagatataatgaacctagtcgcacaaggtaataaatatgtacaggcaacgacacaatggttctccaataaccctaaaaattgcccaggtggaaatataccgcatatagaagtaatattcctggttggctctggatatttacaagagaaccaacactttataaatatgcaattactttctatcaatggaaaaatattgacatataatgacctaatcgtgcaatcaaaacaagcctatgctgaatatcaagacaaaaagaatgatgcagctagaattatgaaaatagttgagggaatctaa

SEQ ID NO: 61638 - DNA, 807 bp, Escherichia coli O111:H8 str. CVM9634
atgtatatgactggtcaagaaataaacgataaaaagaaagagtatcttgaattactagatcgagaagagaatgaacagatttatcaaacataccttgaagaaaatacaatgttcataccaagagaattcgagcaaaaccatggaattcacttcagtacggtatttagaaagttgcctctatcaagcgattataaacctgatttcgtatatttatcaaaaagctcggataactggaatgtagtattagttgaaattgaaaaaccatcgtcgaaatattttaaaaacaactctacaacttttcatgcagacttcaatcttgctttgcagcaaatgaacacatggagggcttggtttgatgatgaatcaaacagaaatcactttaaaaacaatatattgcagggatttatagaaccggcacatatggggagaaatccatttaatttcaagtatgtccttgttcatggtcgtagatcagaatatgaaaataatacacagaaaactgcactaatcagagggcaacagcgaagtgacttctcaataatttcatttgatagtttggctgaaaatatagagaaaaaatataagttatatgttggagtgaaaaaaaatagtcactatgaattaatatcaaaagaatttgttgatgaagggatattttcatggatgaacatagattttttagcaattacacaaagtatatatgatgatgcaatcgcaaaatcagatagttggcatcactatataattaaagaaaatggaaccgtcaaaacaatggattatgctctccctcgaattaaaataatttga

SEQ ID NO: 61639 - DNA, 1221 bp, Escherichia coli KTE90
atgattgatttcataaatactaatacagggattgtattgaaatatgttccagaaacagcaggtacatcttgggtttggaatgaattaaaaactcattcaactgtaacaatttctaaagttttttattttaatattagcgatctgctcaatcctccgtcaccaaatcaagattttgatagttatttttatgagtttcagtttggaacttttagtggtgattatattgttataccaagttatattttaaatattcaaaatgatttatatataagtaaagatatcaatcttagtaggagcgtctttgctgcagagcgtaatatttctatttttggtcgactctcgcgaatattgaatcacagcaatccaatttatattggcggggattctgcggaggcaataccttctaatgtttttagtgagttattaagcaaatttcctaactcgtacgaagtagataaatatgccgatgctagagtacatacgattcttgagcaatatttggaaggcatgaaagatgccagaggcctctacgaaacatatctcaataaaatagaaccaattagaaaaagtaatctcgacttaacaactatcaaagaattagaaatagaaaaatacactttaattagagataccattgagaatgctttaagtacgaaacagcactggtccgaaaaagattggcaaaaattgatggtgcaattccttcttcttttatttccaaagtatattcatattattgaaaacattaccatccatgattactacagcatcccaggcgagaaaaaagatcgatacatagatataggcttggttgattctaatggtaatttagatattatcgaagttaaaaagccatttgacgacaagatcttgcgcaggacaaagtatagaggaaatagcataccaacgtctgagctaagcggtggtatcatgcaagctgaaaaatatctcttccatttatcaaaatggggaacaaaaggtgaagacaaccttacaaaaaaatatgcaagtgaactaccctctggtatgagcattcatatttctaaccccaaggctatcatcatagttggacgtgaccaaattggtaatggaaatatgacagaaaatcaaaaacttgatttcgaaattatcaagcggaagtataccaatatgatggacatcattacctacgatgacctattgagacggcttaaccgtacaatttcagcacttaaaaagtaa

SEQ ID NO: 61640 - DNA, 1227 bp, Escherichia coli KTE10
atgttacagttcagctttgtatcaaatgacgttgttatgacttacgacggtgacagcggagaacaaataatttgggtttgggagagtttaaataaatttcaaacagtatgcatttcacgaatttttaactttcaactccaggacttgagaaacccaccgtcaaccgttcaggattttaatgattacgaatattcctttaattttggcacgcttaataatgaatacataacagttccgggacggattctaagcattaatcgagatgtccttatacataagtccatcaagcttgaaaggaaagtatttgcgtcagaacgcaacgtctccatttttggtcggctttcaaaactactcgatcacactaatcccatcatcatcggaggagataagccggaagctataccaaaaagcgtattccaggagttgcaaagtaaattccccaacacaggggaactggatcgctatgctaatgcaagggttcacgctattctcgcaggttatcttgatggtatgaaagatgctcgcgaacggtatgaacattacctaaacagaaaaacagtgatcagaaaaaccgacaaactggatttagaagttttaaataagctcgaaattgagaaatatacactcataagagacattatccaggatgcgttgaataacaaaactaacttgtctgaagatgactggcagagcctgatgatacccttcatcacattactttttccaaaatatatcaaggtcctcgagaaggttaaaattttcgactattactctaatccttcggctaaaacaaatcggtttatagacattgcactggtggatgcaaacggcaaccttgatatcatcgaagtcaaaaagccgtttgatgataagatccttcgcaagacgccctatcgcgataactatattcctacatcagaacttagcggcggtattatgcaggctgaaaagtatatttttcatttatctaaatggggtgttaagggtgaaaaagagcttacgaatgcctacaagaattctctgccagcgggaatgtgtattcgtatatctaacccaaaagccatcatcattgtcggacgcgatcagatagcgaacggtaacatgaccgacggtcagttgcttgattttgagataatcaaacgtaagtacgccaacatgatagacatattgacgtacgacgacctgttgcgtcgacttaataatacgattgaagcattgaaaggttga

SEQ ID NO: 61641 - DNA, 1221 bp, Escherichia coli KTE91; identical to SEQ ID NO: 61639

SEQ ID NO: 61642 - DNA, 1221 bp, Escherichia coli KTE184; identical to SEQ ID NO: 61639

SEQ ID NO: 61643 - DNA, 588 bp, Escherichia coli p0305293.4
atgttttatgaaattacttcgcaacgccttaaagtaattgaaaaattccaaaaaataactgatgaaaatcagcttgaaagagctgtacaaatgtatttatatgatcatttatggttattggatccttcatgggaaagagtcacaggcacatctgttatggagcaaacattgaccaaggaactaaaacagataaaccctgatgctgctagcggtgctcgtattgatatcgctttcaaaaccgtttctggcaagcatgtaattattgagatgaaacgacctaaagtgcacccagatataatgaacctagtcgcacaaggtaataaatatgtacaggcaacgacacaatggttctccaataaccctaaaaattgcccaggtggaaatataccgcatatagaagtaatattcctggttggctctggatatttacaagagaaccaacactttataaatatgcaattactttctatcaatggaaaaatattgacatataatgacctaatcgtgcaatcaaaacaagcctatgctgaatatcaagacaaaaagaatgatgcagctagaattatgaaaatagttgagggaatctaa

SEQ ID NO: 61644 - DNA, 980 bp, Escherichia coli p0305293.6
atactattacctttgaaggaaaagatgtaaaagttagtgggtacattggcagtgtagttaagccatcacaattaaagaaagaccctgaaatatctaacaacagcattactgtaatctctcacggacgtgtttttgaggaggacatattattagaatttggaagtgctaaagtattcaccaattatctggtcggtgaaatagtcgccgattttctagatgataacgaaaagcctgatatggcaacatcttctcgtcaaaaactacaacagaatgatccaagataccctgtacttaaaggttttctggaaagaacgctacaactaatcgataaagattgggataaatggagacgcgaaaaaggagtaaatgaagttaaaagcaatactccaatagtaagtgaatggctgaattctctcaaaaaacatgagagagaaagtgccgaaaagttaattggacgagtaaacacattccgtttttctggtaatgaggaagaacaaaaagcagcaagaaaaaccgtattaaaaaatacggtattagcctttgaaagacttagaattcaagacaaccttgatgcattagataaaataagcaaccttcaatcagaaaattttaaagatgtatttgcatctgtcaatgacattgaagcaagcatgttttatgaaattacttcgcaacgccttaaagtaattgaaaaattccaaaaaataactgatgaaaatcagcttgaaagagctgtacaaatgtatttatatgatcatttatggttattggatccttcatgggaaagagtcacaggcacatctgttatggagcaaacattgaccaaggaactaaaacagataaaccctgatgctgctagcggtgctcgtattgatatcgctttcaaaaccgtttctggcaagcatgtaattattgagatgaaacgacctaaagtgcacccagatataatgaacctagtcgcacaaggtaataaatatgta

SEQ ID NO: 61645 - DNA, 1248 bp, Escherichia coli KTE103
atgacaaacatgatctcatatcagggacttgttcgcaccttccttagtgggtacattggcagtgtagttaagccatcacagttaaagaaagaccctgaaatatctaacaacagcattactgtaatctctcacggacgtgtttttgaggaggacatattattagaatttggaagtgctaaagtattcaccaattatctggtcggtgaaatagtcgccgattttctagatgataacgaaaagcctgatatggcaacatcttctcgtcaaaaactacaacagaatgatccaagataccctgtacttaaaggttttctggaaagaacgctacaactaatcgataaagattgggataaatggagacgcgaaaaaggagtaaatgaagttaaaagcaatactccaatagtaagtgaatggctgaattctctcaaaaaacatgagagagaaagtgccgaaaagttaattggacgagtaaacacattccgtttttctggtaatgaggaagaacaaaaagcagcaagaaaaaccgtattaaaaaatacggtattagcctttgaaagacttagaattcaagacaaccttgatgcattagataaaataagcaaccttcaatcagaaaattttaaagatgtatttgcatctgtcaatgacattgaagcaagcatgttttatgaaattacttcgcaacgccttaaagtaattgaaaaattccaaaaaataactgatgaaaatcagcttgaaagagctgtacaaatgtatttatatgatcatttatggttattggatccttcatgggaaagagtcacaggcacatctgttatggagcaaacattgaccaaggaactaaaacagataaaccctgatgctgctagcggtgctcgtattgatatcgctttcaaaaccgtttctggcaagcatgtaattattgagatgaaacgacctaaagtgcacccagatataatgaacctagtcgcacaaggtaataaatatgtacaggcaacgacacaatggttctccaataaccctaaaaattgcccaggtggaaatataccgcatatagaagtaatattcctggttggctctggatatttacaagagaaccaacactttataaatatgcaattactttctatcaatggaaaaatattgacatataatgacctaatcgtgcaatcaaaacaagcctatgctgaatatcaagacaaaaagaatgatgcagctagaattatgaaaatagttgagggaatctaa

SEQ ID NO: 61646 - DNA, 1221 bp, Escherichia coli KTE107
atgattaatttcataactaccaatacaggggttgtatttaaatatgatccagaaacagcgggtaggtcttgggtttggaatgaattagaaactcattcaactgtaaaaatttctaaagttttttattttgatattagcgatctgctcaaccctccgtcacccaatcaagattttgatagttatatttatgagtttcaatttggaacttttagtggtgattatattgttgtgccaggttgtattttaaatattaaaaatgatttgtatataagtaaagatatcaatcttagtaggagtatctttgctgccgagcgtaatgtttctatttttggccgactctcgcgcatattgaatcacagcaatccaatttgtattggcgggggtgctgcggaggcaataccttctaatgtttttagtgagttattaagcaaattccctaactcatacgaaatggataaatatgccaatgctagagtacatatgattcttgagcaatatttggaaggcatgaaagatgccagaggactctacgaaacatatctcaataaaatagcgccaaagatagcaagtaatctcgatttaagaattatcaatgaattagaaatagaaaaatacactttgcttagagataccattgagaatgctttaagtacgaaacagcattggtccgaaaaagattggcaaaaattgatggtgcaattccttcttcttttattcccaaagtatattcttgttattgaaaatattaccatccatgattactacagcatcccaggtaagaaaaaagatcgatacatagatataggattggttgattctagcgggaatttagatattattgaagttaaaaagccatttgatgataagatcttgcgcaggacaaagtatagaggaaatagcataccaacgtccgagctaagtggtggtatcatgcaagctgaaaaatatctcttccatttatcaaaatggggaacaaaaggtgaagacaaccttacaaaaaaatatgcaactaaactaccctctgggatgagtattcatatttcgaaccccaaggctatcatcattgttggacgtgaccaaattggtaatggaaatatgacagaaaatcaaaagctcgatttcgaaattatcaagcgaaagtataccaatatgatggatatcattacctacgacgacctcttgagacggcttaaccgtacaatttcagcacttaaaaactaa

SEQ ID NO: 61647 - DNA, 1227 bp, Escherichia coli HVH 115 (4-4465997)
atgttacagttcagctttgtatcaaatgacgttgttatgacttacgacggtgacagcggagaacaaataatttgggtttgggagagtttaaataaatttcaaacagtatgcatttcacgaatttttaactttcaactccaggacttgagaaacccaccgtcaaccgttcaggattttaatgattacgaatattcctttaattttggcacgcttaataatgaatacataacagttccgggacggattctaagcattaatcgagatgtccttatacataagtccatcaagcttgaaaggaaagtatttgcgtcagaacgcaacgtctccatttttggtcggctttcaaaactactcgatcacaataatcccatcatcatcggaggagataagccggaagctataccaaaaagcgtattccaagagttgcaaagtaaattccccaacacaggggaactggatcgctatgctaatgcaagggttcacgctattctcgcaggttatcttgatggtatgaaagatgctcgcgaacggtatgaacattacctaaacagaaaaacagtgatcagaaaaaccgacaaactagatttagaagttttaaataagctcgaaattgagaaatatacactcataagagacattatccaggatgcgttgaataacaaaactaacttgtctgaagatgactggcagagcctgatgatacccttcatcacattactttttccaaaatatatcaaggtcctcgagaaggttaaaattttcgactattactctaatccttcggctaaaacaaatcggtttatagacattgcactggtggatgcaaacggcaaccttgatatcatcgaagtcaaaaagccgtttgatgataagatccttcgcaagacgccctatcgcgataactatattcctacatcagaacttagcggcggtattatgcaggctgaaaagtatatttttcatttatctaaatggggtgttaagggtgaaaaagagcttacgaatgcctacaagaattctctgccagcgggaatgcgtattcgtatatctaacccaaaagccatcatcattgtcgggcgcgatcagatagcgaacggtaacatgaccgacggtcagttgcttgattttgagataatcaaacgtaagtacgccaacatgatagacatattgacgtacgacgacctgttgcgtcgacttaataatacgattgaagcattgaaaggttga

SEQ ID NO: 61648 - DNA, 1227 bp, Escherichia coli HVH 115 (4-4465989); identical to SEQ ID NO: 61647

SEQ ID NO: 61649 - DNA, 1221 bp, Escherichia coli HVH 147 (4-5893887)
atgattgatttcataactactaatacagggattgtattgaaatatgttccagaaacagcaggtacatcttgggtttggaatgaattaaaaactcattcaactgtaacaatttctaaagttttttattttaatattagcgatctgctcaatcctccgtcaccaaatcaagattttgatagttatttttatgagtttcagtttggaacttttagtggtgattatattgttataccaagttatattttaaatattcaaaatgatttatatataagtaaagatatcaatcttagtaggagcgtctttgctgcagagcgtaatatttctatttttggtcgactctcgcgaatattgaatcacagcaatccaatttatattggcggggattctgcggaggcaataccttctaatgtttttagtgagttattaagcaaatttcctaactcgtacgaagtagataaatatgccgatgctagagtacatacgattcttgagcaatatttggaaggcatgaaagatgccagaggcctctacgaaacatatctcaataaaatagaaccaattagaaaaagtaatctcgacttaacaactatcaaagaattagaaatagaaaaatacactttaattagagataccattgagaatgctttaagtacgaaacagcactggtccgaaaaagattggcaaaaattgatggtgcaattccttcttcttttatttccaaagtatattcatattattgaaaacattaccatccatgattactacagcatcccaggcgagaaaaaagatcgatacatagatataggcttggttgattctaatggtaatttagatattatcgaagttaaaaagccatttgacgacaagatcttgcgcaggacaaagtatagaggaaatagcataccaacgtctgagctaagcggtggtatcatgcaagctgaaaaatatctcttccatttatcaaaatggggaacaaaaggtgaagacaaccttacaaaaaaatatgcaagtgaactaccctctggtatgagcattcatatttctaaccccaaggctatcatcatagttggacgtgaccaaattggtaatggaaatatgacagaaaatcaaaaacttgatttcgaaattatcaagcggaagtataccaatatgatggacatcattacctacgatgacctattgagacggcttaaccgtacaatttcagcacttaaaaagtaa

SEQ ID NO: 61650 - DNA, 1230 bp, Escherichia coli HVH 193 (4-3331423)
atgattgatttcataactactaataaagggattgtattgaaatatgaaccagaaacagcagatacatcttgggtttggaatgaattaaaaactcattcaactgtaacaatttctaaagttttttattttaatattaacgatctgctcaaccctccgtcaccaaatcaagattttgatagttatttttatgagtttcagtttggaacttttaggggtgattatactgttataccaagttatattttaaatattcaaaatgatatatatataagtaaaaaaatccatcttagtaggagattctttgctgcagagcgtaatatttctatttttggtcgactctcgcgaatattgaatcacagcaatccaatttatattggcggggattctgcggaggcaataccttttaaaatttttaaagagttattaagaaaatttcctaacacgcacgaagtaaataaatatgccgatgctagagtacatacgattcttgagcaatatttggaaggcatgaaagatgccagaggcctctacgaaacatatctcaataaaatagaaccaattagaaaaagtagaaaaagtaatctcgacttaacaactatcaataaattagaaatagaaaaatacactttaattagagataccattgagaatgctttaaatacgaaacagcactggtccgaaaaagattggcaaaaattgatggtgcaattccttcttcttttatttccaaagtatattcatgttattgaaaatattaccatccatgattactacagcatcccaggcaagaaaaaagaacgatacatagatataggcttggttgattctaatggtaatttagatattatcgaagttaaaaagccatttgacgacaaaatcttgcgcaggacaaagtatagaggaaatagcataccaacgtctgagctaagcggcggtatcatgcaagctgaaaaatatctcttccatttatcaaaatggggaacaaaaggtgaagacaaccttacaagaaaatatgcaagtgaactaccatctgggatgagcattcatatttctaaccccaaggctatcatcatagttggacgtgaccaaattgataatggaaatatgacagaaaatcaaaaacttgatttcgaaattatcaagcggaagtataccaatatgatggacatcattacctacgatgacctattgagacggcttaaccgtacaatttcagcacttaaaaagtaa

SEQ ID NO: 61651 - DNA, 807 bp, Escherichia coli 908519; identical to SEQ ID NO: 61638

SEQ ID NO: 61652 - DNA, 1227 bp, Escherichia coli 908585
atgttacagttcagctttgtatcaaatgacgttgttatgacttacgacggtgacagcggagaacaaataatttgggtttgggagagtttaaataaatttcaaacagtatgcatttcacgcatttttaactttcaactccaggacttgagaaacccaccgtcaaccgttcaggattttaatgattatgaatattcctttaattttggcacgcttaataatgaatacataacagttccgggacggattctaagcattaatcgagatgtccttatacataagtccatcaagcttgaaaggaaagtatttgcgtcagaacgcaacgtctccatttttggtcggctttcaaaactactcgatcacactaatcccatcatcatcggaggagataagtcggaagctataccaaaaagcgtattccaggagttgcaaagtaaattccccaacacaggggaactggatcgctatgctaatgcaagggttcacgctattctcgcaggttatcttgatggtatgaaagatgctcgcgaacggtatgaacattacctaaacagaaaaacagtgatcagaaaaaccgacaaactggatttagaagttttaaataagctcgaaattgagaaatatacactcataagagacattatccaggatgcgttgaataacaaaactaacttgtctgaagatgactggcagagcctgatgatacccttcatcacattactttttccaaaatatatcaaggtcctcgagaaggttaaaattttcgactattactctaatccttcggctaaaacaaatcggtttatagacattgcactggtggatgcaaacggcaaccttgatatcatcgaagtcaaaaagccgtttgatgataagatccttcgcaagacgccctatcgcgacaactatattcctacatcagaacttagcggcggtattatgcaggctgaaaagtatatttttcatttatctaaatggggtgttaagggtgaaaaagagcttacgaatgcctacaagaattctctgccagcgggaatgtgtattcgtatatctaacccaaaagccatcatcattgtcgggcgcgatcagatagcgaacggtaacatgaccgacggtcagttgcttgattttgagataatcaaacgtaagtacgccaacatgatagacatattgacgtacgacgacctgttgcgtcgacttaataatacgattgaagcattgaaaggttga

SEQ ID NO: 61653 - DNA, 1227 bp, Escherichia coli BIDMC 77; identical to SEQ ID NO: 61652

SEQ ID NO: 61654 - DNA, 1227 bp, Escherichia coli CHS 77
atgttacagttcagctttgtatcaaatgacgttgttatgacttacgacggtgacagcggagaacaaataatttgggtttgggagagtttaaataaatttcaaacagtatgcatttcacgaatttttaactttcaactccaggacttgagaaacccaccgtcaaccgttcaggattttaatgattacgaatattcctttaattttggcacgcttaataatgaatacataacagttccgggacggattctaagcattaatcgagatgtccttatacataagtccatcaagcttgaaaggaaagtatttgcgtcagaacgcaacgtctccatttttggtcggctttcaaaactactcgatcacactaatcccatcatcatcggaggagataagccggaagctataccaaaaagcgtattccaggagttgcaaagtaaattccccaacacaggggaactggatcgctatgctaatgcaagggttcacgctattctcgcaggttatcttgatggtatgaaagatgctcgcgaacggtatgaacattacctaaacagaaaaacagtgatcagaaaaaccgacaaactggatttagaagttttaaataagctcgaaattgagaaatatacactcataagagacattatccaggatgcgttgaataacaaaactaacttgtctgaagatgactggcagagcctgatgatacccttcatcacattactttttccaaaatatatcaaggtcctcgagaaggttaaaattttcgactattactctaatccttcggctaaaacaaatcggtttatagacattgcactggtggatgcaaacggcaaccttgatatcatcgaagtcaaaaagccgtttgatgataagatccttcgcaagacgccctatcgcgataactatattcctacatcagaacttagcggcggtattatgcaggctgaaaagtatatttttcatttatctaaatggggtgttaagggtgaaaaagagcttacgaatgcctacaagaattctctgccagcgggaatgtgtattcgtatatctaacccaaaagccatcatcattgtcgggcgcgatcagatagcgaacggtaacatgaccgacggtcagttgcttgattttgagataatcaaacgtaagtacgccaacatgatagacatattgacgtacgacgacctgttgcgtcgacttaataatacgattgaagcattgaaaggttga

SEQ ID NO: 61655 - DNA, 1221 bp, Escherichia coli 4-203-08_S4_C3
atgattgatttcataactactaatacagggattgtattgaaatatgatccagaaacagcaggtacatcttgggtttggaatgaattaaaaactcattcaactgtaacaatttctaaagttttttattttaatattagcgatctgctcaaccctccgtcaccaaatcaagattttgatagttatttttatgagtttcagtttggaacttttagtggtgattatattgttataccaagttatattttaaatattcaaaatgatttatatataagtaaggatatcaatcttagtaggagcgtctttgctgcagagcgtaatatctctatttttggtcgactctcgcgaatattgaatcacagcaatccaatttatattggcgggggttctgcggaggcaataccttctaatgtttttagtgagttattaagcaaatttcctaactcgtacgaagtagatagatatgccgatgctagagtacatacgattcttgagcaatatttggaaggcatgaaagatgccagaggcctctacgaaacatatctcaataaaatagaaccaattagaaaaagcaatctcgacttaacaactatcaaagaattagaaatagaaaaatacactttaattagagataccattgagaatgctttaagtacgaaacagcactggtccgaaaaagattggcaaaaattgatggtgcaattccttcttcttttatttccaaagtatattcatgttattgaaaatattaccatccatgattactacagcatcccaggcaagaaaaaagatcgatacatagatataggcttggttgattctaatggtaatttagatattatcgaagttaaaaagccatttgacgacaagatcttgcgcaggacaaagtatagaggaaatagcataccaacgtctgagctaagcggtggtatcatgcaagctgaaaaatatctcttccatttatcaaaatggggaacaaaaggtgaagacaaccttacaaaaaaatatgcaagtgaactaccctctgggatgagcattcatatttctaaccccaaggctatcatcatagttggacgtgaccaaattggtaatggaaatatgacagaaaatcaaaaacttgatttcgaaattatcaagcggaagtataccaatatgatggacatcattacctacgatgacctattgagacggcttaaccgtacaatttcagcacttaaaaagtaa

SEQ ID NO: 61656 - DNA, 1221 bp, Escherichia coli 4-203-08_S4_C2
atgattgatttcataactactaatacagggattgtattgaaatatgatccagaaacagcaggtacatcttgggtttggaatgaattaaaaactcattcaactgtaacaatttctaaagttttttattttaatattagcgatctgctcaaccctccgtcaccaaatcaagattttgatagttatttttatgagtttcagtttggaacttttagtggtgattatattgttataccaagttatattttaaatattcaaaatgatttatatataagtaaggatatcaatcttagtaggagcgtctttgctgcagagcgtaatatctctatttttggtcgactctcgcgaatattgaatcacagcaatccaatttatattggcggggattctgcggaggcaataccttctaatgtttttagtgagttattaagcaaatttcctaactcgtacgaagtagatagatatgccgatgctagagtacatacgattcttgagcaatatttggaaggcatgaaagatgccagaggcctctacgaaacatatctcaataaaatagaaccaattagaaaaagcaatctcgacttaacaactatcaaagaattagaaatagaaaaatacactttaattagagataccattgagaatgctttaagtacgaaacagcactggtccgaaaaagattggcaaaaattgatggtgcaattccttcttcttttatttccaaagtatattcatgttattgaaaatattaccatccatgattactacagcatcccaggcaagaaaaaagatcgatacatagatataggcttggttgattctaatggtaatttagatattatcgaagttaaaaagccatttgacgacaagatcttgcgcaggacaaagtatagaggaaatagcataccaacgtctgagctaagcggtggtatcatgcaagctgaaaaatatctcttccatttatcaaaatggggaacaaaaggtgaagacaaccttacaaaaaaatatgcaagtgaactaccctctgggatgagcattcatatttctaaccccaaggctatcatcatagttggacgtgaccaaattggtaatggaaatatgacagaaaatcaaaaacttgatttcgaaattatcaagcggaagtataccaatatgatggacatcattacctacgatgacctattgagacggcttaaccgtacaatttcagcacttaaaaagtaa

SEQ ID NO: 61657 - DNA, 1221 bp, Escherichia coli 4-203-08_S3_C1; identical to SEQ ID NO: 61656

SEQ ID NO: 61658 - DNA, 1221 bp, Escherichia coli 5-172-05_S3_C1; identical to SEQ ID NO: 61655

SEQ ID NO: 61659 - DNA, 1293 bp, Escherichia coli 5-172-05_S1_C3
atggctctacgcgctgagcgggatatttataataaatttggtttatggtttattttagttctggagagagaaatgattaatttcataactaccaatacaggggttgtatttaaatatgatccagaaacagcgggtaggtcttgggtttggaatgaattagaaactcattcaactgtaaaaatttctaaagttttttattttaatattagcgatctgctcaaccctccgtcacccaatcaagattttgatagttatatttatgagtttcaatttggaacttttagtggtgattatattgttgtgccaggttgtattttaaatattaaaaatgatttgtatataagtaaagatatcaatcttagtaggagtatctttgctgccgagcgtaatgtttctatttttggccgactctcgcgcatattgaatcacagcaatccaatttgtattggcgggggggctgcggaggcaataccttctaatgtttttagtgagttattaagcaaattccctaactcatacgaaatggataaatatgccaatgctagagtacatatgattcttgagcaatatttggaaggcatgaaagatgccagaggactctacgaaacatatctcaataaaatagcgccaaagatagcaagtaatctcgatttaagaattatcaatgaattagaaatagaaaaatacactttgcttagagataccattgagaatgctttaagtacgaaacagcattggtccgaaaaagattggcaaaaattgatggtgcaattccttcttcttttattcccaaagtatattcttgttattgaaaatattaccatccatgattactacagcatcccaggtaagaaaaaagatcgatacatagatataggattggttgattctagcgggaatttagatattattgaagttaaaaagccatttgatgataagatcttgcgcaggacaaagtatagaggaaatagcataccaacgtccgagctaagtggtggtatcatgcaagctgaaaaatatctcttccatttatcaaaatggggaacaaaaggtgaagacaaccttacaaaaaaatatgcaactaaactaccctctgggatgagtattcatatttcgaaccccaaggctatcatcattgttggacgtgaccaaattggtaatggaaatatgacagaaaatcaaaagctcgatttcgaaattatcaagcgaaagtataccaatatgatggacatcattacctacgacgacctcttgagacggcttaaccgtacaatttcagcacttaaaaactaa

SEQ ID NO: 61660 - DNA, 1014 bp, Escherichia coli 5-172-05_S1_C1
atgagccttagccattcgcatttaattggtagtgatggcgttaacgacctgatgttaaatatatcaggtcttaatacgcaagaaaaaaacatagaggatatatcggcatgttttttcgctcattgctcaaatacgggcgcacctcgctttacatgtaaactgagtattcaaagtttgcaactgcttcataaatatttgtccagctatagtgtgatctctgacgactcatcagcatcaacaggcagatttgttgaagtcaaagataatcataatgagataataagtatacttgaacatgctgataacaactcactggtaatggcattacagcaccttgttagcaataagctgacgaataatgatattaatacgatacttggaagaaaagaatcactttctgagtatgaacatatgctcgaacaccctgagaatcatactgaaccggattggcagcgattttttgagcgtaatgagtggatatttggttatggtttaaaatataaattccttaagattttacaaagagaagcccacatatccaaaactgacttgaatggcggtaatgatgttattgctgactttttaatgtcagattctcggtttactaaaatcgttgaattgaaaacacctacgacaaaattattcactaaaaggcaaggacgctctgatacatggtttctatcgagtgaaataaccgatgcagtaagccagattttagcccaaaaagcaaactgggaaattgaaagtcagacgagaaactatactgcggaaggcaatttgattcatgaggaaacttttgatgctgaatgtatattgatcattgggtcattatcatcaattgaaggttcggataaagagaagctcattaagagaaagacacttgaactttataggaggaatttaaaaaatattgatattctcttttatgatgaacttttagagcggtcaagatatattgtgagaagcgctgaaattatagaggataaattggcgagttctttaaatttaccatga

SEQ ID NO: 61661 - DNA, 1227 bp, Escherichia coli; identical to SEQ ID NO: 61652

SEQ ID NO: 61662 - DNA, 807 bp, Escherichia coli; identical to SEQ ID NO: 61638

SEQ ID NO: 61663 - DNA, 1227 bp, Escherichia coli; identical to SEQ ID NO: 61652

SEQ ID NO: 61664 - DNA, 1227 bp, Escherichia coli; identical to SEQ ID NO: 61652

SEQ ID NO: 61665 - DNA, 807 bp, Escherichia coli; identical to SEQ ID NO: 61638

SEQ ID NO: 61666 - DNA, 807 bp, Escherichia coli; identical to SEQ ID NO: 61638

SEQ ID NO: 61667 - DNA, 807 bp, Escherichia coli; identical to SEQ ID NO: 61638

SEQ ID NO: 61668 - DNA, 807 bp, Escherichia coli; identical to SEQ ID NO: 61638

SEQ ID NO: 61669 - DNA, 807 bp, Escherichia coli; identical to SEQ ID NO: 61638

SEQ ID NO: 61670 - DNA, 807 bp, Escherichia coli; identical to SEQ ID NO: 61638

SEQ ID NO: 61671 - DNA, 1227 bp, Escherichia coli
atgttacagttcagctttgtatcaaatgacgttgttatgacttacgacggtgacagcggagaacaaataatttgggtttgggagagtttaaataaatttcaaacagtatgcatttcacgaatttttaactttcaactccaggatttgagaaacccaccgtcaaccgttcaggattttaatgattacgaatattcctttaattttggcacgcttaataatgaatacataacagttccgggacggattctaagcattaatcgagatgtccttatacataagtccatcaagcttgaaaggaaagtatttgcgtcagaacgcaacgtctccatttttggtcggctttcaaaactactcgaacacactaatcccatcatcatcggaggagataagccggaagctataccaaaaagcgtattccaggagttgcaaagtaaattccccaacacaggggaactggatcgctatgctaatgcaagggttcacgctattctcgcaggttatcttgatggtatgaaagatgctcgcgaacggtatgaacattacctaaacagaaaaacagtgatcagaaaaaccgacaaactggatttagaagttttaaataagctcgaaattgagaaatatacactcataagagacattatccaggatgcgttgaataacaaaactaacttgtctgaagatgactggcagagcctgatgatacccttcatcacattactttttccaaaatatatcaaggtcctcgagaaggttaaaattttcgactattactctaatccttcggctaaaacaaatcggtttatagacattgcactggtggatgcaaacggcaaccttgatatcatcgaagtcaaaaagccgtttgatgataagatccttcgcaagacgccctatcgcgataactatattcctacatcagaacttagcggcggtattatgcaggctgaaaagtatatttttcatttatctaaatggggtgttaagggtgaaaaagagcttacgaatgcctacaagaattctctgccagcgggaatgtgtattcgtatatctaacccaaaagccatcatcattgtcgggcgcgatcagatagcgaacggtaacatgaccgacggtcagttgcttgattttgagataatcaaacgtaagtacgccaacatgatagacatattgacgtacgacgacctgttgcgtcgacttaataatacgattgaagcattgaaaggttga

SEQ ID NO: 61672 - DNA, 1227 bp, Escherichia coli; identical to SEQ ID NO: 61652

SEQ ID NO: 61673 - DNA, 1227 bp, Escherichia coli; identical to SEQ ID NO: 61652

SEQ ID NO: 61674 - DNA, 1227 bp, Escherichia coli; identical to SEQ ID NO: 61652

SEQ ID NO: 61675 - DNA, 1227 bp, Escherichia coli
atgttacagttcagctttgtatcaaatgacgttgttatgacttacgacggtgacagcggagaacaaataatttgggtttgggagagtttaaataaatttcaaacagtatgcatttcacgaatttttaactttcaactccaggatttgagaaacccaccgtcaaccgttcaggattttaatgattacgaatattcctttaattttggcacgcttaataatgaatacataacagttccgggacggattctaagcattaatcgagatgtccttatacataagtccatcaagcttgaaaggaaagtatttgcgtcagaacgcaacgtctccatttttggtcggctttcaaaactactcgatcacactaatcccatcatcatcggaggagataagccggaagctataccaaaaagcgtattccaggagttgcaaagtaaattccccaacacaggggaactggatcgctatgctaatgcaagggttcacgctattctcgcaggttatcttgatggtatgaaagatgctcgcgaacggtatgaacattacctaaacagaaaaacagtgatcagaaaaaccgacaaactgggtttagaagttttaaataagctcgaaattgagaaatatacactcataagagacattatccaggatgcgttgaataacaaaactaacttgtctgaagatgactggcagagcctgatgatacccttcatcacattactttttccaaaatatatcaaggtcctcgagaaggttaaaattttcgactattactctaatccttcggctaaaacaaatcggtttatagacattgcactggtggatgcaaacggcaaccttgatatcatcgaagtcaaaaagccgtttgatgataagatccttcgcaagacgccctatcgcgataactatattcctacatcagaacttagcggcggtattatgcaggctgaaaagtatatttttcatttatctaaatggggtgttaagggtgaaaaagagcttacgaatgcctacaagaattctctgccagcgggaatgtgtattcgtatatctaacccaaaagccatcatcattgtcgggcgcgatcagatagcgaacggtaacatgaccgacggtcagttgcttgattttgagataatcaaacgtaagtacgccaacatgatagacatattgacgtacgacgacctgttgcgtcgacttaataatacgattgaagcattgaaaggttga

SEQ ID NO: 61676 - DNA, 1092 bp, Escherichia hermannii NBRC 105704
atgaaaatcagcgattttatcttccagtatacccccgcaaatatgatgcggacagacagcttatgccgggtccggctcttcgttaacgcagaaaaactgtatgcgctgataacggatgtcggcggtaaatactgccccgcaagtgtcattaactttatcgagaatattaaagaacagcttattgaaagaggatacatatccgaaagcacgatactcattacacatgatgaggacacattatcgggatatggatcatttgatctcgtgacctttgggcgcagcaattctgccagatttcacgacagctcactggaaaaggtcagcgaattactgggctgttcgcaccaggaattactggataaaacgcttaaaaatagacgcctgttcgaccagcttgaacaacgccaccatctgatacgcccgtttacccgggacacgtatattgaaaattatggcgtgttatcccgacgctacaaaattaaagacaacgcaattaccaaaagtgagttagccgcttttttggccgataatcccagcgaaagagcgctggccgcattctttaaacgcgatctcgcctttttcgccgacctcttcgcttaccccgccgaagaatacatcgttgtgcccgaactcaaaattgaagagggttttgtggattatgcaatcttatccggtcggtcgcgcatggacgtcacgctgattgaaatcaaaggcgcgaactttgatttgatggggtcgacgggttatcgcaatttttcctacaaaaccaatgaagcgttacagcaggtaaggggaagagaaggcaccatcatcagggattaccccagataccgggcatactttcatgaaatacgtgaggcagtggaaaccggaaataatcgtcatcaggcgtttcgcgggccaaaaggtaaattagaggtcgaccctgataaggatattaatatccggttagtggtcattgcgggccgttcgcaaaacgatctggaagagagtattgaacgccataatcttgagaggcacacctctctgcccttaaggctggaaagctgggacagtttgctgaataagatatcgggcgaccgaaacatctag

SEQ ID NO: 61677 - DNA, 1005 bp, Klebsiella oxytoca 10-5242
atgagcctgaatcactctttcctcataggctcagatgagtcaagtgagcttatgctaaacatttctggtcttgatgctaacgctaaagaagtggattccttatgtgccaatttctttgcacactgtgctaagactggcacacccaaattcacatgtaagctgacaatacaaaatcttcaaaatctttatagccatctatccagctatagcatggtatgtgatagcacttcttcaaagactggaagattcattgaggtcagagataattataatgagataatcagcattcttgaacacgctgataataattcattagttatggccttgcagcaccttgtaagcagtaagttaaccaataatgacatcaatacaatattagggagaaaggaatctctcgagacctacgagaaaatgctcactgagcctgatagttataaggaggcagactggcaacgtttttttgaaaccaatgaatggatttttggttatggcttaaagtataaattcctaaaaattcttcaaagggaagctcacatatcaagaactgatttaaacggcggaaatgatgtaattgctgattttcttatatctgactcaagattcaccaagattgtggaattaaaaacaccaacaacaaaacttttcactaagcgacaagggcgctctgatacatggttcttatccagtgaattaaccgacgctgttagtcagatattggcgcaaaaggcaaattgggagattgaatctcagtctagaaattacactacggatggtgaacttatacatgaagatacatttgatacagaatgcattttaattataggttcattatcttcaattgagggtaatgagcgagaaaaactaattaaaagaaaaaccctcgagctttataggagaaatttaaaaaatatagatatcttgttttatgatgagttgcttgagaggtcgcgctacattgtcagaagtgctgaagtaatagaagataagcttctctcagcactgtag

SEQ ID NO: 61678 - DNA, 1005 bp, Klebsiella oxytoca MGH 27; identical to SEQ ID NO: 61677

SEQ ID NO: 61679 - DNA, 1410 bp, Klebsiella oxytoca; identical to SEQ ID NO: 61283

SEQ ID NO: 61680 - DNA, 1005 bp, Klebsiella oxytoca 09-7231
atgagcctgaatcactctttcctcataggctcagatgaatcaagtgagcttatgctaaacatttctggtcttgatgctaacgctaaagaagtggattccttatgtgccaatttctttgcacactgtgctaagactggcacacccaaattcacatgtaagctgacaatacaaaatcttcaaaatctttatagccatctatccagctatagcatggtatgtgatagcacttcttcaaagactggaagattcattgaggtcagagataattataatgagataatcagcattcttgaacacgctgataataattcattagttatggccttgcagcaccttgtaagcagtaagttaaccaataatgacatcaatacaatattagggagaaaggaatctctcgagacctacgagaaaatgctcactgagcctgatagttataaggaggcagactggcaacgtttttttgaaaccaatgaatggatttttggttatggcttaaagtataaattcctaaaaattcttcaaagggaagctcacatatcaagaactgatttaaacggcggaaatgatgtaattgctgattttcttatatctgactcaagattcaccaagattgtggaattaaaaacaccaacaacaaaactttttactaagcgacaagggcgctctgatacatggttcttatccagtgaattaaccgacgctgttagtcagattttggcgcaaaaggcaaattgggagattgaatctcagtctagaaattacactacggatggtgaacttatacatgaagatacatttgatacagaatgcattttaattataggttcattatcttcaattgagggtaatgagcgagaaaaactaattaaaagaaaaaccctcgagctttataggagaaatttaaaaaatatagatatcttgttttatgatgagttgcttgagaggtcgcgctacattgtcagaagtgctgaagtaatagaagataagcttctctcagcactgtag

SEQ ID NO: 61681 - DNA, 1410 bp, Klebsiella pneumoniae subsp. pneumoniae WGLW5; identical to SEQ ID NO: 61283

SEQ ID NO: 61682 - DNA, 807 bp, Klebsiella pneumoniae BIDMC 47
atgtatatgactggtcaagaaattaacgataaaaagaaagagtatcttgaattactagatcgagaagagaatgaacagatttatcaaacataccttgaagaaaatacaatgttcataccaagagaattcgagcaaaaccatggaattcacttcagtacggtatttagaaagttgcctctatctagcgattataaacctgatttcgtatatttatcaaaaagctcggataactggaatgtagtattagttgaaattgaaaaaccatcgtcgaaatattttaaaaaaaactctacaacttttcatgcagacttcaatcttgctttgcagcaaatgaacacatggagggcttggtttgatgatgagtcaaacagaaatcactttaaaaacaatatattgcaggggtttattgaaccggcgcacatggggagaaatccgtttaatttcaagtatgtccttgttcatggtcgtagatcagaatatgaaaataatacacagaaaactgcactaatcagagggcaacagcgaagtgacttctcaataatttcatttgatagtttggctgaaaatatagagaaaaaatataagttatatgttggagtgaaaaaaaatagtcactatgaattaatatcaaaagaatttgttgatgaagcgatattttcatggatgaacatagattttttagcaattacacaaagtatatatgatgatgcaatcgcaaaatcagatagttggcatcactatataattaaagaaaatggaaccgtcaaagcaatggattatgctctccctctaattaaaataatttga

SEQ ID NO: 61683 - DNA, 1203 bp, Klebsiella pneumoniae BWH 48
atgaatttaaatgaattttcttcaatatgtaaaaaaaaattggattctcatttcaaaagtgtagaaatgaaagttaagcagggtggtgttcgattcaatggaggagatgtagtaaatcatgttttttatcctacgatgattttatgtattgaatcagataagcgaatattctctatggagctaatcggcgtatctcgtgagagaaaaccacttagaattaaaaaaagaaataacgtttcagtacgggagttaacctcactaagtagagatgatatagctgaagtttttgcatttaaaatgacagggagaaacacatttaatggccttattttttatgatcataacgcatatcaattccatgattcccaaaatcacccgttgcttgagcgctatgatgcaagaatagcattttcacgccatacaacccacttaattgattttcatgttgattttacaacctgcatgctatcggattgtatgattgcatatgttaataatggtttttttagatcaagatatatatatgagatgttcttttcgagtgtaagaactaatgaggatgaacttaggaaagaacttgattattatatgaatagggatgctggcattatttttggggttagatgtttccctagtgatgaagatatatcttgggttaaagcttctcatttaataaatcttgttcttaatgataaaattcatgagaccacaataggtgattatttgaatgatcatcctgaaataatatgcagagcgttagggtatgattccattgtatatgagccaagtttaaagtgggtggagaaaacaaaagataatactgatgtatatataaaccccgacgcgttactcaagcgccctgacggcaattatgatatttgtgattttaaaaaaggtttacttaaaagaaaaaaaatcactaaagatgagcgtcgaagacgtcgcttcattgacgatgttgatgaagggattgctcagcttgataattatgaagagtattttacatatgatggaaataagaagtatgctcttgataagtacaatgtttcaataagtgaaccgcgaaagatattaattatagggaatgttgagaatacggttttaatcgaggttgaacaagctctgagagggcggaaagataatttggttattgattatgattcattaatttcttattacgtgggttcgattggtctcaagtga

SEQ ID NO: 61684 - DNA, 1191 bp, Klebsiella pneumoniae
atggatttaaaagatttctctgttttatgcaagaaaaaattggatttgtattttgagggttttgagcgtgatatgtcaaaaggttatgtaatacataatggcaaggttattaatcaagctttctatccaactatattgttatgcgtcgaatcagataagaaaattctatcatttgaattgcttggctgggttcgggtcaggaagagcctaaggataaagctaaggaataatatatcagtagagcaacttactaaaatagatagaaataaaaataacgctaagccactttttattcttgataatagtgataaagttgtgttttctaatttaatgttcagagatcaagaggtgattgattacttagattcacagggtcatgttatgactgaaaaattttcatctagttttactataggtggggatatttcccacttaatggattttaaaggtgtgtcatcatgcatgttttttaattgtattatttcttacgttaataatcacattctaagggtaaggtatataaatgcattggttatgtttgatgctagattagatgaaggtggtatacttgacaggcttgtttattttattcacaatgaaacggtttttggcgtacaacatttttcagatgaaacagagttgtcttgggttaaagcatcccacctaataagcttggttttaaatgataaaatacatgagacaacaataggagattatataaatgatcatccggatatattacttaaggctttaggttatagtaaaataatttatgagccgaatttggagtggttggaaaagacaagtgataatcctgatttatatatcaatcctgatgcattgttagaaaggaatgatggttgctatgatatttgtgattttaaaaaagggctagtaaaaaggaaaagtatcacgaaaggagagaggagacgacgtagatttatcgatgatgtgggtgagggattagcccagcttgacaattacgaggagtattttacatatgctagtaatgctcagcacgctctggaacgttatggtgtaaaggttaactccccgcgaaaaatattaattataggtaatattgaaaacactaaacgtgttgaggttgaggaggcgttgcgcggacgaaccgatactatagtgattgattatgactctctactatctgcttatattggggcaattaaataa

SEQ ID NO: 61685 - DNA, 1005 bp, Klebsiella pneumoniae
atgagcctgaatcactctttcctcataggctcagatgaatcaagtgagcttatgctaaacatttctggtcttgatgctaatgctaaagaagtggattccttatgtgccaatttctttgcacactgtgctaagactggtacacccaagttcacatgtaagctgacagtacaaaatcttcaaaatctctatagtcacttatccagctatagcatggtatgtgatagcacttcatcaaagacaggaagattcattgaggttagagataattataatgagataatcagcattcttgaacacgctgataataattcattagttatggccttgcagcaccttgtaagcagtaagttaaccaataatgacatcaatacaatattagggagaaaggaatctctcgagacctacgaaaaaatgctcactgagcctgatagttataaggaggcggactggcaacgtttttttgaaaccaatgaatggatttttggttatggcttaaagtataaattcctaaaaattcttcaaagggaagctcacatatcaagaactgatttaaatggcggaaatgatgtaattgctgattttcttatatctgactcaagattcaccaagattgttgaattaaaaacaccaacaacaaaacttttcactaagcggcaagggcgctctgatacatggttcttatccagtgaattaaccgacgctgttagtcagatattggcgcaaaaggcaaattgggagattgaatctcagtccagaaattacactacagatggcaaacttatacatgaagatacatttgatacagaatgcattttaattataggttcattatcttcaattgagggtaatgagcgagaaaaactaattaaaagaaaaaccctcgagctttacaggagaaatttaaaaaatatagacatcttgttttatgatgagttgcttgagaggtcgcgctacattgtcaggagtgctgaagtaatagaagataagcttctctcagcattgtag

SEQ ID NO: 61686 - DNA, 1410 bp, Klebsiella pneumoniae; identical to SEQ ID NO: 61283

SEQ ID NO: 61687 - DNA, 1368 bp, Klebsiella pneumoniae
atgtcagttactatcgagtacgtagcagaattcatttttgcctacatccgcaagtatcgggaagcctatacaaaggcgacaacttctcctcctagaggaccgggctatccggcgattgtgaaatcaccgtttctaaatgcctcgtcgctagatgtctatgtcgcagtcgatggagttgttttggtccaactcggtgacaagccatatgattggaacatcgcgggtggtccggcatttaagatcgactatgagccgacgcgtacaccgccctacgtctcaaagatacttgccgctcatgatctcctaggcaagccaatcggtatttatagaatcgttcccgaatcggaattacccgtgacagtgtggcgaggtgaagttcaaggaatcgaacgagaggaaatccagcatgattcatcaacaggggtttcgcttaatttgagggaggtgagggcctcgcttggtgatgtagtcaatgcgctcacatttggtgcatatggggcaatactaaacgtatacctgccgaccagtgattcgccaattggtgagactcacctaactcgaggtttcgggatgttcccagcagatttatcgacgcgccggtttttcgagtatctggaaatattcggtcattcggattcatgcgcatgggacttgcgaattgtagacctgcgggtgcagcgggatctgagaagagatctcgcgcaggcgatgagtaatcccgatggtaatagcggaattatatcgttcggagacatcccaccttggattgagtcttacggaagtaggcttgagcttctcaagtctgcaatagacgatcttaagtcggctctacagcaacgagatgaagatgttgaggcagtctttcataccttgcttgagcggcatccactgcttctcgacgtgtatgggactgtcgaaagtaagccggggttcaactatcccgatggggttacatcaccgattgggaaaacaaaactgcagcccgattttatcgtccgctacccggatcaatcgtataagcttgtcgagatcgaaaggccagcgaaagctattgcaacatcacagggacagccgcgtgcggaagtctcccaagccgtctttcagacggctgagtggaagcacttcattaagactcactatcaaatcattgcggagcgctatccaggcattcaagctaagtgtaagacggcagttgttatgagtcgatcacggcaagaaaatttcaaaaatattggggatatgcgagcatatatgggcctgatgatggagcaatttaatattgatgagtttttgaccttcgatgatctactcgatcgggcatcgactgcattcgtacagctatcaggcctcggcggatcaatcagctga

SEQ ID NO: 61688 - DNA, 1221 bp, Morganella morganii
atgattgatttcataactactaatacagggattgtatttaaatacgatccagaatcaacaattagatcttgggtttggcatgaattagaaacccattcaactgtaaaaatttctaaagttttttattttgatattagcgatttactcaatcatccgtcccctgatcaagactggggtaattatatttatgagtttcaatttgggaattttgatggtgattatattgttatcccaggttgtattttaaatattaaaaatgatttgtatataagtaaaaatatcaatcttagtcgaaaattttttgctgctgagcgtaatgtttctatttttggtcgactttcacgtatattgaatcatagtaatccaatttttattggtggagatgctacagaggcaatcccttttaatgttttcagtgaactattaagtaaattccctaactcatatgaagtggatagatatgctgatgctagagtacatataattcttgagcaatatttggacggcatgaaagatgccagagggctctacgaagcgtatctcaataaaatagcatcaacgacagcaagtagtctagatttaaaagctatcaatgaactagaaataaacaaatatgctttaattagagatgttattgagaatgctttaagttcgaaaaaggattgctccgaaaaagattggcaaaaactgatggtgcaattccttcttcttttatttccaaagtatattcttgttattgaaaatattacaatccatgattactatagcaatccgggtcagaaaacaaatcgatacatagatataggtttgattgattgtagcggtaatttagatattattgaaattaaaaggccatttgacgatgagattttacgcaggacagagtatagaggaaatagcataccaacgtcagtactaagtggtagtatcatgcaagctgaaaaatatctcttccatttatcaaaatggggaataaaaggtgaagataaccttacaaaaaaatatgggaataggctacccccagggatgagtattcatatttctaaccccaaagctatcatcattgttggacgtgaccagattggcaatggaaatatgacagaaaatcaaaaactcgatttcgaaattatcaagcgaaagtataccaagatgatggacatcattacctacgatgacctcttgagacggcttagccgtacaatttcagcacttaaaaactaa

SEQ ID NO: 61689 - DNA, 1410 bp, Serratia marcescens; identical to SEQ ID NO: 61283

SEQ ID NO: 61690 - DNA, 1410 bp, Yersinia enterocolitica; identical to SEQ ID NO: 61283

SEQ ID NO: 61691 - DNA, 1014 bp, Edwardsiella tarda
atgagcctaagccattcacatatcatcggcagtgatggcgttaatgacctggtattaaatatatcaggtcttaatacgcaagctaaaggtgttgaagacatttctgcatgcttctttgcacattgttccaatacaggtacaccacgctttacatgcaagctaaatattcaaagtctgcaacaacttcacaaatatttatccagttacagtgtgatatcggatgaaacatcattaaccactggtaggtttgtagaagtaaaagataattacaatgagataatcaatattctcgaacatgctgataaccactctttggttatggcgttgcaacatctcgtgagcaataaattaactaacaacgatatcaatacaattcttggtcggaaagaggcgctcgcagagtatgaagaaatgctgaaaaatgcagagaatcatactgaacctgactggcagaaattttttgagcgtaatgaatggatattcggttatgggttgaagtataaatatctcaaaattttacaacgagaagctcatatatcaaagactgatttgaatggcggcaatgatgtcattgcggattttttaatgtcagattctcgatatacgaaaattgttgaactgaaaactcccacgacaaaactttttacaaagagacaaggtcgttctgatacatggttcctgtcaagtgagttaactgatgcagtcagtcaaattttagctcaaaaagcaaactgggaaatcgaaagtcagacgagaaactatacttccaatggggatttgattcatgaggagtctttcgatacggagtgtattctgattattggttcattatcttccattgatggttctgataaggaaagacttattaagagaaagactctcgagctctacaggcgaaatctaaagcatatcgacattctcttctacgatgagttattagaacgttctcgatatattgttcgcagtgctgaaatcatagaggataaattagcgagcacattgaatctaccgtaa

SEQ ID NO: 61692 - DNA, 1014 bp, Aeromonas hydrophila
atgtctgttgatcattcctatgtcattgcaaacgatggcactagcgatgtgcgcgtcaacatttcagggctagatgcagatgaacgcaataaggaagagcttgctgcccatctgtatgcgacatgctccaaaactggaacctcgaaatttacgtgctcactgtctattgaccagttgtctgggctgtacgcctttctaggtcagtacgaaatgatcaaggagcagtcaaagagaaaatccggtactttcgttcaagttgcgaagggtaacgaagagttgattgctatcctgcaagcatcgaatcacgaacaggttatcccggcattacgtgcagtagtgaaggagaacctgtccgatgatgacttaaatactattttggggcgacgagaagcgtgggataaattcaatcaaatgctgaacgatgatccaccgcatacagaaccagaatatcagcagtttttggaacagaatgactggatacttggatatggcttacgctattgctacctgtccatccttcaaagggaatgccgtgtttcaggtaccgatcttgacgggggcaattccgtcatctctgacttcttgctttcagacacgcggttcacaaaactagttgaactgaaacgacccgacaccccgttattcaagaataaacaaaatcgctcagaatcatggcagcttagtgacgacttaacccatgcggttagccaaattctaagccagaaggctcaatggcaaattgaatccacaggcaactgcttcacgggagatgggaaaaggataactgaaaaaactcatgatgtagactgcatacttgtcattggtactagtgggcaatttgctggcgataataaggaggccgaaatcaaaacatcaacctttgaattgtacaggcgcaatatgcgcaatattgaaataatcctctatgatgaattacgagaaagggccaagtttatcgtggatgggtctaacaaggcgattcaggcggacgcctccggcgccgctgatctttga

SEQ ID NO: 61693 - DNA, 1410 bp, Aeromonas veronii; identical to SEQ ID NO: 61283

SEQ ID NO: 61694 - DNA, 1410 bp, Aeromonas veronii; identical to SEQ ID NO: 61283

SEQ ID NO: 61695 - DNA, 1410 bp, Aeromonas veronii; identical to SEQ ID NO: 61283

SEQ ID NO: 61696 - DNA, 1410 bp, Aeromonas veronii; identical to SEQ ID NO: 61283

SEQ ID NO: 61697 - DNA, 1410 bp, Aeromonas veronii; identical to SEQ ID NO: 61283

SEQ ID NO: 61698 - DNA, 1410 bp, Aeromonas veronii; identical to SEQ ID NO: 61283

SEQ ID NO: 61699 - DNA, 1410 bp, Aeromonas veronii; identical to SEQ ID NO: 61283

SEQ ID NO: 61700 - DNA, 1410 bp, Aeromonas veronii; identical to SEQ ID NO: 61283

SEQ ID NO: 61701 - DNA, 1410 bp, Aeromonas veronii; identical to SEQ ID NO: 61283

SEQ ID NO: 61702 - DNA, 1410 bp, Aeromonas veronii; identical to SEQ ID NO: 61283

SEQ ID NO: 61703 - DNA, 1410 bp, Aeromonas veronii; identical to SEQ ID NO: 61283

SEQ ID NO: 61704 - DNA, 1410 bp, Aeromonas veronii; identical to SEQ ID NO: 61283

SEQ ID NO: 61705 - DNA, 1410 bp, Aeromonas veronii; identical to SEQ ID NO: 61283

SEQ ID NO: 61706 - DNA, 1152 bp, Photobacterium phosphoreum ANT-2200
atggataattatgagaacccagttgaaggtaggacatatattagtcctagccttaatcagtttatcggtgataggaaaattagaattgcttcaaaagtgattgaatccccagatacctatgcttttggcatgattaaagatgaaatggtaattcgccacaaaaccgatgctaagtcatatattactgcaaaattttttgaagatacgaaaggtatttttgttctaaatattcagggctacagtgttgcgacagataagcctcataatgcaagcttttcatttgttggtgatgaaatcggcaaactagtcgaattcattagaaatattcaatctattaattttacacatcgtgactcagtaaatattacagacgaagaattaagtcgaatcacattatctgattcgcaggtaaaaaccttgttacaggataaccatgaactattcacggaagtattgcgttctgaaatcacaacgaaggacatagtatctgtagggtatcgcaaaaaacagattgatgtgtttagacgcctattaaatgacgagcagtatttttccaaactaaaagcacagaaaaaaaccaaagatgaagggttgtggcaaaagtattttgaaaaaaatgagtggatatttgggtatgggttaggttatctatttctctctggcttagatgataaaaagcttgagcaagtggttcaaggtcatagtgttgtcaatcatggtaaacgagtagacgctttgatgaaaaccaaaggtatcatttcaaatctctgtttcgttgaaattaaaattcacacaacaaaactgttggatactaagccttatcgagcaggatgctgggctccttcaaaagaactcgcaggagctgttgctcaagttcagggaacagttgcttcagccattgatagcctatcgactaaaataagtttagatgatgcatacggtaaccctactggtaatgaaatatataattatcaacctaaatcatttcttgtaataggcagtctagaagagttttctggagagcatggtgtaaataaagatcagctgaggtcatttgagttgtttcggaaaaacaccataaacccagagataatcactttcgatgaactttacgaaagggctaggtttatagttcatcacaatgaaagttaa

SEQ ID NO: 61707 - DNA, 642 bp, Photobacterium angustum
atgagttttgatgtaaaagcagtgcaagcggggttggatgatgcttttcaatcagactcagaagttaagcttttggaagttttgaaaaacaactcatttctattctctaagatatattctagaaattttggtattcaacctaattttgccgaagttccatttggtactgattatcgctgcgatttttgctggctaaatgataactctgatggtccagagtgggtgcttgttgaagttgaaaagcccaatatgaggctatttaacaaaagtggtgatccgtcagctgaactcaatcatgcattagagcaagtaaagtcgtgggagcgttactttgaaaggtacccagcagaaaaatcccgaatttttggcgctgttagccgatttagatttgtactcatagctgggcgtagagacgactggcaggaaagtgatgccgctttttggcgagcacatcacaataaaactagtaacatagaaatacatagcactgatggtttctacgattctttagatcactacattaagtttgaagaccatttttggagtttcaaagagcacccaaaatctctaccgtcaaaagacttaaccaaaatgtggtcgggttatgactatatgggaacatggcgtaaccttttgacctaa

SEQ ID NO: 61708 - DNA, 648 bp, Vibrio alginolyticus
atgatgtatgagaagttgaagcaagccattgacgaaaaaggggagcgttcagctatgtctggaattaaatcgtgcccttcaacgttattttggacgacagtttcatctggtggccatagcaagtttgtactttacgagtttccgcttggttctaagtatcgtgcggactttgtggtagtttggtcgtgttcgggtaagtgggaaattacatttatcgagtgtgaaaataccgatgatagaatagtaaataaaaacggtactccgtcacaaagattcaaccaagcgatctcacagcttggagactggcgtgattacctttctaataataaacttcaagtacaacaagacttggctaaatggtgtgcggaaaaggatattttaggtttcagttccggcgaatatataagcaatgaaagtggtcaactgctttcagatatggacacgatcgtagacttcaaatttaaaatcattatggggcgcagagaaaattactctactgaagcccgtaagaaagttgcacaactcgagagcacaagtggctttagtttttctacttatgatcgtttactctcctcagctctcgaacatgataagcgttccgaggacagaaatgccagagtcaacttgagtgcaccaaattgtgtataa

SEQ ID NO: 61709 - DNA, 1143 bp, Vibrio alginolyticus
gtgtttgatattccagattttaagcctacagaagacgatgtgattagaaattcaaagctagagactctctataatcacacttttgaaaaaggtaggtttttccaagtcattttctctgacgaaaatgaatttcatattcagcttgctccgcgaacaatgatgagagttgtttacctgaaagaaaaagatgacatcgagggaattaaactatgcaagctagttagcggacaggaaaagcaggttattgaactttccaagttcaatatgcagcagctgaaaacattcttgaactttattcaagaactagatcttaaaggagttgctgagcgacgcattaaactatctgatgactcaatggatgtgttggacgctgaaactaaacagaaaataaccacattactttcaggttctgatggcggtgaagttgtgagagaacttttgtctcaaggaatgatcacaactcaggatctagttaatacaggttaccgaaaatcccaactcgaaatcttcaaaaaattactgtattcaaactatctaccgcagtacaaatttgatattggaaagcccaatacaaaagacgaaactgcatggcagcatttctttgcagcaaaccaatggatatttggttatggtttggattaccgattccaaggtatcttacaaaaagaatttcatgcatcagatactaatgccggtggcagtgagggagttattgccgacttcttaatgggtgacaataaattcacgacatttgtcgaactaaaattacctacaacaccattgttcgggacaacccagaatagagcgcagagttggaagctatcaaaagagttaatggaggcttactcacaaatcttagagcagaaagctagcggtacgttaaaaattgaaacaacgcgcgatttgtatgcagatgattatcgtgaaattaaccagaatgcttacgactcgaaaaccgttctaatcgttggttgctgggagcaagttgatgaagctgctgaacccccaggtataaaaaaaatgaaacgcaaaactcttgaacttttccgtagagattctagaaacgtcgaaatcataacgtacgatgagttacttgagagagcgtcattcatagttttaaatgagcatagtgcaaacaagtag

SEQ ID NO: 61710 - DNA, 957 bp, Vibrio cholerae MZO-2
atggcacaaattaaagacagattagttcggatcattcgtgataaacctcgtgttctaactagagctatattttggaaaattccgcataacacttcagaagatgaagtgtttttgaagattggtcggtacaataaaccaaagaattggcgtgagagtgaaactcttgagctcgatagccctaaaagtgaattaacgctagatagtgaagagtttcacaatttgcttgagtttatctctaataattatgaaccttttaaacaaggtactagagctttcttaccacttgataacccctatgatctttcgaatgctgagcaaattaagcagttgttgaatttaccggataaacggggaatgcttgagttccttttggcaaatgaggttattcctgaagatctagaactaggtttggagcatgctagaaaagctcgggcgctcgatgaatttcaatatcttttagagtctgactttactgaaaatagatggcaaaactggtttgagaaaaatagttgggttcttggtagcgattttgtcaaagtccttgatgaacgagcaatagatacccacaacatttcagactttctgatggaaagttatgatggcttcttggatatagtagaaatcaagcgaccagaaggtaaccttaagttttggtctacagggcttgatcacaataactactatccgagctctgatttaattaaagcgatcactcaatcccagagttacattcatgaagttgagctcgaagctaacagtgttaagtttatggaaagggtaggctatgttaaaactatcaagccaaggtgtacgttaatttacgggcgctcaaatgactggaacaaagagcaacaacaggcgtttcgtgtgcttaatagtagttaccataacctaacgattatgacttttgatcatgtattggaaagagcaaaacgcataatcgggaaacgcggctaa

SEQ ID NO: 61711 - DNA, 1143 bp, Vibrio cholerae MZO-2
gtgtttgatattccagattttaggcctacagaagatgatgtgattagaaattcaaagctagagactctttataatcacacctttgaaaaaggtaggtttttccaagtcattttctctgacgaaaatgaatgtcatattcagcttgctccccgaacaatgatgaaagttgtttacctgaaagaaaaagacgacatcgagggaattaaactatgcaagctagttagcggacaggaaaaacaagttattgaactttcaaagttcaatatgcagcagctaaaaacgttcttgaactttattcaagaactagatcttaaagggattgctgagcgacgaattaaattatctgatgattcaatggatgtacttgacgctgagactaaacagaaaataactacgctactttcaggttctgatggtggggaagtcgtgagagatctattgtctcaagggatgatcacgactcaggatctggttaatacaggttaccgtaaatcccagctcgaaatattcaagaaattactgtattcaaactatctaccgcagtacaaagttgatattggaaagcccaatacaaaagacgaaactgcatggcagcatttctttgcagcaaaccaatggatatttggttatggcttggactaccgattccaaggtatcttacaaaaggaatttcatgcgtctgatactaatgccggtggtagtgagggagttattgctgatttcttaatgggtgataataagttcacgacatttgttgaacttaaattgccgacaacaccattgtttgggatagcccagaatagagcgcagagttggaagctatcaaaagagttgatggaggcttattcccaaattttagagcaaaaagctagcggcacgttaaagattgaaacaacgcgagatttatatacagatgattatcgtgaaattaatcagaatgcttacgactcgaaaacagttctaatcgttggtagctgggagcaagttgataaagctgttgaacctcctggtattaaaaaaatgaaacgcaaaactttcgagcttttccgtagagactctcgaaacgtagaaatcataacttacgatgagttacttgagagagcatcattcatagttttaaatgagcatagcgtaaacaagtag

SEQ ID NO: 61712 - DNA, 957 bp, Vibrio cholerae HE-09
gtggtaaaagttaacggacaaaagttcacagtattaaaagataaaaaaacagtgatcactcgtgctggcatgtggaaagttccgcataatactcgtgaggatgaagtccacttaaaaataggtcgttaccataaaccaaaggaatggtttgaaagtgaagtcgctgaacttgataagccgaaaagtgaactaaccttgactggggatgaatttgttaatttgattagctttattcaagataactatgaaccattcaaaaatggcacaaaagcatttatacctcttgataacccttatgatcagagtgttgctcatcaagtaaagcaactactaaatctagatgatcgtgaaagaatgcttaactttcttattgataacgaagtcattcctagtgatttagaaataggtttagctcatgctaaacgttcacgagcgattgatcagtttaatgctatgttggagctagatcttacagagagtaattggcaagcatggtttgaagaaaattcatgggtattgggtacagattttgtaaaggttctcgatgaacgtacgattgacacggctaatatatccgacttcttgatgcaaagttacgatggatttcttgatattgtcgaaatcaaacgtccagagggtgggttgagtttttggcagtcggcgctagatcatggtaactatattccccactctgatctaattaaagctattacccaatcgtctatttatatccatgaagttgagcgcgaagccgatagtcagaagttctttaagagagttggaggtgtgacggcgattaagccgagatgcacactaatttatgggcgatctaaggactggaatgttgagcaacaggaagcatttaggattttaaactcaagttaccacaacctcacaatcatgacttttgatcatgtgttagaaagagctaaacgtatacttgggcaaaactgctaa

SEQ ID NO: 61713 - DNA, 687 bp, Vibrio cholerae O1 str. 87395
atggagatttggatgttaaaaataagactagcaagcgtagattccatctttgaaaattggcctgaacattggcctaagaaagatcattatgtatcgcagcatgacgttacggaagcgcaatactttgagtttgaatcattagtaaatggtaaggcaagtgaaactgaggttgaaaagtattttgcgcgtaatccggaagtattagctttaacggcttttttgttttcgacaggccaccatgcaacttggatataccctaaactagagttgcgcccttctgcgggtgatgcaaaaggagggatgattccagattacgtcatttctggtgcaaatagtgatggtttgcagtggtttattctcgagttaaaaggtcctcgccaaaacgcttttgttcacaaagggaaaagagtctatctttccgcagattctaataaagggatctgtcaattaattagctacattgatactgcatcaaaatctcaagcatatctgcgtgatgagctaggtcttaaaggttttcgtgagcctaaaggtattattcttattggtacggaaaaagagtccgaagcagaaatggttagagaatttaaagctgcttggaatcggatgcatccgaatgttcaagtaatatcttattctcggctattgcgaaagcttaaacaaaaagtgttcccaaattacggctaa

SEQ ID NO: 61714 - DNA, 563 bp, Vibrio cholerae O1 str. 87395
atttagaaataggtttagctcatgctaaacgttcacgagcgattgatcagtttaatgctatgttggagctagatcttacagagagtaattggcaagcatggtttgaagaaaattcatgggtattgggtacagattttgtaaaggttctcgatgaacgtacgattgacacggctaatatatccgacttcttgatgcaaagttacgatggatttcttgatattgtcgaaatcaaacgtccagagggtgggttgagtttttggcagtcggcgctagatcatggtaactatattccccactctgatctaattaaagctattacccaatcgtctatttatatccatgaagttgagcgcgaagccgatagtcagaagttctttaagagagttggaggtgtgacggcgattaagccgagatgcacactaatttatgggcgatctaaggactggaatgttgagcaacaggaagcatttaggattttaaactcaagttaccacaacctcacaatcatgacttttgatcatgtgttagaaagagctaaacgtatacttgggcaaaactgctaa

SEQ ID NO: 61715 - DNA, 957 bp, Vibrio cholerae; identical to SEQ ID NO: 61712

SEQ ID NO: 61716 - DNA, 807 bp, Vibrio parahaemolyticus 10329
gtgactagtaacaatcgagactaccgattcttaactcctgaagaaacggatgagtgggaaaaagtaaaacaagaagagatcgttaaccctggtagcagggtaaagattaggaaaaatctgttttcaaaatacccgcgagcggctaggcattttcagagtctatttccgaatcagtatcttgatacgatggacctgaaagacaccgacaacattcaattgctgttaaaaggatttatagatttactaaataagtctgacgttcgagaacgagatattttaaattatattaacagtgaaccagcattcttcattataggttctttacttaaaaaatattataactttggtcatcatgctgctcatttatttcgtgaatttccgttaggaacatcatacaaagcagactatttacttgtgggcaaaaattcagatggatggcacttcgtatttgttgagttagagtctccaaatggtagcgttaccaccttaaatggcgacttgggaacagtttttcgaaagggtaaagcacaaatcgaagactgggaattttggcttgaacgaaactacagtgttcttcaagagtttttcaaaaagcataaaaagttggacgatcctcttcctgaagaattttgccatttcgacaggtctaggattaactatgtggtaatcgctggcaggcgtggtgattttaatgataaaacgtatagaattcagcggcaaagtattaggaataatcaaatacatcttattcactatgacaatcttatcgatgctgttgagttacttagtgacagctgcacgtattga

SEQ ID NO: 61717 - DNA, 807 bp, Vibrio parahaemolyticus 10290; identical to SEQ ID NO: 61716

SEQ ID NO: 61718 - DNA, 807 bp, Vibrio parahaemolyticus 10296; identical to SEQ ID NO: 61716

SEQ ID NO: 61719 - DNA, 807 bp, Vibrio parahaemolyticus SBR10290; identical to SEQ ID NO: 61716

SEQ ID NO: 61720 - DNA, 807 bp, Vibrio parahaemolyticus V-223/04; identical to SEQ ID NO: 61716

SEQ ID NO: 61721 - DNA, 807 bp, Vibrio parahaemolyticus; identical to SEQ ID NO: 61716

SEQ ID NO: 61722 - DNA, 807 bp, Vibrio parahaemolyticus; identical to SEQ ID NO: 61716

SEQ ID NO: 61723 - DNA, 807 bp, Vibrio parahaemolyticus; identical to SEQ ID NO: 61716

SEQ ID NO: 61724 - DNA, 807 bp, Vibrio parahaemolyticus; identical to SEQ ID NO: 61716

SEQ ID NO: 61725 - DNA, 807 bp, Vibrio parahaemolyticus; identical to SEQ ID NO: 61716

SEQ ID NO: 61726 - DNA, 807 bp, Vibrio parahaemolyticus; identical to SEQ ID NO: 61716

SEQ ID NO: 61727 - DNA, 1554 bp, Vibrio parahaemolyticus
atgcttagtgagctcagaagagagcttctactagagatttcggaaggagaaaaaaggataggaagttcagaagaaataaaaagttggattttagagcactatcaagccaaccccttagttggtgatatgtataatgcaattttaatgataaaaaaagatttagtttattctgaaggcgatttaccacagcttgcggaatgtaagtctaagatatctcaattggaaacattacctcttcctgagttttgctttataacttctcgtattcaagatgtagaaaaaggagtgttaattcaaagagaagagcttaaaggcgctggtttagtctattctataacaattttcgatagagagtacttaacgaagaaagcagtacgcctagaaattcgagtgtgtaaaaaagaaccagagccatttgtttctctttttaccattaatggctggattcatatatctaaggaaaatatacaatcaaatgagtatgccgtatttgctctccgatgtttaatagcctatcaccgttacgagtatccagtattaacaaaagatttaataattgttgatgaacaagataagcttactgataatgactatttattagatttaatagttaaggctcataaaaatgaaataaaatgctataaagcagaagttccattaaatattattaagccacgtgatattgaatacgcattatctattccgaaagaaagaattcagtcttacattaacaaaatgtgtgattttggcttttctttctctgagttgcttatctatgaagatggtaatgttttcataactgatgacgattatcctgtataccttgcttatgcagcaatggatattagtatggttccagcggtaatattaggtgaatttaagaacactgatgtgaaagttttgtctgagggaggaggagagttgatgcctccgataggtgtcgaagaaattgaagactcaggtattcctattaaaactaaagaacaagctcttagagagaaaatatctagtttatgccccaaaatttctgattctacgaaactggaaaatagatttgttcatttttgtagactaattggtagtagatcgacaaaagaaaaagagctacatgaatttttaaataaaaatccacaaattttagatagtcatatggcctctatgttcagcgaagttagaataggtcgctatagagcagacttagttatacgttatgagcaagtcgacaaaaaagtagtattggttgagctggagcgtcatagtgataaaatatttacgaagtccaaccgtataagaaaaaaagttactcatgcatctcaacaagtggaagactggattaacgaaattagattagggacaaataatgcaccgaaatggttaacgaatcagtataatcctgaaggttttgtcgttattggtcgctcaaaagacctctcagaagaccaaaaacaaattttgttttcattaaatgtgaatcgtaaggtaaagataataacctatgatgatttgttggagcgaatgaaacggcttatgggaatgattggtggcttaaactag

SEQ ID NO: 61728 - DNA, 807 bp, Vibrio parahaemolyticus; identical to SEQ ID NO: 61716

SEQ ID NO: 61729 - DNA, 1554 bp, Vibrio parahaemolyticus
atgcttagtgagctcagaagagagcttctactagagatttcggaaggagaaaaaaggataggaagttcagaagaaataaaaagttggattttagagcactatcaagccaaccccttagttggtgatatgtataatgcaattttaatgataaaaaaagatttagtttattctgaaggcgatttaccacagcttgcggaatgtaagtctaagatatctcaattggaaacattacctcttcctgagttttgctttataacttctcgtattcaagatgtagaaaaaggagtgttaattcaaagagaagagcttaaaggcgctggtttagtctattctataacaattttcgatagagagtacttaacgaagaaagcagtacgcctagaaattcgagtgtgtaaaaaagaaccagagccatttgtttctctttttaccattaatggctggattcatatatctaaggaaaatatacaatcaaatgagtatgccgtatttgctctccgatgtttaatagcctatcaccgttacgagtatccagtattaacaaaagatttaataattgttgatgaacaagataagcttactgataatgactatttattagatttaatagttaaggctcataaaaatgaaataaaatgctataaagcagaagttccattaaatattattaagccacgtgatattgaatacgcattatctattccgaaagaaagaattcagtcttacattaacaaaatgtgtgattttggcttttctttctctgagttgcttatctatgaagatggtaatgttttcataactgatgacgattatcctgtataccttgcttatgcagcaatggatattagtatggttccagcggtaatattaggtgaatttaagaacactgatgtgaaagttttgtctgagggaggaggagagttgatgcctccgataggtgtcgaagaaattgaagactcaggtattcctattaaaactaaagaacaagctcttagagagaaaatatctagtttatgccccaaaatttctgattctacgaaactggaaaatagatttgttcatttctgtagactaattggtagtagatcgacaaaagaaaaagagctacatgaatttttaaataaaaatccacaaattttagatagtcatatggcctctatgttcagcgaagttagaataggtcgctatagagcagacttagttatacgttatgagcaagtcgacaaaaaagtagtattggttgagctggagcgtcatagtgataaaatatttacgaagtccaaccgtataagaaaaaaagttactcatgcatctcaacaagtggaagactggattaacgaaattagattagggacaaataatgcaccgaaatggttaacgaatcagtataatcctgaaggttttgtcgttattggtcgctcaaaagacctctcagaagaccaaaaacaaattttgttttcattaaatgtgaatcgtaaggtaaagataataacctatgatgatttgttggagcgaatgaaacggcttatgggaatgattggtggcttaaactag

SEQ ID NO: 61730 - DNA, 807 bp, Vibrio parahaemolyticus; identical to SEQ ID NO: 61716

SEQ ID NO: 61731 - DNA, 807 bp, Vibrio parahaemolyticus; identical to SEQ ID NO: 61716

SEQ ID NO: 61732 - DNA, 807 bp, Vibrio parahaemolyticus; identical to SEQ ID NO: 61716

SEQ ID NO: 61733 - DNA, 807 bp, Vibrio parahaemolyticus; identical to SEQ ID NO: 61716

SEQ ID NO: 61734 - DNA, 807 bp, Vibrio parahaemolyticus; identical to SEQ ID NO: 61716

SEQ ID NO: 61735 - DNA, 807 bp, Vibrio parahaemolyticus; identical to SEQ ID NO: 61716

SEQ ID NO: 61736 - DNA, 807 bp, Vibrio parahaemolyticus O4:K12 str. K1203; identical to SEQ ID NO: 61716

SEQ ID NO: 61737 - DNA, 807 bp, Vibrio parahaemolyticus; identical to SEQ ID NO: 61716

SEQ ID NO: 61738 - DNA, 807 bp, Vibrio parahaemolyticus; identical to SEQ ID NO: 61716

SEQ ID NO: 61739 - DNA, 807 bp, Vibrio parahaemolyticus; identical to SEQ ID NO: 61716

SEQ ID NO: 61740 - DNA, 807 bp, Vibrio parahaemolyticus 97-10290; identical to SEQ ID NO: 61716

SEQ ID NO: 61741 - DNA, 807 bp, Vibrio parahaemolyticus 3324; identical to SEQ ID NO: 61716

SEQ ID NO: 61742 - DNA, 807 bp, Vibrio parahaemolyticus 12315
gtgactagtaacaatcgagactaccgattcttaactcctgaagaaacggatgagtgggaaaaagtaaaacaagaagagatcgttaaccctggtagcagggtaaagattaggaaaaatctgttttcaaaatacccgcgagcggctaggcattttcagagtctatttccgaatcagtatcttgatacgatggacctgaaagacaccgacaacattcaattgctgttaaaaggatttatagatttactaaataagtctgacgttcgagaacgagatattttaaattatattaacagtgaaccagcattcttcattataggttctttacttaaaaaatattataactttggtcatcatgctgctcatttatttcgtgaatttccgttaggaacatcatacaaagcagactatttacttgtgggcaaaaattcagatggatggcacttcgtatttgttgagttagagtctccaaatggtagcgttaccaccttaaatggcgacttgggaacagtttttcgaaagggtaaagcacaaatcgaagactgggaattttggcttgaacgaaactacagtgttcttcaagagtttttcaaaaagcataaaaagttggacgatcctcttcctgaagaattttgccatttcgacaggtcgaggattaactatgtggtaatcgctggcaggcgtggtgattttaatgataaaacgtatagaattcagcggcaaagtattaggaataatcaaatacatcttattcactatgacaatcttatcgatgctgttgagttacttagtgacagctgcacgtattga

SEQ ID NO: 61743 - DNA, 807 bp, Vibrio parahaemolyticus EN9701173; identical to SEQ ID NO: 61716

SEQ ID NO: 61744 - DNA, 807 bp, Vibrio parahaemolyticus EN9901310; identical to SEQ ID NO: 61716

SEQ ID NO: 61745 - DNA, 765 bp, Vibrio parahaemolyticus 3631
ttgatcaagcagtttgaaaaattatacaacgacaaagcaaataaagaacaagcatatcaatcatttattgaaagtaatcctgaactagtgccaagggcatttgttcaaaatcatggtgtgcatatggacttggtttttcgcaaatttccacttggtacgacatataaatctgactttatgtttctgtccaaaagttcatctgattggagggcagtccatatcgaaattgaagacccaaataagaagatttttacaaaaggtggagcattcacagcagagttcaacgctgcggttcaacaagtccaatcttggattggttggttcaatcataacgctaatcagcaaacgtttgaaaacgatattgctgctgttaaacaaccgcttaattctaaccctaccaagcacaaattcgtcttggtttatggtcgtagaagtgaattagacactcagacgaaaaaagacaacttcgacgcaaaaaaaacggataactttgagttaatgacttatgattcacttttctcaggacgtcacggcaaaacccatatcgcttctttccattcaagaaccgtaaaaattcattgcagctgtgaacttgaagatagctactttggttttgtaaatcctgcagattttgaaatcaatagcacaatgaaaacacaaaagattagtaagttaagtacacctgcaactggtacttttgctagtgtaataaatcaaaatagtcaggaaaatttagctcagtggcaagctacgaagtcgtattaa

SEQ ID NO: 61746 - DNA, 807 bp, Vibrio parahaemolyticus EN2910; identical to SEQ ID NO: 61716

SEQ ID NO: 61747 - DNA, 765 bp, Vibrio parahaemolyticus 3646; identical to SEQ ID NO: 61745

SEQ ID NO: 61748 - DNA, 807 bp, Vibrio parahaemolyticus; identical to SEQ ID NO: 61716

SEQ ID NO: 61749 - DNA, 807 bp, Vibrio parahaemolyticus; identical to SEQ ID NO: 61716

SEQ ID NO: 61750 - DNA, 807 bp, Vibrio parahaemolyticus; identical to SEQ ID NO: 61716

SEQ ID NO: 61751 - DNA, 807 bp, Vibrio parahaemolyticus; identical to SEQ ID NO: 61716

SEQ ID NO: 61752 - DNA, 807 bp, Vibrio parahaemolyticus; identical to SEQ ID NO: 61716

SEQ ID NO: 61753 - DNA, 807 bp, Vibrio parahaemolyticus; identical to SEQ ID NO: 61716

SEQ ID NO: 61754 - DNA, 807 bp, Vibrio parahaemolyticus; identical to SEQ ID NO: 61716

SEQ ID NO: 61755 - DNA, 807 bp, Vibrio parahaemolyticus; identical to SEQ ID NO: 61716

SEQ ID NO: 61756 - DNA, 807 bp, Vibrio parahaemolyticus; identical to SEQ ID NO: 61716

SEQ ID NO: 61757 - DNA, 807 bp, Vibrio parahaemolyticus; identical to SEQ ID NO: 61716

SEQ ID NO: 61758 - DNA, 675 bp, Vibrio parahaemolyticus
atgataaaaataagaccagcaagcgtagattccatctttgaagattggcctgaacattggcccaagaaagatcattatgtatcgcagcatgacgttacggaagcgcaatacattgagcttgagtcattagtaaatggtaaggcaagtgaaactgaagttgaaaagtattttgcgcgcaatccggaagtattagctttaactgcttttttgttttcgacaggccaccatgcaacttggatataccctaaactagagttgcgcccttctgcgggtgatgcaaaaggtgggatgattccagattacgtcatttctggtgcaaatagtgatggtttgcagtggtttattctcgagttaaaaggtcctcgccaaaacgcttttgttcacaaagggaaaagagtctatctttccgcagattctaataaagggatttgtcaattaataagctacatcgatactgcatcaaaatcgcaagcatatctgcgtgatgagctaggtcttaaaggttttcgtgagcctagaggtattattcttatcggtacggaagaagagtccgaagcagaaatggttagagaatttaaagctgcttggaatcggatgcatccgaatgttcaagtaatatcttattctcggctattgcgaaagcttaaacaaaaagtgttcccaaattacggctaa

SEQ ID NO: 61759 - DNA, 765 bp, Vibrio parahaemolyticus; identical to SEQ ID NO: 61745

SEQ ID NO: 61760 - DNA, 807 bp, Vibrio parahaemolyticus; identical to SEQ ID NO: 61716

SEQ ID NO: 61761 - DNA, 675 bp, Vibrio vulnificus MO6-24/O
atgataaaaataagaccagcaagcgtagattccatctttgaagattggcctgaacactggcccaagaaagatcattatgtatcgcagcatgacgttacggaagcgcaatatattgagtttgaatcattagtaaatggtaaggcaagtgaaactgaagttgaaaagtattttgcgcgcaatccggaagtattagctttaactgcttttttgttttcgacaggccaccatgcaacttggatataccctaaactagagttgcgtccttctgcgggtgatgcaaaaggtgggatgattccagattacgtcatttctggtgcaaatagtgatggtttgcagtggtttattctcgagttaaaaggtcctcgccaaaacgcttttgttcacaaagggaaaagagtctatctttccgcagattctaataaagggatctgtcaattaattagctacatcgatactgcttcaaaatctcaagcctatctgcgtgatgagctaggtcttaaaggttttcgtgagcctagaggtattattcttataggtacggaagaagagtccgaagcagaaatggttagagaatttaaagctgcttggaatcggatgcatccgaatgttcaagtaatatcttattctcggttattgcgaaagcttaaacaaaaagtgttcccaaattacggctaa

SEQ ID NO: 61762 - DNA, 1119 bp, Vibrio vulnificus CladeA-yb158
atggggttgttacctcctgaaaatacattagaagacgttaaaatcaagataaagaaagcgtataacaattctaatgtaggtttgattaagcaggttgttctaaaggagggtccgcaagcttttagaatagctacattactagagatactggataaagataaaacagttcaccattattcattaaaaattgatcaaattgaccgctctaagcaaggctggaactataagtccgaaaaatctgttagattagatggcaacaagcctgatgaaataaaaagattatactgttttctggatgctgagtatgcaaaccaattaggctctgagattggtgagttacatcttgtcaattctggtgattttgcgaaactgtctaacttactagatgcagtagagtctataaatgacacagaaaagttttcgttactgggcagtatcatttcgcacatcgaagcgagtcaaactaatgtctctgaatttattaaggcatttgaagtcagcaataaagatactttatcgcatatttctacagcagcaaaaatcgtggagtactctaaagctatcgcagaacttcgtgctttgatagaagatccaaacactttagagggtgattttcaaaagcatctagagttaaacccttggatgtttggtagtgagtatagtcagcgtttgcaacgaaaaacatggacgcgcgatgaccgcttagatttcatgatgcgcaagactgtcgatgattatgttgaaattattgaaataaaaaaggcatttactgagtcactctttacgcatgatcgctctcatgatagttactatccatcttctaagctttcagccgtaattggtcaagttgttcgctatattgaagaaattgagcggcaacgtgattcaataattgttagcgagggtttcgacacacttaaaattcgtgccaagatcatagttggcagagatggcaacatagaacaaatcaaagctctcaggaatttaaactcacatttacaccgagttgaaatcataacttatgatcaacttctgaaagtatctgaacgaatattaggtatgtttgatgtggttgcttcaccgccgcaagatgagcgctgtgaggacataccattttag

SEQ ID NO: 61763 - DNA, 675 bp, Vibrio vulnificus; identical to SEQ ID NO: 61761

SEQ ID NO: 61764 - DNA, 1119 bp, Vibrio mimicus CAIM 602
atggggttgttacctcctgaaaatacattagaagacgttaaaatcaagataaagaaagcgtataacaattctaatgtaggtttgattaagcaggttgttctaaaggagggtccgcaagcttttagaatagctacattactagagatactggataaagataaaacagttcaccattattcattaaaaattgatcaaattgaccgctctaagcaaggctggaactataagtccgaaaaatctgttagattagatggcaacaagcctgatgaaataaaaagattatactgttttctggatgctgagtatgcaaaccaattaggctctgagattggtgagttacatcttgtcaattctggtgattttgcgaaactgtctaacttactagatgcagtagagtctataaatgacacagaaaagttttcgttactgggcagtatcatttcgcacatcgaagcgagtcaaactaatgtctctgaatttattaaggcatttgaagtcagcaataaagatactttatcgcatatttctacagcagcaaaaatcgtggagtactctaaagctatcgcagaacttcgtgctttgatagaagacccaaacactttagagggtgattttcaaaagcatctagagttaaacccttggatgtttggtagtgagtatagtcagcgtttgcaacgaaaaacatggacgcgcgatgaccgcttagatttcatgatgcgcaagactgtcgatgattatgtcgaaattattgaaataaaaaaggcatttactgagtcactctttacgcatgatcgctctcatgatagttactatccatcttctaagctttcagccgtaattggtcaagttgttcgctatattgaagaaattgagcggcaacgtgattcaataattgttagcgagggtttcgacacacttaaaattcgtgccaagatcatagttggcagagatggcaacatagaacaaatcaaagctctcaggaatttaaactcacatttacaccgagttgaaatcataacttatgatcaacttctgaaagtatctgaacgaatattaggtatgtttgatgtggttgcttcaccgcctcaagatgagcgctgtgaggacataccattttag

SEQ ID NO: 61765 - DNA, 675 bp, Vibrio mimicus CAIM 602
atgataaaaataagaccagcaagcgtagattccatctttgaagattggcctgaacattggcccaagaaagatcattatgtatcgcagcatgacgttacggaagcgcaatacattgagcttgagtcattagtaaatggtaaggcaagtgaaactgaagttgaaaagtattttgcgcgcaatccggaagtattagctttaactgcttttttgttttcgacaggccaccatgcaacttggatataccctaaactagagttgcgcccttctgcgggtgatgcaaaaggtgggatgattccagattacgtcatttctggtgcaaatagtgatggtttgcagtggtttattctcgagttaaaaggtcctcgccaaaacgcttttgttcacaaagggaaaagagtctatctttcctcagattctaataaagggatttgtcaattaataagctacatcgatactgcatcaaaatcgcaagcatatctgcgtgatgagctaggtcttaaaggttttcgtgagcctagaggtattattcttatcggtacggaagaagagtccgaagcagaaatggttagagaatttaaagctgcttggaatcggatgcatccgaatgttcaagtaatatcttattctcggctattgcgaaagcttaaacaaaaagtgttcccaaattacggctaa

SEQ ID NO: 61766 - DNA, 1116 bp, Aggregatibacter aphrophilus F0387
atgaagatattagattttgtttttgattttggtaaaccatcatttaatgaaactggaggcttatgtcgagtacgtacatacgtaacgaaagacagtaaacccgttacttttttaactgagttggataaaaatgatggtcaatctgtaacaaatgctgttgaatttattattgataaactaattttagatagaggatttaatgagcatgtttttatagaacattatgaacgagataacgatatattgtttcatgatacttttgatatggtatttattgaaaataagaaacctaagtggaatcagttgagtaaaattgaagttgaaaaccttattggtaatgatgattttactgacttaaaaaatgatagatcatcgaaaaatgaaagaatattaaagcaagctgatagcattagattcaaaagaaatccgtggattgattcgccatatcaaaagaataactcttttattcaaagaaagttatcaattgaaaaacaaatgaaatctaaaaatgatcttatcaaattaattgaaagtaaatgtatagagcaagatattctagcttttctaaagcaagatttatcattttttggagaggtatattctaatcctgaagatgaatatattgtattttccgagtttccaattgaaaatggttcaaaagataaaaatggttctatagattttgttgtatttacaggtcggagtcgaatggatgtaatattaattgaaataaaaggagcgaattttaatttatttaatcaaaatggatattgccaacctcacgcagatatttcgaaagctcaccagcaaatacgagacagattacacgtagcctattacgagagcatgtctagtttcagaaaacaatgtcatatttttagaaatgaagctgaaaatggaaaatcctcatttaaaaattacttagtgggggcggaaggaaaactacaagtagatccaaataaagaaattaaaattcgaacagtaattattggaggtagaacacaagatgaccaaaaagaaagtttggaaaggcataagtttgaaagatcacacactatacctattactttagaatcttgggatacgtggattagaaaattgaaacgagaaaactaa

SEQ ID NO: 61767 - DNA, 1360 bp, Gallibacterium anatis
tagggcggggaggatgtcaaggtcttttggtgactcaagccaacatttaaaaaaggacgtgacccaatataagaaattgcctaatgaagtcagttatgacaacaattcatttaaaatatcgggctttattgcaagtgtaggtaagccttcggaattaaaagataaagacaatgatatttccaataatgctattactattctcgcgaatgggcgcattttccaagaaaatatactggatgaattagataatgcaaaacttttcactagttatcttgtaggtgaaataaatgctgattttttagatgattcaaattatcaagatatggccacatcttctcgtcaaggattacgccaaaacgatgaacgatatttaatattaaaaaattttgtcgctaatgcgcttaaaacagttgattcagactgggacacttggagaaagaaagaaggtttaaaatctatcaaagaaaatcatcctgcgttgcaagaatggcttaatggtttgagagataatcgtgatagaaaagctgcggaagatttgctaagtaaagtaaacacaattcagtttagtggtacagatgaagagcaggaaatatcacgtaagaatgtattaaaaagtgcggtacttgcctttgaaaaattgaaagtgcgtggaaatcttgatcgattgaacgaactttcttcttttgatgctactgtatttaaaccaattctacaatctatagatgatattgaagaaagctatttttatgatgtaacaaagcagcgattaggaattatagaaaagtttgaagctctaacaaacgataatgagaaagaaaaagttattcaagaatatctttatcaacatttgtggctgcttgatccatcttgggaaagaacaacatctgaaacagagatggaaaggacattaactaaagaacttaaagaaattgacccaactagcagtggagcaaggatagatattgcttataaaactatttctggcaaatatattattattgaaatgaaacgtcccgatgtaaaaactgaatttaataagctggttgagcaaggtacaaaatatattaaagctgctaccaagtggtatatcaataatccagcccaaatgatagacggtaagccccctaagatagaggtctattttatcattggagctaaaggtaaaactaaaatagatgaggaaatccaatcatttggacaatacattggtcctaattatatagaggatcaacttcgatcaattggtggtaaagttttcacttatagcgatctgattacccaatcacggcaagtatattctgactacttgaacagtcaaaaagatgttgagagaataaaaaacttggttgataatttataa

SEQ ID NO: 61768 - DNA, 813 bp, Bacteroides fragilis str. I1345
atgattcaatttcacaggaaatataattggattagtttagaaacggaaaattctataattatatctacattagtggaacgttggaaaaatatgttagactctaatttgaaagagtcagcttatcatgaatttattcatgataatgcaggattttttttcggaaatgataattgctatttaactatttcaaaattgaagcttggttctgattatgaaacagacttcataaatgttatagatcagcggagtaatggaattatatacgaacttattgaaatagagaagcctaatagtaaactgtttacaacaggaggtgctcctgcaaaagatttcagtaatgcaatacaacagattagagactggaaacgttttttaatggaaaataaaacatggtttaaaaagtatcttccatctcaaacaacacgagtagtcagcaatccaggagtaatctttacaattatcattggaagacgtacagaaaacagtttggaaatagaaaagcgcaatcaaattgctgatgagctaaaaattaacattcgttcctttgattatttaactgaccttctcgagcgtaggagatttttcaataatgcatgcttagatataaatggtgagctgtggttggagaatcaaatagaaaaccccttttataaagcaataagtgattctaaatggagaaaattttgttcatcaaaatttaattggacccatttctacaaaaatagctgtaaagaaatcgtcaaaatacgtgattacaataatttgattcatgattttcttaataattcaacgtctgaggaaaatgaaatataa

SEQ ID NO: 61769 - DNA, 813 bp, Bacteroides fragilis; identical to SEQ ID NO: 61768

SEQ ID NO: 61770 - DNA, 747 bp, Sebaldella termitidis ATCC 33386
atgactgaaaaagaaattttaatagaaaaattttatcaattacttaattcatcttcaacttctgaaaatgatattcaaacatttttagaaacgaattcttcattaattccattaccttttatacttaaccatgctttaaacggtaactctgtcatttctaaattaaatcttggtaatacttatgtaacagattttgcatacctaactaaaagtactgtaaaatggcaattagtgcttattgaattagaagaatcaaagaaaaaattttttactaaagaaaatttattttctgctgaatttaacagagctttggcacaaattgatgattggaaaatttattgcgataaatacaaagatagaattatgaagcaaactaatgctcttaggaatccattaaacggtaatcctgttgaaattttttatgttttgatatatggacgtaatgaagaataccaaaatgacgaatatcgaagtgcaaaaattgctgaacttgaaaaaaatagtaatttaagagtaatgtcttatgattctcttgtttcagaatttagatataagacagctcattatgaagataaaaataaaataattttatcgcctcgtggagatgaaaaattttctttaaaatatcactctaatgtctatggcagttttttatttgatcgtattgatcctaactatttagaaatccctaaaaatttccattctgaattattaaatcttgggtatgatataaagaaatggctttga

SEQ ID NO: 61771 - DNA, 675 bp, Porphyromonas gingivalis F0568
atggagaaagaggaaaaagagataatgcctacaacttgggacatagcaagagttcgtgccgaacttacaactgcatttgaagaaaattcagaacaaaagttgttatcagtactaaaggataactcatttttattttacgaactttatagccgtaaatatggaattcagcctgtttttcgtgaaataaactttggaggagaactacgctgtgattttgcttggttaaatgataactcagatggacctgaatgggttttagttgaagttgaaaaacctaagatgaaacttttcacacagaagaatgaaccaacatctgaattaaatcatgctatagaacaagtaaagtcatgggaacgatattttgatgaaaatccatccgagaaaaagcgcatatttggagcggttgcacgatttcgatttattcttattgttggagataaagaaagttgggaaactaattttgcttcaaaatggcgcatacacaataataaaaagacaggaattgaaattaggacttcagatgttttttggcgagcattgaaagtcttagaacaacatcctgaagagttttggagttttgcagaacatcctaaaacgatgcccccttcagaattacaaaagtattggagttcttatgattacatcatggatcattggagaaagatcattgattga

SEQ ID NO: 61772 - DNA, 675 bp, Porphyromonas gingivalis F0570; identical to SEQ ID NO: 61771

SEQ ID NO: 61773 - DNA, 675 bp, Porphyromonas gingivalis F0185; identical to SEQ ID NO: 61771

SEQ ID NO: 61774 - DNA, 675 bp, Porphyromonas gingivalis W4087; identical to SEQ ID NO: 61771

SEQ ID NO: 61775 - DNA, 651 bp, Porphyromonas gingivalis
atgcctacaacttgggacatagcaagagttcgtgccgaacttacaactgcatttgaagaaaattcagaacaaaagttgttatcagtactaaaggataactcatttttattttacgaactttatagccgtaaatatggaattcagcctgtttttcgtgaaataaactttggaggagaactacgctgtgattttgcttggttaaatgataactcagatggacctgaatgggttttagttgaagttgaaaaacctaagatgaaacttttcacacagaagaatgaaccaacatctgaattaaatcatgctatagaacaagtaaagtcatgggaacgatattttgatgaaaatccatccgagaaaaagcgcatatttggagcggttgcacgatttcgatttattcttattgttggagataaagaaagttgggaaactaattttgcttcaaaatggcgcatacacaataataaaaagacaggaattgaaattaggacttcagatgttttttggcgagcattgaaagtcttagaacaacatcctgaagagttttggagttttgcagaacatcctaaaacgatgcccccttcagaattacaaaagtattggagttcttatgattacatcatggatcattggagaaagatcattgattga

SEQ ID NO: 61776 - DNA, 981 bp, Faecalibacterium prausnitzii SL3/3
atgagtgaaataaaaacatcggcgaagggagtcgattatgcggatccgtgtacattgcagataaagaaaagagtatattcacaggcactgcttatgcggattccacatgaccatactgatgtgcaggatatttcattgaaaatcggacggtataatattccttacggcctagaaagtaaaaagcctaaaagcgaattgacgctgaataatgaagaacttgatgcgttgattcgttatatttctgagaattataaaccactgatgctagggcagggagaatatataaatgtttcagaggaaagcgcaaccttggtcgagaattttaagcggctaatagaaggtcaaagtgataccgcgcgtatgctgattgaaaatgggattttgtcggataatgtttttcttgcggccagtgttataaaaaagcgcgacgcacttattgaacttcgggaaaaacttcaggaagaacagccggaaagatactggcaagagtggtttacaaggaataagtgggtcctaggatctgattttgcacaaatcattgatgagcgcgtgattgatacagagaatattgcggattacattatgaagtcatatgatggctttgttgatttagtagagataaagaaaccaaatgggttgccgttttgggcgagtacaaaagatcatggcaattatgttccatcggccgatttgactaaagctataacgcaatgtctcaattatatttatgcgattgaattagaagcgaacagcacgaaatttacgagacgtataggaagtagagtaatcaaaccacgttgtattttgatttttggacggtcgtatgactggaacgatgagcaacgagaagcgtatagaattctgaatgcggcgtataatcaagtgtcgattttgacgtatgaccacatttcagagcgggcgcaaaatgtgctgggagcggaggcaatagaaagtgtaggcgatgattggatgcaagaataa

SEQ ID NO: 61777 - DNA, 1149 bp, Desulfobulbus propionicus DSM 2032
ttgccgacagaccatgctgggaatattacaaaaaaaacttccgaatccgagaaaaacccagaagacagaatagaaaaacttgatctcagcaagtggaaagaaaaggagcgccagtttgtcttggatcttgccgatgtattgacaaatccatcaccgaagcgaatcctggaacatgtagacctcgctcgccgagctccctctggtatttatgatgatttttatcttgaaatgccaagcatctattcgcttgtcatatatggggagactggcattcgagaactgctggaattgggactagagggagagtactgggtcccgcacatcttgatatcggtggcattgtcccgatggaatgaaatttgcggaatacttagattcactcaagcttacctcgaagatgatgcatatgagaaccttcaaaatagcgttaccagtttaagtacccagcagcaccttcctgcttatgcggaaagtgcactgacaagtattgtgcatgcatttctttcagatccagagcaacggcataaacttgttgccatttttatgagttcaaaaatggctaaaaggggcgatgatggtccatcaggcattgatatagtgcttaaggccatttccagagggacgctaagaattagtgaaccgatatgtgacgagcttgaaagtttgatagcaaaaaacaggccagagagtgagtgtcagcagttttttgaaaaaaacccagcattaattgacccacttgcttcttcaatagtagatcgtcaatatcttggggcagagtggaaaacagactttgttatacgacgccttgatgacgagtatattttcgttgaaatagaaaaaccacaggaccaaccatgtacaggataccctcatccatcaggtgcattgtcacatgcaattgggcaaattctgaattggtttgtgtggatagaagacaatattgcctatgctcaatctcacggatttcctggaattcacacgccaaagggtgtagtggtcattgggcgaaaggctggaatgaatagtacacagctgagagttcttaaatcatttaatgataacttataccctcgcataaacattatgacatatgatgatgttctgcttaatgcaaggaatattctacataatcttacagatggcctgtaa

SEQ ID NO: 61778 - DNA, 1452 bp, Nitrobacter winogradskyi Nb-255
atggcactcggtttccggcagcacgacccagagcgtgacggcaccctcgaggtcgaggagtatcaccctaattttgtcggggtctacttcgtacccccgaagggcagcttgcttgcggctgggctcgatccgacgcaagcgaagagctaccggaccaagctgctggacatccatggccagtacaaatttctgacgatccatccgatcagcacgttcggcggcaagtccgatttcctgaagccgaaatatggccagatcgagcggatcacgctcgatggcacggacatcatctttcgcggtggcgacgatggcggcgtgccaacgacgcctgaaggcgtgcttgaactcctagaagaactcccctccgccttcaccaaggattacgcctacgggctcggactcgcaaaatcatatcgcttcatcatcgatgcggtggaatcgctgtcggatagcaccgagatcgccatcacagacgatcacgccactggtcccgacccggacggcaatcggattttctatatttcccgcagagacttcgagcaggcgcggcgctgcatcaacagtatcgatagcctcgctcaatcggccgcccgttcggttaaggagacagccacctacaatatcctggcagaacggctcggcgtgccgacgctggatccgaaagcaggcaggcacccctatcgaaagctcttcacggccgtggcgcagggcaaggaggagctctccgaagaggatcaaaacgctgtcatcggcgccctcagcaaccatgccgccagcattgctgaagtccagccggaaaaactcgtaaagctgcgcggcgacatcgaacttgtgacgctcgaagcgctgaccaagcgatatgaggagatgctcggtgagaagcttgtcgagggccgctggcaggtgttcttcaacgagaatccattcatcttaaacatggctttcggctatcccgtcattaaggttcgggaccaggcgtcggttggcggtcgaaagctgtcaggcaacggggagaagattaccgattttctagtcaagaacagcctgaccaacaacacggcgatctttgaaatcaagacaccgcagaccgcgatcctcaacaagacgccgtttcgcgatggtgttttcacgccgtcggccgatctgtcgggttcgatcaatcaggcgctcgatcagaaatatcagtttcaaaagcagattgcccagatcaaggacaacacgcggctctacgacattgagtcctacgccgtgcactgctgcctcgtcatcggaaaaacacctgacggcgatgaccagaataaatccttcgaacttttccggcgcaattccaaggacgtcgagatcgtgaccttcgatgagcttctggaaaaactcaagcaactgagcgtcttcctgcgagttggcgacgaacctgccaaaagccaagaatcgaaaggcaatgccaatggctaa

SEQ ID NO: 61779 - DNA, 1428 bp, Starkeya novella DSM 506
atggcgctcggcttccggcagcatgaccccgcgcgtgacggcacccttgaggtcgaggaggttcatccgaacttcgtcgaggtctatttcgtgccgccggaacatagtctgcgcgcggccaatctcgacccaaagaaagcgaagcaataccggaccaagctgctagacatcaatggccagcacaggttcctgacgatctatccgatcaacactttcggcgacaaatccgacttcctgaagcccaaatatggtcaggtggagcggatcacgctcgacgacacacatatagtcttttcggggttcgatgaagccgtgcccacggaggccgaaggtgtgctggatgtcctggaaaagctgccctcggccttcaccaaggactacgcctacgggctaggcctcgcgaaaccgtatcggttcattatcgatgctgtggaagaactgtcggccagcagagagatcgtcatcgcaagcgatcaactcacaggaccagacgcgaaggacgcccaaattttctatatctcaaagcaagacttcgagcaggcgcggcgcgccctgaacagcattgataacctcgctcagaccgccgcgcgtgccgtgaaggaaacaacggctcacaacatcatcgcagaacggcttggcgtgccaaagctggaaccgaaggcaggccgacacccctatcgaaagctcttcaccgccgtggcgcagggcaaagaggaactgtccgaggaagaccagaacgccgttatcggtgccctgagcagccacgccgcgagcatagccgaagagcatccggaaaaactcgccaagctgcgcggggatatcgagcttgtaacgctcgaagcgttgatcaagcgatatgaggaaatgctcggcgagaacctcgctgagggccgctggcaggatttcttcaatgagaatcccttcatcctgaacatggccttcggctatccagtcatcaaagtacgcgaccaagcctcagttggcgggcggaagctgtcaggggatggggagaagatcactgattttctggtcaagaatagcctgaccaacaacaccgcgatcttcgagatcaagacaccgcagaccgcgatcctcaacaagacgccgtttcgcgatggcgttttcacaccgtcggccgatttgtcgggatcgatcaatcaggcgctggatcagaagtaccagtttcagaagcagattgcccagatcaaggacaacacccggctctatgacatcgagtcctatgccgtgcactgctgccttgtcatcggcagggcgccagatggtgacgaccgaaaaaagtccttcgagctatttcggcgtaattctaaggacgtggaaatcgtgacgttcgatgaactcctcgaaaagcttaggcaattgagcgtcttcctgcgcgttgcagatgctccccaaaaagccaaggactga

SEQ ID NO: 61780 - DNA, 657 bp, Saccharicrinis fermentans DSM 9555 = JCM 21142
atgaaactaccttttgaaaaaactaaagttcccaaaccaaaggatgaaattaaacatcctgaggattatccgttgaaggagttttttactcatcgagatttcttaaaggatggagcaaaagagagttttgtaaaattgattgaagaaaaatctgatgaaaaactaattgataagtttttaagtaaaaaccctgagatatttgaaacattgcttgacacatcaggacaccatggaatttgggtaattccaaaacaacaaataaaaacaagaattggaaacgaaagaggtttaatacctgattttattgttgggggaaaaagctcagatggatttcaatggtgggtaatcgaattgaaaggagctaatgaaaaacttttaaaagtaaacgcacaaaatgaagtttatttcacaattgagggaaataaaggtatttcgcaattgactgagtatattgattactgtcgaaaataccaatcacatttaagagatgcatttaagcttaaggattttagagaaccttcaggtattttggtaattggtaatgaaaatgaatttgaatcagatgaaataaagcaaaatttcaaatctgcgtggaatagattaacaaaacctaatttagaaattcgaacttacaatgcaataataaggaaattatga

SEQ ID NO: 61781 - DNA, 1254 bp, Rhodobacter capsulatus YW2
atgtcactaaggttcaaggacagcttaggccggggcgtggtcctcgaatacgagcccgagagctgggacgcccgatgggtttggacgaagctgcggactgaaggacgggtcaggatcgccaaggtcttccacttcgaacgcgccgatctcctcggtgaaatgccgagcgacgacgacttagacagaatcgacggcttcgtgtaccggttccgcttcggctcgcggcgcgccgggttccgcgtcatcgagggtaggcacctcggcatcgcccacaacgtacgcatcgccgacgccttgcctctggagcggcggctgttcgccgctcaccgcgacatgtccatcttccgcgccctctccgcggtcatgcccaccggtggcgagatcgtgatcggcagcgacgaggaccgctctatacccatcccggagtttgagcggctgctcaccaagtttccgacgacgaccgagctggatcgctatgctcgagcacgtattgcggacgttgttggccagtatgtcgacagcatggctgatgcccggcggcactacgaggagtatatgaaccgccataaggcgatcggcgcgacctgctcgctcgacacccaggagctgctaggggcagagctcgcgaagtatcagctgatcagtgacacgctgcgcggctggctcgcggccgccgaggtcagagtagaacgcgactggcagcagctcctcatgaagttcctgctgctgattttcccgaagtacgtggcgatccttgagaatgtgcagatcgccgacgtatactcgacaccggagcgctcacgtaggcgcttcatcgacattgcgctggtggacgccgccgggaacctggatgtgattgagatcaagcggcctcgcgggtgtctgctggcgggtggcaactaccgcgagaacgctttcccgagccgggagctctccgggacgatcatgcaggtggaaaagtacctgtttcacctgtctaagtgggggctgaacggcgagcgtacgctgacgaagcggtatgcggcaaagctacctcctagaatgtcgatacgggttacgaacccgaaggccattgtgatcctcggccgggatccgacgggcgaggtctggggcgagcaggcggtcgatcttgaggtcgtcaggcggaagtacgcgaacgtaatggacatcatgtcttatgacgatttgttgcgccgcctcgataacgtcatcgcttcgcttcgtaggcggatcgacgaggaaaccgacatctga

SEQ ID NO: 61782 - DNA, 276 bp, Planktothrix agardhii NIVA-CYA 126/8
atgtcaacagatttaacaggagcagttcttcaggtatctaactataaagattctttaatggaagaacgtaaatttttagctgacaagaaaaaattttacgcttttaatcctcaatgcttagtaataacagggaatttgactaatgaaatagatgatgacaaaagaaaatcatttgaattgtttcggactggactaaaagacgttaatattattacttatgatgaacttttcaaaaaagtagaaaatttaatcaaccttattgaaggtaaattttaa

SEQ ID NO: 61783 - DNA, 1239 bp, Planktothrix agardhii NIVA-CYA 126/8
atgacaaaatctcctaacgaatcagaggtaaagaggatgttatcaaagattgtagattgtttacctagtgggaggcgattaatggcgcgtattgatcgttggcaggtgccagaagatctacagcagtatgttttaaattttccatcagatgatcatctttcaagtttggctaaaaaagctccactagatggatttgttgagctagtattaatagaagatcttaaattagatttgcaaaaaacaaaattaggatcttttaaagactgtaaatgttttattccagcattaaacgagtatggagaaagtgtaaatagtacatataccctaatatctaaagtttttgaacctcagcgtagaaatccaggaggtagtgtatataataaagtttattttagagatccagaggataataaatggaaacgtcttaattatcttagaaaacaatataatgcttcacacgaaaatataaattacgaaaatataaatcattttaaaaataggtttaataatattgataaatttgatgatttaagcaaattaattgattggttgaatctagctaaaaatggggctaaaattcttcaacaactaacagaacttaataagcaaaatgttgatcctcttgaaaatcttaatagtttagtaggaattactaacctcaaaaatgtattgaaaatttgggaaaataataaagaaaatcgtttagaatcattttggcaaaaaacttttaaggataacccttgggttttatcaattgtttttaataaccctgtgtgtcttttggaggatcaagcttatgtaggtggtaaaagttttaaaaacaaaggcggtaatttagtagacttcctttataggaactctattactaaaaatgtcgctctcatagagataaaaactccaacagaaaaacttttatcaactaaatatagaaattcttcttataatgtttcctcggaaataactggatcagtcaatcagatattatcatacaaaaaatctttacttcaagagtacacaacattgcagaaaaacactgatgatcgttttgaagtttttaatccagagtgtattattgtcattggaaactatcatgatgaaatagaagataattctataaagaaagaaacatttgaaaattatagaacagaacaaaaaactgtaaaaatcattacttatgatgaattatttgcaaaaattcaaatgttgattgacttactagaaggaaaggatacgaaatga

SEQ ID NO: 61784 - DNA, 681 bp, Anabaena cylindrica PCC 7122
atgaaaggtctagattcctttaaattagaccttaaacagtgtctattagagcttgatgaatttgataaattactgcttaatagtgaattacaagaaagtaaagatatactaccattctttaaggataggctacatttatctgcatttattgggtcttacgttcctgatttagtcagatgcaaccaaattaaacatgaattttccttatttggtgattttcgtgctgatttagtcgttggtgattgtataaataacacttactgttttattgaatttgaagatgctactaaagacagtatatttgtaaatagaggaagaagtacattagattggtcgcctaggtttgagcatggtttcagtcaaatcattgattggttttggaaaattgatgattttaagaaaacgacctcatttctctctatttttgacagtgaaaatatagaattttacggcattcttattataggtagagacgcgtttatctctcttcttgataaagctagattaaaatggcgtttaaacaaggttttagtagactcacgcaaagtaatttgcataacatttgaccaattagccagagatattagagatagactttcactgtatccactgatttatgaagcagaatcagaggctgatcgaattatttccacagatgagagcgattgcacatcaccctag

SEQ ID NO: 61785 - DNA, 900 bp, Peptostreptococcus anaerobius
atggctttatatttattagaaatggagataagaaatatgtttaaaaaaaattataagttaatggataatgtgccaagagaaattgagtgggacaagtattgtcaaaaggttgaagaagaatattgtaaaatattggaagcgtctaataatgaagatgtgctacaaaaattttttgaagagaacccaagtttaattccaggagcacttgagttaattggtcagtctgggcattgtccatatatgggtgcactaataacacagccagaaataggttgtaatattaaacgtaaacctgattttatgtggatggctcaagatagtttaacattctgtcctgtatttatagaaatagaaaaacctagtaaacgaatgtttaccaaaaataaaacaccaagtgccgaatttactcaggctatgaatcaaattgatgagtggaaaataatatttaataaaccagaaaatatatttaatttttacgacaaatacaatataccttcgagtatgagaaaaaaaatatttgagcctcagtatctgttggtttacggtaggagggaagaatacattgatgatgagcaccttactagactgaggaagaaaaaagagaatgaaaacgtagttattatgtcatttgatagattgagaccaatagctgattataagcaatttgtaacctgtaaactggtggacggaaagtatcgtgtagttaacatttcaccgacctttagatacagacctgtttgtgctatgggtttatacaattggataggatttaatgatgtaattgatagtatgaaatacacctcagatgaaagaaaaaagtttttaaaagaaagatatgactattggtactctttcaaaggtaaggttggtggaataatttcaacaatggatgctgagtag

SEQ ID NO: 61786 - DNA, 975 bp, Streptococcus oralis
gtgcttagtagtagagagggtttgaataaagaaataccaaatgtcaaattattaattgaaaaactatctaaaattagtaataagttaaatgcaaattggaataatttacgtgctaatagagatagagaaaaactaaattatcttgataaaatgttaagtactgatagtggattggggaccgcattcaaattttatagcgatgaacagcaaaaacaggttgcaaagcttgcacaaagagtttttgataatgatgaaaaatattcagatgctgaatatagggtttatggacaagcaatctttgcacttgtaaataataaagttataaatgaaattactatagatacagataaggatacttttggagagatcttaaagaagttctatagcttatttgagaaaacggaactaaatgctgctttacgtatgaaatctaatattgaagatcgtattagcattatcaataaactaaaactaattattgacgatgaggaagttgagagtgtttttgaggaacatctagctaaaaatccatggttgattaatcaatattgggataaaccaagtaatgaaattgtgattgaaacacaaaacaaatataaagcaattattcaagaacgtaaggttagtgggagaaccgatattattacaaaagttgcagatgagccttatccaattatctgtgagctaaaaagagagaaagttactgcgtactctacacctgaaatttccgaaataaccaatcagatctataaatacagacgatttattagtgatgaaataaaccgatcaaataatcctttaagaatctcaaatactaaagatataaaagcttattttatttgtggtgagaaatctaaggaaaaactagaagatttagatttaattgaattgaaaaataacaatatcgaattaaaaacatatcaagagattattagacaagctgaaagagtttatagtgatagagtaagagagtaa

SEQ ID NO: 61787 - DNA, 1071 bp, Streptococcus suis
ttggataggatagaactatataaacaaagtaaattattacgaacttttataactggtttggatggagaaacaaaagatgtagaatatagcaatagcgaatcaatatatgaaataataaaagaggtagtatttgattttaaagatggcaaatcattaacgaacttaatagtatacgtttataataaggcaaataaccgtctagaattatcaaatttattggaaggctcctttaaagatgacgatgatataatcagtgaactactgatgtgtaaaatctataatgttcctgttgtgcctaataataagacttctgaaatagaacttctgaggctttataaaaagatgtatgattccggttttgcaatactagatgaggggaaaaagaaaaaatacaaaattgtagatgatcacaatatcttgaactattcgttatatgattccaagattaattactcacaattaagttacgcagattttgaaattcttaaggaaaaattagcaatagacattaggaaatatgattctgcttatattttgattaattacttaaagaatggaattgatgagttagagaaaattttaaatgccgataggagaaacgaaaatgatttacaaatgtgtatatcaaaatatgcggttttatttggaactgaatatattaaggtaattccaaaattcaaattcggcagtgattatgagacagactatgttcttcaaaaaaatgatggattatatgaagttgttgaacttgaggcaagtactcataaattatttacgaagaatggaaatccatcaagtcatctgattcatgcagaacaacaaattttcgattggttcgaatggttagaacgaaataatccatatattcgggaaaatttaaatgatttgtatagtccaacggcatttattgtaataggtaggacaaaggatttaagtgagactgatataaaaaaattgagaaggcgaaatattattttaaaaaattatgtaaaaattttaacatatgatgatttgctaaaaagagcaagggctcttcttgatttgttaactaatgaaagtaaccatagttaa

SEQ ID NO: 61788 - DNA, 1071 bp, Streptococcus suis; identical to SEQ ID NO: 61787

SEQ ID NO: 61789 - DNA, 1575 bp, Streptococcus intermedius F0395
gtgacaggaaagaaaggtctaggtaaattagctgtatttggtattgcaaagactatagaggtatattctataaaagatggcgtgaaaaatgcttttagtattaattatgatgaaatgaaagcagaaagtgaatcagaatataagccaaaagtgatttgtgaaaatgaaaataccaatgaacaatctgggactgtggttaaaatcaaagaaattaagcaaagtacaataatgggtattgaggatttagcatataacttgtccagaagattttcattttatgatgctgagtttgaggttaaactcattgatgaaaattcacaaaaagagcaacctattacaaaatcaatttattttgagaagttagagaaagaatttgaatggaaatttccagaagactttataaatgatattaatagcgtagaagaatttaaaagactaaaagatcatggcattactggaagggtatatactaaatcgactcctttaaggaaaaaggatagtgggtttttactatatgttagaaacaaattggcttcagaaaatgtattttttgatgatagggcaaatgatagatttaatagctatgtaactggattttttaatattgattttatagatgactcagatgaagaggattatatatctacagctagacagtcaatcctttgggaagaaaatgaaagtacaattcaattaaaacatgatttaaataagttgatttcaaaaatatcatctttatggagagaaaataggagaaagaaaaaagaagaacttattactttagatgaatcattttttaagggattaacaccaacagagataagtagtatcaagaaagttaaagatacattattaacaaattccacagaaacagatgatatagaatcaattaaacgtgttttggacaacttaaaaaatttatataaatttgagagctttcagtcatatatagaaaatttgaaagaagagaatttaacggttgatgaagttgaaaaaataacttcggattgggaatatatagaggctaaagagcttgcaaaagttgcagttggtagaataaaagctatagaacaatttgaaaagtatgttaatggaaatgagagtgaatctaaagtaattcaaccatttctagaaaagtttccttggattttagatcctagaattacaacatttgaaagagaaaaaacatatagtagtattttaaaaagtaagtttccagatgaaacactagagggcagtaatcgtaggattgattttctttgtaatttagtaaatggtgaattaattattattgaattgaagagaccgaatattaaaattaaaacagaggaaataaatcaagcattagattataaaatttttgttcaaaaacattataagttggataaagtaacaacatttttgatgtctgacagatatgatatggatcctatagttagaactactgcaaactcattagaacaaagtggtgatttatttattagatcatattcagacttgttaagagatgcaaaaaagtttaatcaagaatttataaataaatacgaagaaattaaagaagtgtatgataattga

SEQ ID NO: 61790 - DNA, 1575 bp, Enterococcus faecalis EnGen0062
gtgacaggaaagaaaggtctaggtaaattagctgtatttggtattgcaaagactatagaggtatattctataaaagatggcgtgaaaaatgcttttagtattaattatgatgaaatgaaagcagaaagtgaatcagaatataagccaaaagtgatttgtgaaaatgaaaataccaatgaacaatctgggactgtggttaaaatcaaagaaattaagcaaagtacaataatgggtattgaggatttagcatataacttgtccagaagattttcattttatgatgctgagtttgaggttaaactcattgatgaaaattcacaaaaagagcaacctattacgaaatcaatttattttgagaagttagagaaagaatttgaatggaaatttccagaagactttataaatgatattaatagcgtagaagaatttaaaagactaaaagatcatggcattactggaagggtatatactaaatcgactcctttaaggaaaaaggatagtggttttttactatatgttagaaacaaattggcttcggaaaatgtattttttgatgatagggcaaatgatagatttaatagctatgtaactggattttttaatattgattttatagatgactcagatgaagaggattatatatctacagctagacagtcaatcctttgggaagaaaatgaaagtacaattcaattaaaacatgatttaaataagttgatttcaaaaatatcatctttatggagagaaaataggagaaagaaaaaagaagaacttattactttagatgaatcattttttaagggattaacaccaacagagataagtagtatcaagaaagttaaagatacattattaacaaattccacagaaacagatgatatagaatcaattaaacgtgttttggacaacttaaaaaatttatataaatttgagagctttcagtcatatatagaaaacttgaaagaagagaatttaacagttgatgaagttgaaaaaataacttcagattgggaatatatagaggctaaagagcttgcaaaagttgcagttggtagaataaaagcgatagaacaatttgaaaagtatgttaatggaaatgcaagtgaatctaaagtaatccaaccattcctagaaaagtttccttggattttagatcctagaattacaacgtttgaaagagaaaaaacatatagtcaaattttaaaagataatttttcagatgaaaaactagagggaagtaatcgtaggattgattttctttgtaatttagtaaatggtgaattaattattattgaattgaagagaccgaatattaaaattaaatcagaggaaatatatcaagcattagattataaaaatttcgttcaaacacattacaagttagaaaaaataacaacatttttgatgtctgatagatatgatatggatcctatagttagaaccactgcaaattccttagaaaaaagtggtgatttattcattagatcatattcagacttgttaagagacgcaaaaaagtttaatcaagaatttataaataaatacgaagaaattaaagaagtgtatgataattga

SEQ ID NO: 61791 - DNA, 1287 bp, Enterococcus faecalis
atgtcaactttagaatttatcaaaaccaaaaatgaattagtttgtaaatattcacctgcttggactgggttagttcctatatcttcacgtataaaaaccgacaaatttgcaacaatcaggagagtattcaaggtcacaaaggacgacctaagaccaagcaaatctgcgtattattataaagacgagtttgctaatattgatattttagatttaattgaccaatcgaaaattgaagatgtagagtttacaattggaactctagataatgagtattatttactagataataatattttagaatttgacaacaacatctatttgcatcaagacttgaaaataactaacaaaacttttcttgcttattcagatatcaacgtattacggaaacttgataatatttcagagaaggatatttttataggagaaatgtcagtatgtgacaatcaacagtctgagtttacgataccagctacggatttctataaattaattaaatcatttccgaattcaactgaagtggcaaagtataattatatgagaattacacaagtaattggcaattatattgggctgaaaaaagactacacttatgactacgaacaatatatgaataaaaaacacagcagtttagctctagataatgaaatagaaaataaagaaatcattaaaaacatatacgaaaacgaatatcagaagtataaatttattcatcaaaaactacaaaatatgattctagaagagagggattatcttgagaaagattggcagagagaaatcgctaagattttacctttaatctttccaaagtatctttcatttttgagtgaagaaacaattagcactgaggagggagaaaagagacctgattttatctttattgatactcaaggaaatatcgatgtggttgagattaagaaatcttataatgtctcagttttagcaaagagcaataagaaatcgacgagaaataactatgttccatcaagggatttaaccatagcaataatgcaaatagaaaaatatatttatcatcttaatcggactggtttaaagtcggaaacaaaaatctgtaatgcgcttctcgaaaagaaccatattgatatgcctataagaattagaaatcctcagggagttattattttaggaagatctaatgaattgaacgaagaacaacagagtgactatgaagtaattaaaagacaatataagcacatagctgatattcttacgtatgatgatcttttgaatagattaaccatgctactgaatcattttgaagataaataa

SEQ ID NO: 61792 - DNA, 1194 bp, Enterococcus faecium 504
gtgaccaaccctttaaaaatagtaaaaaatgaagattttctcatttgtgaatacactccttttacattaaatacatcttttatttttgataaaataagccaagatggatcttatactttaaaaagaacatttagcatctcaaatgatgagatattagaaaaaaaagaagagtatattaaatttatagttggagaaaaagaagattgttattatcatttaaataataaagtattaggaatagaacacaacatttttattcatgaagatatgaagacgaatatatcttcattcatcgctcatgaaaacatatctataatgaaaaaaatagataatataattgatgaagatttatatattggtggcgaaagcggaaatctacctgaaagtgtttttgaagaattgataaaaaagtttcctaataaacatgaattgtatttatattctaacatgagaattggggttctaatacaagattatttattaactaaaaaagaaaatcatattaattatgagaattacatgtcgaataaaaatagaaatactattattaaaaaaaataaagatatagttatcgaaaaaaagatagcagaaaatgagtacttaaaatatcaatatataaaagaaaaactggttaaaatgttagagaacgaaaagttctacttggaaaaagattggcaaaaagaaattgcaaacattcttactcttattttcccaatgtatcaattagttgtcgacgaggttatgatagaaactgatgagggtaagaaaagacctgattttgtttttattgatgtgaacggaaatatagatatagcagaaatcaaaaaatcatataatattcctataatgacaaaaactaaatatagaaataactacattgcatctaaagaattaacaggtacgctaatgcagatagaaaaatatatttatcaccttactagaactgcaaaaaaatctgaggagataataaagaaaaaagtatttaatcaaacgcaagaggcagttgatatttatataagaaatcctagaggaatgattattttaggaagatcagataagttaaatgtagaacaactaagagattttgaaattttaagaagaaagtataaacatgttgccgacattatttcttatgacgatttagttcatcgacttgattctcttttaaagaaatttgaaaatgaaaccatatag

SEQ ID NO: 61793 - DNA, 558 bp, Enterococcus faecium EnGen0039
atgttagagaacgaaaagttctacttggaaaaagattggcaaaaagaaattgcaaacattcttactcttattttcccaatgtatcaattagttgtcgacgaggttatgatagaaactgatgagggtaagaaaagacctgattttgtttttattgatgtgaacggaaatatagatatagcagaaatcaaaaaatcatataatattcctataatgacaaaaactaaatatagaaataactacattgcatctaaagaattaacaggtacgctaatgcagatagaaaaatatatttatcaccttactagaactgcaaaaaaatctgaggagataataaagaaaaaagtatttaatcaaacgcaagaggcagttgatatttatataagaaatcctagaggaatgattattttaggaagatcagataagttaaatgtagaacaactaagagattttgaaattttaagaagaaagtataaacatgttgccgacattatttcttatgacgatttagttcatcgacttgattctcttttaaagaaatttgaaaatgaaaccatatag

SEQ ID NO: 61794 - DNA, 927 bp, Enterococcus faecium EnGen0173
atgaagacgaatatatcttcattcatcgctcatgaaaacatatctataatgaaaaaaatagataatataattgatgaagatttatatattggtggcgaaagcggaaatctacctgaaagtgtttttgaagaattgataaaaaagtttcctaataaacatgaattgtatttatattctaacatgagaattggagttctaatacaagattatttattaactaaaaaagaaaatcatattaattatgagaattacatgtcgaataaacatagaaatactttttttaaaaaaaataaagatatagttatcgaaaaaaagatagcagaaaatgagtacttaaaatatcaatatataaaagaaaaactggttaaaatgttagagaacgaaaagttctacttggaaaaagattggcaaaaagaaattgcaaatattcttactcttattttcccaatgtatcaattagttgtcgacgaggttatgatagaaactgatgagggtaagaaaagacctgattttgtttttattgatgtgaacggaaatatagatatagcagaaatcaaaaaatcatataatattcctataatgacaaaaactaaatatagaaataactacattgcatctaaagaattaacaggtacgctaatgcagatagaaaagtatatttatcaccttactagaactgcaaaaaaatctgaggagataataaagaaaaaagtatttaatcaaacgcaagaggcatttgatatttatataagaaatcctagaggaatgattattttaggaagatcagataagttaaatgtagaacaactaagagattttgaaattttaagaagaaagtataaacatgttgccgacattatttcttatgacgatttagttcatcgacttgattctcttttaaagaaatttgaaaatgaaaccatatag

SEQ ID NO: 61795 - DNA, 927 bp, Enterococcus faecium EnGen0176; identical to SEQ ID NO: 61794

SEQ ID NO: 61796 - DNA, 1143 bp, Bacillus cereus B4264
atgagtgacaaaattaatgtatggacaacatcaagagactctgctgtatgtggtgacattgaattaaaaaaaacatctactactagacttatttttaggcctgaaatagtgaacaataataaaaatcctaaggcatctgttagaggatgctttatctttcaaaagaaaggtagaaatgccctttgggatgattataaggaattagatatgaataagttaaaagcagaggaatggattaaactagagataaactctgatgctatgctgactcttactaaagaaattcagaagcattatgcagtgcatgaaaagtatggggttaggtatggagcatttcaccttttcaaggataaccctgatatcgagaaactgattgaaatgtttgagagtaacactgatttgcttactcaattaatggaggatgacaagagtgaagctctagagaaaacattagaatggattgttacaaatgataatccagataaaataattgacaggcttaaaaatctaaaagagcaagatttagaccaacttaatactcttattgggatagctaatctaaaaaaggtattgtctgtttgggaaagcaacaaactcactaatacctctgagaagttttggcaaagtgtcttaaaagaaaacacttggattttgagtcagattttctctaacccgactgttttgataaatgatgaagcctatgtaggcggaaagactgtcaaaaatgatagtggtaagttagtagatttcttatatgcaaaccctttctcaaaagatgctgtacttattgagattaagactccatcaacgcctctaattactcccactgaatacagaacaggagtatattccgcacataaagacttgacaggagcagttacgcaagtgttgacttataagacaaccctacagagggagtatcagaatatagactataacaattatagacagggaatcaaaactgattttgacattattactccttgttgtgttgttatagcaggcatgtttgatacattaactgatacagctcatagacattcctttgaactgtacagaaaagagttaaaaaatgtaactgtaattacttttgatgaactgtttgaaagggttaaggggttaatcaagctattggaaggataa

SEQ ID NO: 61797 - DNA, 1272 bp, Bacillus cereus Rock1-3
atgtttacattaagtatgcaagataacatgttgttttataggggaaataaggtttctatgggtctctttaatttaagcccgcctatggagggagaatatagttatcatcgcataaataattatgagcatctatttgacgaagtgttagactatattaatgatgatcttgataacaaaattaaaagagaaaaactttctgttttacctaaaggattatgtttgattaaagatttaatgccaactcaatcagaaaatgaagttgaatccaaaggtgttaaacaatcagagaatgaaaccttatttattaatatttctgaactagcaattatacataaatctattgatgtgtcaccaattcctttaaaaagtattatggtaggtaaaaatgatgaaggaaaaacatggtatagtgctaactttcgaattagtggaattgccaaaggaattaatgaagaaataatcgttgataaattaaagaaattctgtgaagagagagaagtactttttgcctctagtaaatcactaatagacgaaatgtataacggtcaaattcaatcatacataaataaagatgttactgtcgaagaggcgttcgcttatggaatagaaaaagccaaacatataatagataattttatttttgcattaattggtttggaagggatattagaggtttgggaatattggaaaaataataaaacgaaagatttaaaggaatcaagctggcaaaaaattttcaaaaaatatccctggttattagcacaatgctttgctgtgccacacattatttttcaagaacaatgttatatcggagggacaacttcagatggaaagggtagtaaatatccggattttgtatatatgacatctcgtactgaaaatatgatgattgtagagattaaaacaccaaaacaagaaataatggttaaatctgggagggataatattttctcgccatccatgtatctcaataaaggtgtagcgcaggttctattctataaagatttaagtctaaaaacttatagtaatacttttatgttaaatcaacaaatggctggtaaaaaaagtgaaatgaaaaatttaaggaatccacgatgtttactagtgattggctcactagataagcttattgaaaaaggtggagaagcagccaagcaaggattcgatttatatagaaatgaacttagatctgtagaaataataacatatgacgaattgtttgaaaaacttgaaattatgatgaaactagtaaggtcgaagtttttttattaa

SEQ ID NO: 61798 - DNA, 1143 bp, Bacillus cereus AH603
atgagtggcaaaattaatgtatggacaacatcaagagactctgctgtatgtgatgacattgaattgaaacagacatctactactaggcttattttcagacctgaaatagtgaacaataataaaaatcctaaggcatctgttagaggttgctttatctttcaaaagaaaggtagaaatgccctttgggatgattataaggaattagatatgaataagttaaaagcagaggaatggattaaactagagataaactctgatgctatgctgactcttactaaagaaattcagaagcattatgcagtgcatgaaaagtatggggttaggtatggagcatttcaccttttcaaggataaccctgatattgagaaactgattgaaatgtttgagagtaacactgatttgtttactcaattaatggaggatgacaagagtgaagctctagagaaaacattggaatggattgttacaaatgataatccagataaaatgattgacaggcttaaaaatctaaaagagcaagatttagaccaacttaatactcttattggggtagctaatctaaaaaaagtattgtctgtttgggaaagcaacaaactcaccaatacctctgagaagttttggcaaagtgtcttgaaagaaaatacttggattttgagtcagattttctctaacccgactgttttgataaatgatgaagcctatgtaggcggaaagactgtcaaaaatgatagtggtaagctagtagatttcttatatgcaaaccctttctcaaaagatgctgtacttattgagattaagactccatcaacgcctctaattactcccactgaatacagaacaggagtatattcagcacataaagacttgacgggggcagttacgcaagtattgacttataagacaaccctacagagagagtatcagaatatagactataacaattatagacagggaatcaaaactgattttgacatcattactccttgttgtgttgttatagcaggtatgtttgatacattaactgataccgctcatagacattcctttgagttgtacagaaaagagttgaaaaatgtaactgtaattacttttgatgagttgtttgaaagagttaagggtttaatcaagttattggagggataa

SEQ ID NO: 61799 - DNA, 825 bp, Bacillus cereus BAG4X2-1
atgaagctttataaagggaaagattatcgctttttaagtgagagtgatcaactagagtatgaaaaaataaaagagtcagaaaaaaaatatccattaacttctggaatattcagtgatattagtgttaataaatttcatgagtatcctaaggcagctagacataatatacatttattcccgaataattatttggatatggtagaactacaaagtcatgacaaaattaaatttatgcacgatgaatttaaagacttattagataaaagtccaactgagcaagaaacattaaattttattaataacaatgagcattactttattattgcttcattatttagttattataattttggtcatcatgaagcttacttgtttaaagagtttcaactaaatacaacatatcgaacggattacttattagtaggaaaaggttctggtggatatcaatttgtatttatagaattagaaagcccgtctaataatccatttaaacaacatggaacagagctgagtcaatactatcaaaatggaattaatcaagtgaaaaattgggaacgccttttacaacaacagttccctagtttacagccaaaatttaatgaggcaagaaagcgcgcaggaaacttaccttcggaatttattaattctgataactctcgtaggcactatgtggtagtagcaggtaggagagagcattatgaacaaaatcctgatgcttcatacgcaattagaagatatgaagaacaaacttcaggcatgaaattgctccattacgataatttacttgatttgacgaagcgtttaattggtagaaaaacattttaa

SEQ ID NO: 61800 - DNA, 825 bp, Bacillus cereus BAG2O-2
atgaaactctataaagaacaagattatcgcattttaagtgagagtgatcagctagagtatgaaaaagtaaaagaatcagaaaaaatttctccattcacttcaggaatactcagtgagattagtgttaataaatttcatgagtaccctaaggcagctagacataatatacatttattcccgaataattatttggacatggtagaactacaaaaccatgacaaaattaaatttatgcacaatgaatttaaagacttgttagataaaaaaccaactgagcaagaaacattaaattttattaataacaatgagcattactttattattgcttcattatttagttattataattttggtcatcatgaagcttacttgtttaaagagtttcaactaaatacaacatatcgaacggattacttattagtaggaaaaggttctggcggatatcaatttgtatttatagaattagaaagcccgtctaataatccatttaaacaacatggaacagagctgagtcaatactatcaaaatggaattaatcaagtgaaaaattgggaacgccttttacaacaacagttccctagtttacagtcaaaatttactgaggcaagaaagcgcgcaggaaacttaccttcggaatttattaattctgataactctcgcaggcactatgtggtagtagcaggtaggagagagcattatgaacaaaatcctgatgcttcatacgcaattagaagatatgaagaacaaacttcaggaataaaattgctccattacgataatttacttgatttgacgaagcgtttaattggtaaaaaaacattttaa

SEQ ID NO: 61801 - DNA, 795 bp, Bacillus cereus
attcatgtgagtatttacggtatttacaatagagattattcgatattaactaaaaaagaagagcagtttttagataatattaaaaagaatgaaaaatccattgcaatacatgaagttatagattatagcgactatcccaaagctgttagacactatgagagtctttttccaaatcactacctagatatatttgacctgaagaacaatcaacaacctcaaaaacaactagaattatttcataaaaagttaaatgacaccaaaacgacagaaagaactcttttaagattttttaaagaatcgaaggcatattttattatcagttctctaatgataaactatggctttggtcaccatgatgcttttatctttccagaatttcaactaggtaattcccatcaagttgatttcctacttgtaggaaaaaactctggcggttatcacttcatattcgtagaactcgaagacccttataaacaaattacgctaaaagatggtgaactaggaaatgcatttaacaaaggtattaaacaaatcaacgattggaagtattggttagaacaagacttccaatccctaagcactgtttttatgaagtgcaaacatccacaaatatcttctttaccaacagagtttttcaaatacgaaagtacccgaatggagtatattgtggttgcaggaagacgagggaattttaacgcaaaaacttacagaacacgcagattatatttacaccaaaataatattgcacttcttcactatgataatttatatgactacgcaataaaaatgatgtag

SEQ ID NO: 61802 - DNA, 792 bp, Bacillus cereus
atgggtatttatgaaagagattattcaaaactaactaaagaagaggtggctttcttagataaaattaagagtgataaaaaattctctacaatacatagagtcataccttatagtacctatccaaaagctgttcgacactacaaaagtctatttccaaatcaccacctagatatatttgaccttaagggaaatgaaaaaccaaaagaacaaatagagttatttcttaaaacgttaaatgattccacaataactgaaagaaatcttttaagattttttaaagaatctagagcatattttattatcggttccctcatgacgaactatgattttggtcatcataatgcttttatttttccggaatttcaattgggcaattcttatcaagtcgattttcttcttgtagggaaaagttctagtggctatcactttatatttgtagaacttgaagacccttataaacaaattacattaaaagatggtgaactaggaagtgcatttataaaaggaatgagacaaacccgcgattggaaatattggttagaacaggacttccaatctttaagcactgttttttccaaatataaacatccccaaatgactttaccaacagagttttttaaatatgatagttctagaattcattacattgtggttgcaggaaaacgagaaaactttaatgaaaaaacgtacagattatctcgaatgagtaaacttcaagataatacggcactccttcattacaacaatttgtacgacaaagcaatagacctgatgaatagagcaacctattaa

SEQ ID NO: 61803 - DNA, 876 bp, Bacillus megaterium
atgtctatttacaagaaggcttatgaattaattgatgatgctcccaaagcattggattgggatgtttacgaaaacatagcaatagaagaatatcaaaaattattgaaacaaaatgggcatgaagaaattgtgtttcaagaattttttgagagaaaccctgcatttttaccgggcgcttttggtatatatggtgaatcgggtcatccaccatataataatgccttaatcactcagccagtattacaaggtttgatgtctaaggtaccagattttttatggattgcttcagatagtggaactatctatccaattttcatagaaatagaaacacctaacaagagatggtttagaaaaaacggtgtaccaacagcagactttactcaagcgcagaatcaacttagtgattggaaaatctggttatcaaaccctgtacatcaaaatcttttttatcaatattatgatattgacagagaaataactagtggtaaagctgttagaccacaatttgttttaatatttggatctagaagtgaatttgatgggaatccagaactaaatcaaaaaagaggacagttggttcgagaaaacgaaatatatatgaccttcgataggctattacctaatattaaagctagaaatagcattacctgtaaggttagaaacagaaaatatactgctaaatttatttcgccatcctttagattaggtccagtatatgcagaggaattgagtaaaatagataataaagaggaagcgattaataattctaaaattgatgatattagaaaagattttatactttctagactcccctattgggaagaatttggccggagacaaccaagaggagtgagaaatacaggagattgggaataa

SEQ ID NO: 61804 - DNA, 876 bp, Bacillus megaterium NBRC 15308 = ATCC 14581; identical to SEQ ID NO: 61803

SEQ ID NO: 61805 - DNA, 876 bp, Bacillus megaterium NBRC 15308 = ATCC 14581; identical to SEQ ID NO: 61803

SEQ ID NO: 61806 - DNA, 981 bp, Lysinibacillus sphaericus C3-41
atgatttttgaagtagatgaagaaggtagaccgcttatttattatgtattttatacatttaatagttcttataacaaccttgagacagcagttttaatgcatactttagtagaaggttcaaaaaatgatatagaccgaggtatacttcatgaattagcaatgtcggtgatttacaatatacctgtatttcctaatcatgagaaattagaagaggaattaggcttttattacaatgaattatatgaaaatggttttgaaatgatagataaagatgaaaaagtgaaaaaatataaacttgctgagcatttgattcctatatttaagagtgaaaatgaagagttattaaaagaaaaaacaactaggatatattcatcggctgaaataaactactataagaataagttaatggaaaaattaaaggaatatgataatgcacaatatataataaataaattaaaagatggaattaatgaattgtcagtacagttaaatagccctgaaagagaagagaacaaaattcaagcaatattaacaaactatccaattttatttggaacagagtatattgaagtattggataagcataattttggttctgagtatgaagctgactatattttgaaaagatacaatgggctttatgatattgttgaaattgaagcaagtactcttgatatctatactaaacaaggaaatccttctaggcatcttgtgcatgcagagcaacaaataatggattggttacaatggattgaacataataacccttatgcacgagaaaaaataaaaaaactgtattcaccaaaaggttatgtcgtaattggaaggtcaaatactttaacggaaactactagagaaaagctaaggagaagaaacttagtttttagagataaaatcgaaattattacatatgatgacttattagaaaacgctaaattgttattagactttttgagtggtaataaaattgaaaacgagtaa

SEQ ID NO: 61807 - DNA, 1152 bp, Lysinibacillus sphaericus CBAM5
ttgagcagattagacttatataagaaaccaattttattaagaacttttattacaaatgatgacgaacaaagtaatgaagcatatgatacttattcacgtaaaatagaaacggctgaaataaataaaaataaatttaatgaggacaaggatttttatcatattattaaagaaatgatttttgaagtagatgaagaaggtagaccgcttatttattatgtattttatacatttaatagttcttataacaaccttgagacagcagttttaatgcatactttagtagaaggttcaaaaaatgatatagaccgaggtatacttcatgaattagcaatgtcggtgatttacaatatacctgtatttcctaatcatgagaaattagaagaggaattaggcttttattacaatgaattatatgaaaatggttttgaaatgatagataaagatgaaaaagtgaaaaaatataaacttgctgagcatttgattcctatatttaagagtgaaaatgaagagttattaaaagaaaaaacaactaggatatattcatcggctgaaataaactactataagaataagttaatggaaaaattaaaggaatatgataatgcacaatatataataaataaattaaaagatggaattaatgaattgtcagtacagttaaatagccctgaaagagaagagaacaaaattcaagcaatattaacaaactatccaattttatttggaacagagtatattgaagtattggataagcataattttggttctgagtatgaagctgactatattttgaaaagatacaatgggctttatgatattgttgaaattgaagcaagtactcttgatatctatactaaacaaggaaatccttctaggcatcttgtgcatgcagagcaacaaataatggattggttacaatggattgaacataataacccttatgcacgagaaaaaataaaaaaactgtattcaccaaaaggttatgtcgtaattggaaggtcaaatactttaacggaaactactagagaaaagctaaggagaagaaacttagtttttagagataaaatcgaaattattacatatgatgacttattagaaaacgctaaattgttattagactttttgagtggtaataaaattgaaaacgagtaa

SEQ ID NO: 61808 - DNA, 1152 bp, Lysinibacillus sphaericus CBAM5; identical to SEQ ID NO: 61807

SEQ ID NO: 61809 - DNA, 1152 bp, Lysinibacillus sphaericus; identical to SEQ ID NO: 61807

SEQ ID NO: 61810 - DNA, 1152 bp, Lysinibacillus sphaericus; identical to SEQ ID NO: 61807

SEQ ID NO: 61811 - DNA, 876 bp, Bacillus subtilis subsp. inaquosorum KCTC 13429
atgagtatttttttaaaatcatataatcttgtaagtgattcaccagaacctctcaaatgggaagattatgaaaagaaagtgttagatgactatagaatactactccaacagcaaagtgaaaatgaaaaagtttttcaagattttttcgaaaaaaatcctgctatgctacctggagcctatggtttttttggagaatctggtcacgctccgtataacaacgttttaatcacacaaccagtattacagggtttgattacaaaggttcctgattttttatggattgcttctgatagtttgaatatctatccaatttttattgaaatcgaagctccaagtaaaaaatggtttaatcaagatggtactcaaactgctaagtttactcaagctcaaagtcaaatacaagattggaaaacatggtattcaaatcctatacatcaatctattttttttcaatactatgatattgataagaaaattatagagggaaaatccgttaaacctttttatgtgttgatatatgggttaagagaggaatttgaaggtaagccacacttaaatcaaaaaagagcacaattaaataaaagcgatgagatatttatgacttatgatcgtctcactcccaatataaaaggaagggatgtaattacttgtcatgtgaaaaatcgtgattattcagcaaaatatgtttccccaacttttagactaggacctgtatttgcagaggaactaaatataattaacaataaagaggaagctattttaaatactgatctaactgatgaaagaaagaagtttctaatttccagacttaagtattgggaggactttggtaaaaagaaaaataaaggattgataaatactggtgactgggaataa

SEQ ID NO: 61812 - DNA, 1230 bp, Bacillus subtilis
atggagagaaaagaaatatcaacattgaaggatgttgctaattcgttgataacaatgcttaagaataaatatttcacaaaattattgatgtttctagaattaaatcctgaattaaaaaagaattttacaaaattcttagtgaacccagagaaagtaatattatacttaggtaaaactcattggggtgtagagtatataggaaatgttaattctaaagaaattagtttgaatcataagtttgagtgtcagttctcagactattcaacaggagataatcttttaacagatattttaggcattgattatagtaaacaaacaggtccagtactgccattaccggagtataatgttgatttggttcatcctaccaatgaagccatggacatcatgttaaagaatggatggaatttagatggtcagtcaatgataataggtctcaatgcaggcgaatttgtattacaggaaggtatgtgtcatagaatagttaatggtttcttttatggaactaacaggtctggcttagttaccagaaatgtaaaatggttagatttgtttccactacagttagatgatacagacgtagaagtagatacatttgaattttatatgtggcccaatatttcagatgtcataatacatgatgtccactttcaataccctcttccttctggatatagagaagaaaaatggtatagtttaaatcgctttgttgagttgattagttctaaggatacgagtgaactccaaataactgcttttctagctaagcctgaaaatcagtttatattaaaaatggcttttatgggtaaaaatatatattctgaatgtgaattagaatggcaatcagtagaatgcaaagcaattagaccagatttttttgtagaaggaccaaatggttattcggatattgttgaatttaaattacataatttaaaaaatacaaaaagcatagtggggcgggagaatagagaaaccttcagcgcggagattaattcatatattagtcaaacaagaaactatgaggagtattttgaggaccctaaaaatagagagtttgcggaagaacagcatggaataaaagttcattatccgaaaagaattttggtaatgggaagaagatggatgctagataccccagattggagaaagttagaaaatgattatagaaacatcatgtttaaaacttatgacgacattatagatttagttttaagtcatttatattcataa

SEQ ID NO: 61813 - DNA, 1119 bp, Bacillus subtilis subsp. niger
atgaagtattctatttctccaacatcaaaagattcagcttttggtgaggatattatactaagagagaaatcaactaccagattgttatttagaccacaaattattaataataagcataacgaggaagcctctgttaaaggttgttttatttttcaaaagaaaaggagtagtgaaaattgggaagatcataaagaacttgatttaaacaaactaaaagcaaccgaatgggttaaacttgaaatcaagtcggaggaaatgcttaaacttataactgagttagatatgtattataagatccataaagaatatggaattgagcctggtggaaggaattatttaaaaattaataatccaagattagaaaaaattatatcattgtttaaagaagacaatagcctttttgaggccttattggacgaagatacagaacaattgttaaaacaaacagttaaatggatggtaagaacaaaaaattctgaagagattatatccaggttgttagaagttcaagaaaatgagctagatcaattaaataatctgatcggaataactaatattaaaaagttactatctgtttgggaagcaaataaggataatgtagatgaagaattttggcaaaaaatatttaaagataatgcttgggtattaagccaagtctttgcaagtcccttattactctttgatgaaaaagcatatattggtggaaaaggattaggtaacaaaggtgggaaggttgttgattttatttttcaaaatgatatttcgaaggatgtagctttaattgagatcaaaacacctaatactaaaattctttctggtgagtatagacaaggggcttattcaattcatagtgatttaacaggggcaattgttcaggtgcttgcttataaagaacagcttcaaagggaatatggaagccttttgttaaattctgaaagtgattttaaggtatttaaccctatttgtgttgtaatcgcaggcaagctagatgaattggataagaccaggttacagtcctttgagttatatagaaaagaaatgaagaatatacttataattacttttgatgaactttttaaaaaagtaagtttgttacttcaattattgtcagacaaataa

SEQ ID NO: 61814 - DNA, 501 bp, Bacillus subtilis
atgaattattctatttctccaacatcacgagattcggcttttggtgaagatattatattaagagaatcatcaactaccagattgttatttagaccacaattaattaataatgcgcataatgagaacgcatctgttaaagggtgttttatttttcaaaagaaaaggagaagtgaaaattgggaggattataaggaacttgatttaagtaaattaaaagcaaccgaatgggttaaacttgagatcaggtcggaggaaatgttgaaacttgtaaccgagttagatacttactataaaatccataaagaatatgggattgagcctgggggaaggaattattttaaaataaatagctcaagtttggaaaagattatatcaatgtttaaagaagacaaaagcctttttgaggctttattggatgaagatagagagcaattgttaaaacaaacagttaaatggatggtaagaacaaaaattctgaagagattatatccagattattag

SEQ ID NO: 61815 - DNA, 1119 bp, Bacillus subtilis subsp. globigii; identical to SEQ ID NO: 61813

SEQ ID NO: 61816 - DNA, 1026 bp, Amphibacillus xylanus NBRC 15112
gtggatggtaaagatatacaattattagaaattaaagaggccagatctggaaacgtatcctataccaaaccagttgttatccatcaatcatctagaacaaaagttacagtagttccgttttatatagataggagctcaggtaaggagctatctgtaaagatattaactcaaacaaagggaaaaccacctatggattggttattagtagatgaaaaatcaacaagcctaaatgcagaagcaactctctctttatatagtagcttgaaaaagtttctagcattatctgaacaggaagagaacggagaatacattattttaaaaccagcaaatgaggaacattcatttggtaatcatggaccggaagaaattgcacaagctatcttaggggtattaaatagacctgaaattgcaaaacacttagtagataaagaattaagtaatgaattaatcacggcctttaggagctcaatacgcctgcaggaactacgttcagcagttgcacaattaagacaatatctagaaagtggtattaaagatgaacaaaagtatcagcaatggtgtgaggaacacccttgggcatttggaaactcttttgtagtaaatgatgatgtaagagcgatttccgcatccgataaagttgatttgatgttgcctactgttataacaggatatagagacttagtagaactaaaaagacctgacatggaagtgttaaattacgatagttctcataataactactactttacttctgaagtatcaaaagtaataggtcaatgccatagatatttagatgtatttcaggaagaagcagctagaggattgagagaccatccggaaatcgttgcataccatccaaaagcaactattgtaataggacgttccaatgactggactaaagaaaaacacagagccttacatggcctaaatagtagactaaactcaataactattattacctatgatcaattattagcgcaaggtgaaagaatgatagatatagtaagtgagggttataatgaataa

SEQ ID NO: 61817 - DNA, 1119 bp, Bacillus atrophaeus 1942; identical to SEQ ID NO: 61813

SEQ ID NO: 61818 - DNA, 1119 bp, Bacillus atrophaeus C89; identical to SEQ ID NO: 61813

SEQ ID NO: 61819 - DNA, 1119 bp, Bacillus atrophaeus subsp. globigii; identical to SEQ ID NO: 61813

SEQ ID NO: 61820 - DNA, 1119 bp, Bacillus atrophaeus; identical to SEQ ID NO: 61813

SEQ ID NO: 61821 - DNA, 792 bp, Clostridium botulinum F str. Langeland
atgaacttatatgaaagagattatgaaaaaccttcaacgaaagagttggaggtaattagagaacaagacgagtttaataaaataggcatagtttctccagaacatgttgatcccataaataagtacagtaaagaaattagaaattttgtatatcattatagaactaagtttccaaataacgttatttggtctagagaattaaaccacgaagaatcaaaaaaagaatcagaagcttttaaaaaagtacttgataactcgaaaagtgaaaatgatatacagacatatataaaatctaataaaaagtggttcattccagcatcaataataaaggagtataactttggacataaggagaactatttattccctgaaatgatgttgggcagcaagtacaaagttgattatgtaatatgtggtcgtaattctgatggatatcatcttttactcattgaatttgagaatgcaaatactccatttatcaatcaagatggaaattgtgaaagcaaaagtgttaactcaggctatggacaaattaagaattggaaaaattggatggatgataaccgacagttatttttaaatgaacatgaatttactgaaaagggaatgtcaatccctatttctcaaattcaatattgcttagttgtaagtaaacgctcgtatatggatagctctgctagggagcgtaagaataggttgatatatgaagttaataacctaaatatcattaattatgatcgagtttgtgattatattgaacagcttgggcatggttattgcacaatgttttaa

SEQ ID NO: 61822 - DNA, 681 bp, Clostridium botulinum E3 str. Alaska E43
atgattaaagagtattgttataaagaaccagaggaatggactaaaagaagaaatacgataagaaaaaatcagattccaatagaaacgattgcaaatttagttggggatggtgctaatgaaagagaaattcaaaaagttataaaaaaggatttatcatttttagctgattatttacaatcaccaatagatgaatatatatgtttatcggaattaccaataggtgataatgtagtagattttgttgtattaacatcacgttctagaatgttagtatatttaattgaaattaaaggagctgacttttttacagtaaagtccaatcattacaaaggtatgaatagtcatattcatgatgcagtaaatcagattggaaaccatattagttatatagaacaaaattatgaaacattcagaaaatatattcatggtattagggaacaagtaattaatggggattataaatcaaattatttattaggaccgaaaggacatttagaagtagatcaaaataaagacattgaaatagaaacaatagtaataggtggaaagtcaaaagaggactatactgatagcaatgaaagaactagatttgaaagtaagaataagtattggttgcatgtttattcttgggaatcctttttaagaaggattgataaggttcatggacattattttgaataa

SEQ ID NO: 61823 - DNA, 585 bp, Clostridium botulinum F str. 230613
atgaacttatatgaaagagattatgaaaaaccttcaacgaaagagttggaggtaattagagaacaagacgagtttaataaaataggcatagtttctccagaacatgttgatcccataaataagtacagtaaagaaattagaaattttgtatatcattatagaactaagtttccaaataacgttatttggtctagagaattaaaccacgaagaatcaaaaaaagaatcagaagcttttaaaaaagtacttgataactcgaaaagtgaaaatgatatacagacatatataaaatctaataaaaagtggttcattccagcatcaataataaaggagtataactttggacataaggagaactatttattccctgaaatgatgttgggcagcaagtacaaagttgattatgtaatatgtggtcgtaattctgatggatatcatcttttactcattgaatttgagaatgcaaatactccatttatcaatcaagatggaaattgtgaaagcaaaagtgttaactcaggctatggacaaattaagaattggaaaaattggatggatgataaccgacagttattttttaaatga

SEQ ID NO: 61824 - DNA, 681 bp, Clostridium botulinum; identical to SEQ ID NO: 61822

SEQ ID NO: 61825 - DNA, 681 bp, Clostridium botulinum; identical to SEQ ID NO: 61822

SEQ ID NO: 61826 - DNA, 792 bp, Clostridium botulinum; identical to SEQ ID NO: 61821

SEQ ID NO: 61827 - DNA, 1077 bp, Peptoclostridium difficile T15
atgaaaataaatgattttatatttagatttaagtatagaaatgatgaaaaaagtttatgtagagtaagaacattcttaggaagagagaataaaataattaacttaataacagatttagaagatttaaatatctcaaaagtaagtttaattaattccattgaatttgcttgttctgaattgatagaaaaaaatatgacatgtgaagatgctatatttatagaacatacagagtcagaaagtttagaagaacagaaatttgatatggtaacctttaatcctagaggaggacctatttggaaaaatatcaatataaacgaagtaaaaaaaattttaaattgtattgatgatgaacttataaatacaacaaaaaagaataggaatttagttgaaacaatagatagaattagatatagaataaatcctgaaactgattttttatataaagaatcgccagaagtaattaagcgaaaattagaaattaaagaaaatagaattagtaagagtaaactagaagatttaataaaaaatagatcaaaggagcaagaaatagctagattattgaaatcagatttatctgtatttggagaagtatattcttttcctaaagatgagtatatatgtttttcagagtatccaatttatgataggtatatagattatgttgttataaccggaaggtcaagaatgcaagtatatttaattgaaattaaaggagctgaatttaatttagttaataaagatagcaaatttaatgagaagattaatgaagctgacagtcaaatatctagaactttaggatatatatttagaaattatatggcgtttaaagatgatatacacgaaaaaagaagattggttgaaaaaggagagaaaatattcaattcatttagagggccaattagcaaattagaagttgatagacaaaaagatataactattcactcagtaataataggtggagtaacaaatgatgatattaaagaaagtagattaagacatgattatgaaaataagaatgacttcaggataaaactagaatcatgggatacatttataagaaaattaagtaatagatag

SEQ ID NO: 61828 - DNA, 753 bp, Peptoclostridium difficile E9
atgaaatcaatacatactttcgatgtttttgctcctactgatgaacaggaagaagcaatgaataaaaaacgtggcgggcattacaggcgcggtaaaaacaaagaaatggattactttattgagtgtgctacttcgctatttcccaacaaccattattcaaggttcacacctatatatgatacgacaaaagagttttatcaactgattacttcttccgatacaacagaaagagctatactaaattggatagcttctaatcgtgcatggaattatttgtttggcttattacggcattattacagaacaggacaccatgacgataattatatctttccagagttcaaaatcgggtcggcttatgtggctgattatctgctcataggtaatagttcagacggttatcaatttgtctttgtggaattagaagctcccaacgggcggataacaaaagaaaaaggtactcgtttcggggaagtaatcaataaagggattgaacaggttagggattggcaaatgtatattgctgcaaattggaatgtaattgtagcagaattggaaaagcactcattctccaatacaaagttacccagacaattatacaaatattgcccttatcaaatctactatgctgtgatagccggactccgtaaagattttgagaatattcgtgatagaaagctccaactgcaaaatgaaaataacataacacttttgcattacgaaaatctcatagatgttgcaaacgaaaattaa

SEQ ID NO: 61829 - DNA, 858 bp, Clostridium pasteurianum DSM 525 = ATCC 6013
atgtatgatgaaaaagaaaaattaataacagagttcaaaaaaatgctagacgatgtaaatacaaaagagaatgatatacaagaatttattgaaacttattcacaattaataccaacaccatttttattagggcatgccttacattttaatagtgttatatcgaagtttaaactttcggatagttatataacagattttgcatatatgactaagtgtacagactattggaatttagttttaattgagttagaagattctcataaaaaaatatttacaaataataaaaataatacttattttcataatgagttcaatcatgcttatgatcaaattacttcatggaaaaattacatagaacaaaataaagaatgtgtattaaaaaaaataactaaactaaaattgccaataaaatatacaccaataagaataaaatatgtattaattataggaagaaatagtgataagaatactgaggaaaaaataaacatgtttgcacagaagagtaatgatgacgttaaagtaatgacttatgatagtattatatcaatgtataagcatttggaggtatctataaataaaatggttttatctcattggaagggaggatttaaagttaaacatgttccagataatcttgacacaagtatatttgcatctgtaaaaccagaatatttagatattggtacagaaaatacaaaaaaactaattgctcaggattatcaaatagatcgttggagacgaggatatccattaatgtataattccaaatatgatgctaaaacatataaagaaaaagctactaatattttggcaaaagttactgttacagatgatgaaatcgaaagaaagtttgactaa

SEQ ID NO: 61830 - DNA, 858 bp, Clostridium pasteurianum DSM 525 = ATCC 6013; identical to SEQ ID NO: 61829

SEQ ID NO: 61831 - DNA, 858 bp, Clostridium pasteurianum DSM 525 = ATCC 6013; identical to SEQ ID NO: 61829

SEQ ID NO: 61832 - DNA, 858 bp, Clostridium pasteurianum DSM 525 = ATCC 6013; identical to SEQ ID NO: 61829

SEQ ID NO: 61833 - DNA, 846 bp, Clostridium sordellii
atgaatttgtataatgatagagattataatcatattacaagtgaagaaattaaatgtttcaaggagataaagcgtttagaaaaaataggtcctaatggaaatcctctcccaattggtatcaaaaatatgtatagagattaccctaaggctgttagacataatttatcattatttcctaataatcttctagatatagaagaattgaagaaagaaaaaacattactaaatctaattggagagtttgaaaaacttcttgaattagatgatacaactgaaaggactgttcttaaattcatcaaccaatatggaaattatcatctaatcgcatctatactttattattataatttcggacatcatgatgcttatcttttccgtgaatttaaattaggtacaacgtatatagtagattacttgattataggtagaaactctggtggatatgagtttatatttgtagaactccaggatcctaaaaaaaatataactaagaaaaatggaacatttgggagtcaaataagagacggcttagatcaaattgatgattggaaaagatggttagatcaaaactattccacattatatgaaagctttaataaatataaaaataaaaatatacatgaactagataatataattcatgtattaacagatgaatttcttaagtacgatagtacaagaattcatttcgttgttgtagctggaagaagatctgactttaaattaaaccaagatattacatattcactaaaaagaggtttaaagaaagaacgaaatataaatttaattcattacgataatttaatagaattatcaaaaaatctaattggaaaacaaacttattaa

SEQ ID NO: 61834 - DNA, 1080 bp, Clostridium tetani E88
atgaagatatcagattttatattcaaattttcaactagcacagtttcaaaccgtgatggtttatgtcggataagaatttttgtaggggacaataaaataatcacattaataactgatataggtaacttaaatccatctgagtcagtaacaaattcaatagaaaagataaggttattattgatacaaaaaggactagttaatgaaaaatcaatttttatagaacattatgagaaagaaaagtttagtaatgcaagttttgatattgtagaatttcatgacaatgggagtcctagctggtatcctataacaaaagaaaaattaaaagaattattagattgtgatgataaggagttatctgatttaactaaaaagaataaaaggttactttcagaaattggcagaattatatatgctgttaatccgagaaatgatttttgttgtcaggaaagtccagatattattaaaagaaaacttgaaattgaagaaaataaaataagtaaaagcgaacttatcaagattattgaaagtggagctaaagagcaaactatttcacagctacttaagtcagatctatctatttttgctgaaatatatgcttgtcctaaagatgagtatatttgtttttctgagtttcctatagatgatgggtatgtagattatctggttctaacgggaagatcaagaatggatgtatatcttattgaaattaaaggagcagattttgatttagttaacaagaataaagaaaaattcaatgaaaaagttagtgaagctgatcatcaaatcaaaactagattagggtttatatatagaaattatgagttttttaggaaaaatatacatgatgtaagaagaaaagcagagaatggagaaatagtgtttaactcttttagaggtgcaataaataatttatatgttgatcctgataaagatataaatatatattcagttataataggtggaagaacaggtgacgattatgaagaaagcaaacttagacataattatgaaatagatagtaagtttaaaacaaaattagaaacatgggatactttcataagaaaactggtaagaagctaa

SEQ ID NO: 61835 - DNA, 1080 bp, Clostridium tetani; identical to SEQ ID NO: 61834

SEQ ID NO: 61836 - DNA, 1080 bp, Clostridium tetani; identical to SEQ ID NO: 61834

SEQ ID NO: 61837 - DNA, 1080 bp, Clostridium tetani; identical to SEQ ID NO: 61834

SEQ ID NO: 61838 - DNA, 1080 bp, Clostridium tetani; identical to SEQ ID NO: 61834

SEQ ID NO: 61839 - DNA, 1110 bp, Lactobacillus casei 32G
atgaatgacaccatgtatattcggaaattaacactcaatgacgattggactttcccagttgcaaaggtagtttcaaagaaaacggatgaatattggcgttttgatgcaatgccgttgaaagataaaagtggcgatattggttatttgtacgtgtatcgtaaggaaatgaggaaaaaagactacaataatttgtttaataaaagaaatgcctattcaaaaatgaccacagtttggaaagacttatataaaatttcaagatatgtttctaatacgcagggaatttatattggaggagaccataaaccgaatataccagtgcgttcgttgaataccttacgcgatcgccttgttggcaatgccgagatacaacattacattgacattcaaaatggccgtgtcctagaggactttatagatatggacacaagtcgggctaaagcattaatagctcggcaacaagaaaaaagacattccgaaatccttattaaaaatgatcaaaatagatccgtaataacacaagttaatactcaacttaaagaatttcatgatgaactaaaggaagtcctagatcagaatgataagcaaccaaaagcttggatcgaacatgattatcaaaaacttttatttaagatattcccttttattttccctcaatatactcattttattcgagagtataattttaaaatcgatggtaatgctcaaaaaaaagaagatattccagattttatcgctctaaactcctctttgtcagtcgatgttatggaaatcaagacgccagattttccactatttaggaaaggtcaatatcgaaaaaattttgttttcgcatctgaagtacagggattaatttcacaaattcaaaaatacatatataatttgaccagaaactctttaagagaagagccccgccttcaaaagcgttttgaagacaaagcagaattgaaactttctaaaagttcgggcggaatacatattagatcgccaaaaggactgattgttgtcgggagaagccctagtcattcaactcaaaacttagaagaagcacaacaacaagaacaggattttgacatttacaaacggcgatacgaggatatactctttttttga

SEQ ID NO: 61840 - DNA, 1218 bp, Bifidobacterium adolescentis
ttggatgaatctcagaatgatgagattggttatttccaaggacgaattcctggacgaacatatatttccaatgtatttgcatataatcgtccgaattcaaaggatattggttcgccggcaagaaatatcaatcaagtttttgattgtgatgatattgattcagaaattgatatttctgaggcaggatgggagactcagagtatggatttgagcccaagaaggcaaatcaaaataagtattgccaaggaagccggacactataaagaacttgtgattcaacaggttgatcctaaaaagccggaaaaactctctaatctattgcggttaacggataaacaggttgatgattttttaaacttgattcgttgcgtaggtatgtgggatcctgcggacgggaatctgcctaaacgtttagatgcaacgcttcttcggagaatacttgacgacaatggggaagcattggggcaagtttattctcagcagccggataaagtgcgtgaattaatcgaaaaagatccaagcggtgaagatgttgcagctattgcgtcaaggagaaaggccgtaacagtttttgaagaaatgatgcagaatgattctcttactgagggtgattggcagaatttttttgaaagcaatccctggattttgggagcgggccttggtgtgccgctttttacagcgtggaattcagacaaattagaaacagttgtaagaggtaactccttcacgggcgaaggtaaacgtgtggatgctttatatcggacaagtggaattgtcaaatcgttcgtatttgctgaaattaagaaaccgactactaaactactcactgaaaatgaatatcggccggggtgctgggctgcgtcgaaagatttaagtggtggaatttttcaagttcacgcaaccattcaagctgctgaggatgaggtttctggacatgttgtaacggcacaggatgaagaaggatgcgatattccgtcttcagaggtctttttattccgtcctagagcatatcttgttattggatcaacaaaagaattcatcaataagaatagcggtggaaaaaacaagaagaaaattagatcctttgaacttttccgatctaatattgtcactcctgaaatcatcacatatgatgaattattcgctaaagctcgttggcttgcctatgggagcgatgattcaaaccagaataatacagagagcaatcggttcagctga

SEQ ID NO: 61841 - DNA, 1173 bp, Bifidobacterium bifidum PRL2010
atggcggaccacgttgagacacaatcagttgcgcgtggtgtggctgaggttcccccggctctgattgccgagactgcaactaccagaaccatctttgaagcgaagatcatcgacggtcatggtatcgatggtgctctgaagcgccagaagcgcgacgagaatggcggctggtcggatttgaacggcgtcaattttaggaatgctgaccccgacacagtcgtttcaatcccactgaaaacttcagacgtgagaaaactgtatgacttgttatccagattgtatgctgtccagaacaagggcgttctaccaggctcacatgactatgtagtagctgggaaggacgaaatcatcgtcaccaatgagaaccttgctcaagtcattcaggaactgatagatgaaaatcattcccaaaaattctgggatacactcgtggcgaaccaagctgatcttgcgatgagacttgccgaatcacagattcagcgaaatcgaatgcgcataatcgaacagtttgaacaagatatgcagttctatggcgacaacgaaaaacactggcaggacttcttcggtgagcatccgtggatactgcaatcagcttttgctttcactgcgtttcaattgcgaggggaaacatatgtaggcgggaaaagttgtgtcgggaggaacgggcaaggcggtgttgcaacggatttcctgtttcgggatgaaagcactcaaagtttcgccgttgtcgatatcaagactccagacactgaattgatggcgaagcgtccctatcgaggaaaagacggaacgtcaggtcctaatgtcgtgtatccggcgtcagggcatctatctggtggggtgattcaagttcgtacgcaaatctctgaagcgattcggagttttgaggttgttctgcataattcctacccggaactcaacagggtacacccgcacggtgtgctggttgccggtaattacgacaaattagaagaagagcaaaagagatcttttaatcacttcaggcgaggactttttggtcttacggtaatcaccttcgatgaattgttaggtcgcctgaagcagctatatacctttgaagagcatgaaccgcccagcgctcaactgaataagtcttctgaggacaatccttgggcagggccggatgaagattcatgggcaagtagtttgtag

SEQ ID NO: 61842 - DNA, 1173 bp, Bifidobacterium bifidum; identical to SEQ ID NO: 61841

SEQ ID NO: 61843 - DNA, 1017 bp, Bifidobacterium bifidum
atggatttgaatccaagaaggcaaatcaaaataagtgttgccaaggaagccggacattataaagaacttgtgattcaacgggttaatcctaaaaagccgggagaactctttaatttattgcggttaacggatgggcaggttgatgattttttaaatttgattcgttgcgtgggcatgtgggatcctgcggataagaatttgcctaaacgtttagatgcaacgcttcttcagagaatgcttgatgataatggggaaacattgggacaagtttattctcggcagccggataaagtgcgtgaattaatcgaaaacgatccaggcggcgaagatgttgcagctgttacgtcaagaagaaaagccgtaacagtttttgaagaaatgatgcaggatgattcccttactgagagtgcttggcaggatttttttgaaaacaatccttggattttgggagcaggtcttggcgtgccgctttttacagcgtggaattcagacaaattagaaacagttgtaagaggtaactctttcacgggcaaaggtaaacgtgtagatgctttatatcagacaagtggaattgtcaaatcgcttgtgtttgctgaaattaaaaaaccgactactaagctactcactaatgatgaatatcgaccggggtgctgggctgcatcgaaagatttaagtggcggaatctttcaagttcatgcaaccgttcaagctgctgaggatgaagtttctgagcatgttgtaacatcgcaggacgaagaaggctgtgatattccgtcttcagaggtctttttattccgtcctagagcatatcttgttattggatcgacaaaagaatttattaatgagaacagtggtggaaaaaacaggaagaaaattagatcttttgagctttttcggtccagtattgtcactcctgaaattatcacatatgatgaactactcgctaaagctcgttggcttgcttatgggaatgatgattcaaccctgactaatgcaggaaacaatcagtccaactga

SEQ ID NO: 61844 - DNA, 573 bp, Corynebacterium glutamicum
ttgcaacagcaccttcgcgaacgtacacgaagaatgaaagttctggaagaactgcggcaactgatcaaagaacctgaaataactgaagcgccgtttcaaacactcctcggaaagaatccctgggtattcggtggtgaggtaattaaagcagctgaacttcgcacaataggaacatctgaccaggttgatatccctatcattcgcggagatggttcgatggttgttgtcgagctcaagcgtgcagctggtacccgtatacatcggatggatcatggctacccaacgctcggtagtgaagtccatattgccgtacagcaagcacaacggtatttatacgagctagatcgtagtgcagatactcttatgctaaaacatggttttgatgctcgccgagcgacagctttggtcgtaattggcgtctatcccgatctagagaaagatgaagctgataaattccgtgaatcttttcgaatctataattctcacctcgcccgcgttcaagtaactacttatgatgacttactgcaaaatgcacttcgcctagttagcttagaaaactctgagctaaattaa

SEQ ID NO: 61845 - DNA, 573 bp, Corynebacterium glutamicum; identical to SEQ ID NO: 61844

SEQ ID NO: 61846 - DNA, 1224 bp, Propionibacterium freudenreichii
atgatcaactttgaagatcgcggcacccaggttgttctcagctacgagtcagagcgggggcctgtcacgtgggtcgatgacaagttgcgcacctcgggtgaggtgacgttgtctcatactttcactatgcgttcggccgatctgctttcggtgggagaggacgatgagaaggaggatatccgagctttcatagtcggttcggtgggcggcgagtacagaagcattcgcgacgatgttctcgggttgaagcacgacctacgtatctcgaagtcgctgcggctcacaaagtcattgtttgtcgcagagcgcaacatttcgatttttcgccgtatcgatgagcttgtcgatgaacctatcattatcggtggcgcgcatccgtccgcaattcccgtggatgagttcaacagacttttgagaacttttccgacgacgactgagatgaagctttacgcctggacacggattacgcgcgtgcttcgcgagtacatgggagctatgacggacgcggagcagcttctcgcagatcatatggcacggcgcgctagatcaaagtcgttggccgggggcaagctcgttccacggcttcccgccgcgaaggaacttgaacttgcaaagttcgagttcgtcaggcgacaactttccgagatgttgcacgatgctgaggcattttcggaggccgaatggcaacaagcggttgccgatcttttcctacttatttttccgcagtatgtcgccgtcttgagcaatgtacttgttaaagaacggtactccaatccggggcgtgaaacgaaacggtatattgacctattgctggtttcggcaaatggggaagtcgacgtcattgaaatcaagaagccattcgagcggagccttgtttcgaggagtcggtatcgcgataatcatgtcccggttcgagaattatctggcgcgattatccaggcagaaaagtatcttttctaccttaataagtccggacaagatggcgagatgtatattaccgaaacatatcgagaccgtcttccgtctggtctcgaaattcgaatcaccaatccaaaggcgttcgtcctttctgggcgagatagtaatctgtcgacagaagagcaggtggactttgacttcgcacggcgtggttattcgaacgtagtagacatcatttcatacgatgatcttctccggcgattggataatgtgatctcgtctttacacaagaggggacttacatga

SEQ ID NO: 61847 - DNA, 1224 bp, Propionibacterium freudenreichii
atgatcaactttgaagatcgcggcacccaggttgttctcagctacgagtcagagtgggggcctgtcacgtgggtcgatgacaagttgcgcacctcgggtgaggtgacgttgtctcatactttcactatgcgttcggccgatctgctttcggtgggagaggacgatgagaaggaggatatccgagctttcatagtcggttcggtgggcggcgagtacagaagcattcgcgacgatgttctcgggttgaagcacgacctacatatctcgaagtcgctgcggctcacaaagtcattgtttgtcgcagagcgcaacatttcgatttttcgccgtatcgatgagcttgtcgatgaacctatcattatcggtggcgcgcatccgtccgcaattcccgtggatgagttcaacagacttttgagaacttttccgacgacgactgagatgaagctttacgcctggacacgaattacgcgcgtgcttcgcgagtacatgggagctatgacggacgcggagcagcttctcgcagatcatatggcacggcgcgctagatcgaagtcgttggccggggacaagctcgttccacggcttcccgccgcgaaggaacttgaacttgcaaagttcgagttcgtcaggcgacaactttccgagatgttgcacgatgctgaggcattttcggaggccgaatggcaacaagcggttgccgatctcttcctacttatttttccgcagtatgtcgccgtcttgagcaatgtacttgttaaagaacgttactccaatccggggcgtgaaacgaaacggtatattgacctattgctggtttcggcaaatggggaagtcgacgtcattgaaatcaagaagccattcgagcggagccttgtttcgaggagtcggtatcgcgataatcatgtcccggttcgagaattatccggcgcgattatccaggcagaaaagtatcttttctaccttaataagtccggacaagatggcgagatgtatattacagaaacatatcgagaccgtcttccgtctggtctcgaaattcgaatcaccaatccaaaggcgttcgtcctttctgggcgagatagtaatctgtcgacagaagagcgggcggactttgacttcgcacggcgtggttattcgaacgtagtagatatcatttcatacgatgatcttctccggcgattggataatgtgatttcgtctttacacaagaggggacttacatga

SEQ ID NO: 61848 - DNA, 1101 bp, Mycobacterium fortuitum subsp. acetamidolyticum
atgcgggttagcgagcgcgaggtgcgtcagcttctggaggaccgtccccgagtcagcacgctctgccagatcacactgatcaaaaaggacaacggcttctcgccacgaatccgcctctggaagaaggacaagaccaagttcggcaagcagacggctgaccacacagtcgatgcagacgcgactacaactgtcatcaaggcgaccgtcgataccgactcctgccatgacaacttctggaagctgatcgacttcatacagtcgttcatagggatttcgctgcctgactcggtgtttcgcgtcgtcacaggtgacagcgcgttgctcgcccagctgctccagaaccaggaccgacaggtcgtcctcgatgcggtgcaagcggcagtcggcgagtcgctcacggagcgagatatcggcatcatctcgaatcgcaagaagcagctggcaaccttcaaatcgctgttgacggacccgaatttcttcgagcagcgacgacgcgaattgcagaaaccgggcaagcagccgcccggcgacgaaggtgtctggcagaatttctttgaaaacaaccaatggatattcggttacgggctatctctgattgcatgtgaaacactcgacggcgagaaactagagaagataactaccggagccaacatcttcaccggcgccggcaagcggagcgacgctgtgatgagatcgaaaggttttatcagcagtctcgtgtttggtgaaattaagacgccggccgccccactactcgaaaaggaagcgtatagaaagccagatgtgtatcagacatctcgcgaattgaacggggcggtcgcacaggttcaaaaaacagcagcaaaggcgattcgccaaattaatacggacatccaccgactttacgaagatgacgggacaccaacggatattcaggtgtcctcaatccgaccgaagcaagtagtggtcctcggcaacctcgaacagctcgcagtcgacggtaacccgaatccggagaagacctcggccttcgagctctaccgcaactcaatacacgaagtcgagatcatcaccttcgacgagctgtacgagcgagcacgtttcatcgtcgaagacgtctag

SEQ ID NO: 61849 - DNA, 1224 bp, Mycobacterium neoaurum VKM Ac-1815D
atggcattcaagagcatcttctcgctcccggagcctcccaacgaggtgacttgggcggagggcagactcccgcaccggacgtacatttcgcggagcttcacattgaaccttccggcatcccgggaccacggcgagccagccagatatgtgacaaaggtgttcgatgaaccgacgttcgacgacgcgtcaacaaccgagctcgataacgacatcgaggagtacatcgtggcgacgacgccccgtggccgcaaacagatccagcttcaggttgcccgcgaagcgggtaacgttcgtcgcctcgtaattcaaagagttccaacaaatccgggttctagcaaactagaggttctgcttgatctcgaccggactggagcgacgcgcctcatcgacgtcatcaggatggtcaacagcatccctgtcgaaggcgatacctcggtcagaattgatgaccaagtccttcaggatttctttcgagatccggaagccatgacagcgctatatggacgagatccgggatcgttaagacggctaatcgagctcgacgcgagcgctgccgacgtcattgcgatctcgcgtcgccgtacggtcgtgggatttttccgcagacttctcgaagattctgacctctttgatgaagttgcagccgaccacagtagtccggagaaggtgtggcagaacctatttgagatggaaccctggcttctgggggcgaacctggcgggccaactgattaccagctggagcccggaacggctggaacaggttgtgacaggcgcgtccatctcaggccctgggaagagaacagatgcgctgatgcggaccaacggccgcatcagcgccatgatttttgccgagataaagcaccatcgaacgttgcttgttgataaggagtatcgatcgggctgttgggccccatcaacagagctcagtggtggtgtcgttcagattcagcagacagtgcatcttgcgacgcgtgaaattcaggaccgcctcgcggataaggatggcgacggggtggagaccggcgagtacacctatgtggtgcgtccgcgttcctttctgatcgtcggctcgcttgatcagctacgaggtcagggagggattcagaaagagaaatacgagtctttcgagctctatcgtcggaatctctatgagcccgagatcgtcacctttgatgagctgctggcgagggccgaatggcaatgcacgttgcttgagacgtaa

SEQ ID NO: 61850 - DNA, 1224 bp, Mycobacterium neoaurum; identical to SEQ ID NO: 61849

SEQ ID NO: 61851 - DNA, 1224 bp, Mycobacterium neoaurum; identical to SEQ ID NO: 61849

SEQ ID NO: 61852 - DNA, 243 bp, Mycobacterium vaccae ATCC 25954
atggagtctgcgctaaccgacttccgtgacatcgtgaagcagacgacagaggccgaaccggtcgaaacggcggtggttaggggtgcggtgatcgctggcacgctcgcgtcgattgatggtgatgcgaggaggttgtcctttatgcgtttcagggaagggttccagggcgtacagatactcacctttgatgagttgggcgatcggctacgaggactgcatgcgatgctcaaaactcaaccatga

SEQ ID NO: 61853 - DNA, 690 bp, Streptomyces albus J1074
atgagtgactggaacgaggctgacgagtacctggcttgggcaacaaaggagctttcacgcaacggccacaagaagctgtgcgtgattcgggatgccccgaccgccgaggtggtcgacgagttcgaaaaggttctggacgacgcgcaagacgaagcgccggtacaagaatttttcgagaggcaccccgaggttttggcgcagcaactcggtgccggatgccgctggatcattccgaggccgaatttgggaggcgtctacatcccagatttcatggcagcccgggttgacagtggcggactacggtgggtcgcaatcgagctcgaaagtccgtctgttgatcgcctcttcacgacaacggacgggacgcctgcgaaggagctacgcaaagggcttcagcagatcaaagactggaggcattggctcgaaatgaatttgcagaccgctcaaaatagtcctataaatggcggctgtggttttgttggcatcacccccagggttcagggattagtggtgataggtcgtcgccgcaacaccactagcgatgatcattacagaaggcgtgacatcgcctggcaagagcatttggagacccacacttacgactggctgcttgaagaggggcgaaaaatggtacccttacatagatcgccgcaggaggaatgcgaggagtgtgaactctatgggcgctaa

SEQ ID NO: 61854 - DNA, 1185 bp, Streptomyces albus
atggcactcgaactgcatctcgacaagatcctctccgtcgcctcggcggagagtgtcaaggaggcaatcgccctggcactggctcacgtgcggtccggcccgggaggaagacgcagaggcgggaagcggctcacggagcttctgagcgcggcgcgactcttctccgcacgcgcagaggaatgggaagtcctgcggtccctgcaagatgcggtgcactacacggaggggcgtctcctcagaccggactatgaggagaagtaccgcctgcattacttcgatcgcggcccacgcgacaggttcggactcgattccatctcacgaactacatctgcgatcctcgaactctggtgcatgcaggctgaaaagtaccttgtcgatcaccccgacgcctccctggagaacgtcctgaaccacgtccgcaaagtgggcgaagatgcccgcttcatgcaggcaccggaggaggacccggcccgctaccgtatgcccaggggggcggccgagctcgctctctggaccgagcgtgtgctgtgcaaccgggtcgaggtgtcggacccggcagaatccgcgcgccgcatagtctcgtcgcccgaggctctatcgattctggcgatggacgaggacggccagaccgtgctgcgcgcggcggaaatgcaacgccggtccgccagtctccgccgactgcgcgaaatgatcgaagacgacaccacgaccgagcacgcactgcaacgtgccctgacggggatgcactggatattcggcgggcgggtcatcagccaggccgaacaacgccgactggtccctggcgacgaggtcgacatcccgctgattcgcggcgacggctcctttcaggtggtcgagctgaaaagggctgccggagccaagctcgtaaaagaacaccggggctcctgggttcctcggagacaagtccacgacgcggtcggccaggcgatcaattacctggtcgggttggacgagagccgggaacgcatcctcgaagagttcggagtcgacacccgtcgagcgagcgccctcgtcctcgttgggcatccgtgcagtcagccagaggtgagcgagagggaaatcaacgaggcgttgcgtatccacacttcgcatctgaaccgggtagaagtactcacctacaaggaactggtggacagcgcggagagggctctcgctctggggtga

SEQ ID NO: 61855 - DNA, 1200 bp, Streptomyces ambofaciens ATCC 23877
gtgactgagaccaattggcagctggtcgcggatgcgcttggccatctgtacgccggaccgaccgcagagcagcatgccatcgccgacgaattgaagtttcccctggcgccgggcacacccaccccagtcgctgccgccctgctccgcgctcacctagcaaaaccgctgcgcctgcgagagcacccgccgatcgacgagccggagtacgactatctcgcccgcgtagcaacggagacgaacctgcacgtcccagtcctcgaagagataggcagccgggatcttctggacgcgtggctcgaagtcgcctgggcacggcgaacggtccaccacctcgaacgcttacgccccgaggtgggtgatatcgcgatcaccgtgaggagaagaaagcccgaggaggaccggtacgggcagatcagctcgatcagcctcagcggccagctgaacttccgcggtggtctcggcagaagagcgtggccccacaccgtcaagcgcgtcgcgaaggtcagcgacgccgaccatggcgaacttctcaccagggctcgtgaggaggtcgccgccgaggaccagcaccctgagcgtgtcaccaaacgagagctcgcgctgcttgacaactggaaggtcccacgtcgctcctcgctggcggactgtcgagctctccaagaggccctggacagcgccaccgaggaacggccgatgcaggttgttctggagaaccacccagcactccttgccaacatgatcacgggcaaccacggggtatgggtccgaccgcaggttcgtctgggcgaccagtacgtctcggacttcctcatcgccagtgagacctcggcagggatgcgctggcacctcgtcgaactcgaatgccccacagcgcggatcaccaacgctggaaaccgacgcgaatctcccacactgcgccatgccatcgaacagatccaggactggcgagagtggctgaagaccaatctcctggccgcccgggaaaagctcccaggcatcaccatggacgcacgcggactcatcattatgggacgggaggacgggacggacagagcccgcgagatccgggatggccggtccgccaatgaccggatcgaggtccggacgtatgactggctcctacgcgccgcccgtcgcgccgactctatggcccggggcctgctcgacgaggaaaccggagaccttgacctggactggtga

SEQ ID NO: 61856 - DNA, 1200 bp, Streptomyces antibioticus
atggtgctggagcggcagctggggcaggtgcgcggcgcggccgccgacgaggccgtgcggtcggcggtggacgcggtcttcgcctacatgggcagcggcagccccggtagacgcagacagggcaaggaactcgtcaggctcatggaggccgcccgcaagacggcggcggaggcgggggagtggcacgtcgtccggctcttgcaggactcactggactacgcggagggccgcatcctccagcaggatctcgaggagcggtaccggatcttccaggacggggcgcgcagagaacgatcccgtgacttcgtggcgagcagcctgcggaccatgcaccagtggctggtcgccgcgggcgaggcctacctgagggaacatcccggcgcgagcgccgaggagacgctgagccatttccgggcccaaggggaggacgccgcgttcctgcgggctccggacgaccgcccggggcgctacgtgatcccccgtggggcggccgagatctcgctgtggctggagcggctgctgaggagcgagcggatcgacgtcgcggacccggcggagtcggctcgcaggatcgtcggctctccgcaggccatggccctgctcgccgccgaccgcgagggacggctgatcctccaggccgccgagctgcgacgtcgggccgccggtctcgaggagctgcgggccgtcgtggaggaccgcacggccaccgaggcggatctgcagcgcgccctcgaagggaaccactggatcttcggcggccggttcgtcggcgaggccgcgcggcgccggctggtgccgggggacgaggtggacatcccgctcatacgcggtgacggggcgctgcacatcgtcgaactcaagcgggccatgagtctcgacgcgccgctgatcaaacgccaccgccacgcatgggtgcccgcggcgcacgtccacgaggccgtcgggcaggccgtcaactacctcgtcggactggacgagcaccgtgcccgcatccgcgaggaactcggcatcgagacccggcgagcgggcgcgctggtgctcgtcggtcatcccggtctgcaccccgacgtaccggagggcgaggtcaacgagacgttgcggacgttcaactcgcacgtcacccgggtcgaggtgctcacctacaaagagctgctggacaacgccgaacgctccctcgccggaggtgtcgaaccggtgtag

SEQ ID NO: 61857 - DNA, 1176 bp, Streptomyces antibioticus
ctgcaactggatcatgtggccgagcaagccggcgaccccaaggtcaaggacgccctggaagcggtcgtccggcacatgaacagcggcagaagcccctaccggggtggcagcacgctcgtcgcgctgttgaaggaagtgcgttccaccgcggccgcgttggacgaatggcaggtcgtgcgcctcgtgcaggactccctggactacgccgaaggacgcatcctccgaccggacttcgaagagcggtaccggctcttccaacggtcggcggaacccctcagctcgcatcaggactacctggcccgaaccctctccgcgacgctcgccttcttcatgcagctcggcgacgcatacctggcccagcatcccgacgcgggcgcgaccgaagtgctcacccatgtgaagggcgttgcacaggacgcgcgttacatgcagcagtcgcaggaacggacgggtcgttatcgcatcctgcggggcagcgccgaggtggcggcctggctcgaacaggtcttccaggaacggctggacgtggaggacccggaagccaccgctcgccgcatcgtgatgtcgccggagtccctcgcggttctggcggcggaccgggacgggcaactcctgctgcgcgccgcggaggtccagcggcgtcggcggggtctcaaggccctgcgtggggcggtggaggacccggaagcgagtgagagagatctgcagcgtgcgctggacggccaacactggatcttcggcgggcagttcgtgagccaggcggtccagcggaggctggtgccgggcgatgaggtcgacatccctctgatacgtggggacggcgcgctgcacatcgtcgagctgaagcgctcgatgagcctcaagggctccctcgtcaaacgacaccgcgggtgttgggtgccgaccgccgaggtccacgacgcggtgagccaagcggtgaactaccttgtcggcctggacgaacaccggcagcgcatcagagacgaactcggcatcgagacgcgccgggcgagcgcgctggtcctgatcggacacccttccgtgcaaccggacgtggccgaggaacacatcaacgaggccctgcgcaccctcaacacccacatgagtcgcgtcgaggccgtgacgtacaaggaattggtggacaacgcggaacgggcgctgggaggttggcggtga

SEQ ID NO: 61858 - DNA, 1215 bp, Streptomyces clavuligerus ATCC 27064
atggcgatattccggtccagcttctcgctcaagatcatggtcgaagaagcgcgaaaacttaccgagcatgctggagtgcatgagcggattgacactgtgctgcggattatgggcgagggctacggcggaacttacggcaagggaagaccgctggtgaacgctctggaggacgtggcccaagcatgcctgctccatgaagagttcccgcttgctcagcgcttccagagattcgccgggtacgcgggcggcaaactcttcctcgacaccgttgagcactactacgacgcgaaggcgcggcagcggagcgaagagttcatgcgacgtatggctgccatgggctctgatcgagccgtgtctgcccttgaagcgctatgcgccgagaatcccgatgcgagtgtcaccgacgcccttgctctcttccgcggcattgcccgatctaccaaccatctgagtatcggagacggcgagggcggaatccaactgcccgccaagtacctcaaacgacttcagcagttcgggcatatggagctgatcctgcgagatctgccccgaccagcctccgctgagaccgcccggatgatgaatgagttcctggaagacgcagacgccggaatgctggctcagctcttggagctgcgggccaggcgggctggcctcgcatccctgcgtgccgcagtagaccgccccgatagctctgagactgtcatccatgcctgtctgaagaaccaggagtggatcttcggtggtgccttcgtgtctgagctggcccgtcggcagtacacaccggacaccattctcgacattccgctgctgcgaggggatggctccttgcacgtggtggaactcaagcgcgccaacatagagaaactggctatccggcccagtggtcaactcatgctgggtgccccggtccaccacgcggtctcgcagacgcagaactatctacggatcttggacgagggccgtgaaaccatccttgcgcggtacggggtcgacacgcgcagagcttccgcgactgtcgtgatcggacactcgcagtacgtcagtggaggggtcacacctcaggaggtcgctgacacgctgcggacctacaacacgcatctggcacgtatcgaagtgatcacctacgagaccttgctggagtctgcggagcggatgctggcgctctcgtcggctgagcacgtctccggccaagctgagggatacaccgcatga

SEQ ID NO: 61859 - DNA, 1215 bp, Streptomyces clavuligerus ATCC 27064; identical to SEQ ID NO: 61858

SEQ ID NO: 61860 - DNA, 1215 bp, Streptomyces corchorusii
atggtgctggagcggcagctcgggcaggtgcgcggggtggccgccggcgaggccgtgcggtcggcggtggacgcggtcttcacctacatgggcagcggcagccgcggccgacgcagacagggcagggaactcgtcaggctcatggaggccgcccggggcacggcggcggaggcgggggagtggcacgtcgtgcggctcttgcaggactcgctggactacgcggagggccgcatcctgcaacaggacttccaggagcggtaccggatcttccaggacggggcgcgcagggagcagtcccgtgacttcgtggcgagcagcctgcgggcgatgcaccagtggatggtcgccgcgggcgaggcctacctgagggatcatcccggtgcgggcgccgaggagacgctggaccatttccgggcccagggggaggacgccgcgttcctgcgggcccccgaggaacgcccggggcgctatgtgatcccccgcggggcggccgagatctcgctgtggctggagcggctgctcaggagtgaccggatcgacgtcgcggacccggcggagtcggcccgcaggatcgccggctcggcgcaggccgtctccctgctcgccgccgaccgtgcgggacagctcgtcctgcgggccgccgagctgcggcgtcgcgccgagcggctgaaggcgctgcgggctgtcgtggaggaccgcgcggccaccgaggcggatctccaacgcgccctcgaagggaaccactggatcttcggcggccggttcgtcggcgaggccgcgcggcgccggctggtgcccggggacgaggtggacatcccgctcatacgtggtgacggggcgctgtacgtcgtcgagctcaagcgggccatgagcctcacgcccccgctggtcaaacgccagcgcaacgcctgggtgccggcggcgcaggtccacgaggccgtcggtcaggccgtcaactacctggtcggactggacgagcaccgcacccgcatccgtgacgagttcggcatcgagacccggcgcgccggcgcgctggtgctcgtcggtcatcccggtctgcaccccgacgtaccggaacgggaggtcaacgaggccctgcggaccttcaactcgcacgtcacccgggtcgaggtgctcacctacaaagagctgctggacaacgccgaacgctccctcgccgggggacgtgaccccggtgccgggagcgcttggtag

SEQ ID NO: 61861 - DNA, 1215 bp, Streptomyces hygroscopicus subsp. jinggangensis 5008
atggtgctggaacggcagctcgggcaggtgcgcggggtggccgccggcgaggccgtgcggtcggcggtggacgcggtcttcacctacctgggcagcggcagccgcggccgacgcagacagggcagggaactcgtcaggctcatggaggccgcccggggcacggcggcggaggcgggggagtggcacgtcgtgcggctcttgcaggactcgctggactacgcggagggccgcatcctgcaacaggacttccaggagcggtaccggatcttccaggacggggcgcgcagggaacagtcccgtgacttcgtggcgagcagcctgcgggcgatgcaccagtggatggtcgccgcgggcgaggcctacctgagggatcatcccggtgcgagcgccgaggagacgctggaccatttccgggcccagggggaggacgccgcgttcctgcgggcccccgaggaacgcccggggcgctatgtgatcccccgcggggcggccgagatctcgctgtggctggagcggctgctcaggagtgaccggatcgacgtcgcggacccggcggagtcggcccgcaggatcgccggctcggcgcaggccgtctccctgctcgccgccgaccgcgcgggacagctcgtcctgcgggccgccgagctgcggcgtcgcgccgagcggctgaaggcgctgcgggctgtcgtggaggaccgcgcggccaccgaggcggatctccaacgcgccctcgaagggaaccactggatcttcggcggccggttcgtcggcgaggccgcgcggcgccggctggtgcccggggacgaggtggacatcccgctcatacgtggtgacggggcgctgtacgtggtcgagctcaagcgggccatgagcctcacgcccccgctggtcaaacgccagcgcaacgcctgggtgccggcggcgcaggtccacgaggccgtcggtcaggccgtcaactacctggtcggactggacgagcaccgcacccgcatccgtgacgagttcggcatcgagacccggcgcgccggcgcgctggtgctcgtcggtcatcccggtctgcaccccgacgtaccggaacgcgaggtcaacgaggccttgcggaccttcaactcgcacgtcacccgggtcgaggtgctcacctacaaagagctgctggacaacgccgaacgctccctcaccgggggacgtgaccccggtgccgggagcgcttggtag

SEQ ID NO: 61862 - DNA, 1215 bp, Streptomyces hygroscopicus subsp. jinggangensis TL01; identical to SEQ ID NO: 61861

SEQ ID NO: 61863 - DNA, 1215 bp, Streptomyces hygroscopicus subsp. limoneus
atggtgctggagcggcagctcgggcaggtgcgcggggtggccgccggcgaggccgtgcggtcggcggtggacgcggtcttcacctacctgggcagcggcagccgcggccgacgcagacagggcagggaactcgtcaggctcatggaggccgcccggggcacggcggcggaggcgggggagtggcacgtcgtgcggctcttgcaggactcgctggactacgcggagggccgcatcctgcaacaggacttccaggagcggtaccggatcttccaggacggggcgcgcagggagcagtcccgtgacttcgtggcgagcagcctgcgggcgatgcaccagtggatggtcgccgagggcgaggcctacctgggggatcatcccggtgcgggcgccgaggagacgctggaccatttccgggcccagggggaggacgccgcgttcctgcgggcccccgaggaacgcccggggcgctatgtgatcccccgcggggcggccgagatctcgctgtggctggagcggctgctgaggagtgagcggatcgacgtcgcggacccggcggagtcggcccgcaggatcgccggctcggcgcaggccgtctccctgctcgccgccgaccgtgcgggacagctcgtcctgcgggccgccgagctgcggcgtcgcgccgagcggctgaaggcgctgcgggctgtcgtggaggaccgcgcggccaccgaggcggatctccaacgcgccctcgaagggaaccactggatcttcggcggccggttcgtcggcgaggccgcgcggcgccggctggtgcccggggacgaggtggacatcccgctcatacgtggtgacggggcgctgtacgtggtcgagctcaagcgggccatgagcctcacgcccccactggtcaaacgccagcgcaacgcctgggtgccggcggcgcaggtccacgaggccgtcggtcaggccgtcaactacctggtcggactggacgagcaccgcacccgtatccgtgacgagttcggcatcgagacccggcgcgccggcgcgctggtgctcgtcggtcatcccggtctgcaccccgacgtaccggaacgggaggtcaacgaggccctgcggaccttcaactcgcacgtcacccgggtcgaggtgctcacctacaaagagctgctggacaacgccgaacgctccctcgccgggggacgtgaccccggtgccgggagcgcttggtag

SEQ ID NO: 61864 - DNA, 894 bp, Streptomyces reticuli
atggatctaatctccgaggcagtaaccgatgagaaccccgaccgcccgcaagcccctacctgggaggagtatcaaagttggcttcaacctaaatggaaatcgctactggagtcagacccgaacgagcgtcagatgcaatcgtttttggaatcgcacccatgcttactgcccggagcgactgacagcatcggccagggggggcaccacagcgcctcttttagtgcagtaatcaggcagccccctctggaggggctcgggccaaaacgcgtaccagacttcatgtgggtgaggcgagacacagccgccattcgacctatctgtatcgagattgagagccccgggaaaacctggttcaacaaagacagaactccgacagctgaactaactcaagctattgaccagattacagattggaaagtctggttcgactcccccgaaaatcgtctgattttcgggaggaggtacgcacccaataattcataccgcccgatcgtgccgcaattcgttctcatctttgggagaaactcagagtttacagtgggccgctcgaagcatgttgatccgggctacttgcgccttaagcgtgaccacatgcagcgaagggacgagcacttcttcacttacgatcaactgaaggccgaacgcgaagcagagatttacgccacgatcacccatagggtctacgagtggtccatcgaccatatcccacccactttttgcactggggctcacattacggagctgagtgaagtcgtcagcgatccgacagaagccatcgctaaagcggacctaataagcgagcaacgcaaagcgtatctagaggaacgctggaagtactggcgctcggttgctctggaccccaaccctcatgtgtacacactgggacgggagtag

SEQ ID NO: 61865 - DNA, 1200 bp, Streptomyces viridochromogenes Tue57
atgaccctggaatggcacctccgcaaggtggtggccaaggaggcggtcgacgagagcgtgcaggacgccgtgcaggcggtcctgaagcacatgcacggcggacggagccgcaagcggcggggcggccgagagctgctacggctactggaggaggcgcggggtgccgcggcgggagtcggcgagtggcaggtcgtacggctcgtgcaggatgcgatcgagtacgcggagggacgcatcctgcggtacgacttcgaggaccggtaccggctgttcggggacggcaaaaagagggagtcgcacacgggcctcctcggcagcacgatgaaggcgatgaaccagtggctgttcgacgccggtcgggaattcctggcggcccgcccagaggcggggatcgaggagttcctggagcacttccgggcgcagggtgaggacgcgctgttcctccaggcccccgacgaacgcccgggacgctatgtccttccgcgaggtcgggcggagatcacgctgtggctggagcggatcatccgtgacggccggatcgacatcgcggacccggcggcagaagcccggaagatcgtcacctcgcccgaagccctggcgctgctggccgccgacgatcaggggcggctcctgctgcaggccgccgaactgcgccggcgggccgcccggctcaaggaattgcgtacggtcgtcgaggatcgcaaggcgacagaggcggacgtgcagcgggcgctggacggccagtactggatcttcggcgggcggttcctgggcgaggcggcgcagcgacggctcgtgcccggggacgaggtcgacattccgctgatacgcggcgacggggcgctccatatcgtggaacgcaaacgcgccatgggcctcaggagtccgctcgtcaagcggcatcgcggtgcctgggtgccggcggcgcaggtgcacgaggccgtcggccaggccgtcaactacctcaccgggctggacgagagtcgagaacggctccgtgccgacttcggtatcgagacccggcgtgccagtgccctcgtcctggtgggacatcccgcgctgcatccggaggtgccggaggacgagatcaacgaggcgctgcggacgttcaacgcgcacctcaccagggtcgaggtgctgacctacaaggagctcctggacaacgccgagcgctccctcgccggggagagcccggtgtag

SEQ ID NO: 61866 - DNA, 878 bp, Streptomyces griseoruber
gtgttgatcgaggccattcccttcttcatcccccacaggaactcatcgactgagctgtccatgaagcttgtccgcacagacaagcggactggcgagcagtgtgagatgacgctcaagtcagaggacctgtacatgctcaagagccacatcgctcaagcgctatccgtatctgagcaagacgatgatggtcagtacctcgtgctacgaacggatgggttcggagcgcaactggacgcctctgatgacgccgtaggcgcgatcggcagtgccctggaaaaccgccgattcgctgcccaactcgcccaccaggtgagccccgagaccttggccaaagcattttcagctgccgtcaggatcggtgagctgagagccgccgtcaccgaactgcaagagcaccttgcggaggggcgcaatcgagaggacgtttaccaggactggtgtgagcgccattcctgggccttcggcaacgcatatgttgctcgcgacgaccaacgagtcatcgggatcggcgaccacgtcgatcttttgatgaagtccaccgccagcgggttgcgtgatgtgtacgagctgaagcgcccggacaaggacgtgatcttgtacgacgacacgcaccagaactggtattggtcatcgcacaccgcgaaggcgatcgggcagtgtcaccgctacctcgataccttgcatcgcgctgcggagttcggtctgcaacctgcgcggcccgacatcgtcgcctaccacccgcgtgccgtcgtcatcatcgggcggtcacacacctgggaggagacgcaactgcgcgctctgcacgggctcaacagcaggatgcacgggatcaccgtcatgactatgaccagctgctttcccaatgtcacgcgctgcta

SEQ ID NO: 61867 - DNA, 867 bp, Sphingobium yanoikuyae
ttgccgaaatccttatcttgcgagttggagacgaagctcgccgaattcgatgacctgatcgcgacgcccaaagcaaatgagaatgccgtccaggcgttcctcgaggcgaacacgcggttcatgccgacaccggacattctcaatcacagggttcatatgaacagtgtgattgccaagctgcccataggcgaacgatcgaccgattatgcctatctgaccaaatcgagcatcgaatggcggctggtgctggtggaactggaagacagcagcaagccgatcttcaagaagtcgagcaagaacgccgccttcagcaccgaattcaacgacgcggtcgcgcagatcgatgtctggcgcgattatgtccatcaacatcccgctcgcctgcgcgacaagctccggccgctgatggtgccagtgccgatggcgcgccaccgactgtcggtcagatatgtgctcgtgattggccgatcggcggagttcgaacatgacgatgcacgtaaattgcggcttgcgggctatggcgccgaacgcgaccttaccatcatgacctatgacacgatccgccgcgaggtcgcggcgggacacagcaagcccaaggcggtcctgcgcgccaacagccgcggctatcgcctgcagtcggccgaagccatgcccaccatcatgttcgcgcatatgaagccggctgaactcgaactatccgacgttgccgaggcagccctgcgtgcggacggctacgacatcgacgcctggaagcgtaacgagcctctggtcttcaatgataaatggacgcgcgattccgaaccgaaactctacgaatccatgcatcccgccgtgcagaaattcatcgcccggcagaaaaaatcgtaa

SEQ ID NO: 61868 - DNA, 1215 bp, Streptococcus mitis
atgtctgattgtattgttgtaaatgatgaattatatgttatttatcctaattatagaacgtatactcttgatgcggagtattgttcaagatatacatattatcttaaaaaagggaattactttttcttgaataataatggaaaattagttgattcgaatgaggatgtagaggatagaattgcatataagattggaaaactagaggggaattattattgttttgacaatgagatttttgatttacaacataaatttagaatagacgttagcctaattgataatttaaagcataaacattttttaaaatatccttcacagttatctattctaaagaaaattgatagtttgataaatgaggatttttatattttacctgatgatacgataaatgaagaagttagttcaatcagttggacagaatataacaatcttgttgcttcatttccaacaacaacaacagtaaaacattatattgataaattggtagctgaaaaaattgaaggcttctttgagttaaaaaagagctatgatgatgagtttgaaaaacatctccaaaaaacaactagaattccctcttctaacacactattctcacccaaaatagattatgaagtcactcaagcagaaataaacaaatttactcatgcactttctttgctaaaggacatacttgaagaggaaattataagtgaaaaagagtggcagaataaaattttagatattctgttactgatatatccccagtatcaaattataatcgatgaggtaggattaagtaatcgtagaagggttgattttgttttagttgacctatttaataatattgatattgtagagataaagactccagaaaagagattattaaaaaaatcaaaatatagagaccactatgttccatcgcatgaatttactggtacagctatgcagattgagtattatttacgagagttacatgaaaattcaagtgctaacgtgcaaaaaatcaaacataagttactagagaagggttttaatagtgaggttaagataaataatgttaaagggattattattatgggccgaacaaatggattcaatgtagaacaacaagaaacatatcggattatgaaaaatcagtattccaatattattaatattattagttatgatgaactacttgatatgttagaaagaattttggaacgcttcaaaaaaaatggtatttcaaacaaatag

SEQ ID NO: 61869 - DNA, 1227 bp, Streptococcus mitis
atggagtttattatgtctgattgtattgttgtaaatgatgaattatatgttatttatcctaattatagaacgtatactcttgatgcggagtattgttcaagatatacatattatcttaaaaaagggaattactttttcttgaataataatggaaaattagttgattcgaatgaggatgtagaggatagaattgcatataagattggaaaactagaggggaattattattgttttgacaatgagatttttgatttacaacataaatttagaatagacgttagcctaattgataatttaaagcataaacattttttaaaatatccttcacagttatctattctaaagaaaattgatagtttgataaatgaggatttttatattttacctgatgatacgataaatgaagaagttagttcaatcagttggacagaatataacaatcttgttgcttcatttccaacaacaacaacagtaaaacattatattgataaattggtagctgaaaaaattgaaggcttctttgagttaaaaaagagctatgatgatgagtttgaaaaacatctccaaaaaacaactagaattccctcttctaacacactattctcacccaaaatagattatgaagtcactcaagcagaaataaacaaatttactcatgcactttctttgctaaaggacatacttgaagaggaaattataagtgaaaaagagtggcagaataaaattttagatattctgttactgatatatccccagtatcaaattataatcgatgaggtaggattaagtaatcgtagaagggttgattttgttttagttgacctatttaataatattgatattgtagagataaagactccagaaaagagattattaaaaaaatcaaaatatagagaccactatgttccatcgcatgaatttactggtacagctatgcagattgagtattatttacgagagttacatgaaaattcaagtgctaacgtgcaaaaaatcaaacataagttactagagaagggttttaatagtgaggttaagataaataatgttaaagggattattattatgggccgaacaaatggattcaatgtagaacaacaagaaacatatcggattatgaaaaatcagtattccaatattattaatattattagttatgatgaactacttgatatgttagaaagaattttggaacgcttcaaaaaaaatggtatttcaaacaaatag

SEQ ID NO: 61870 - DNA, 1104 bp, Legionella birminghamensis
atgagtacgattatttatagttacagatctacctcgacatcctcagctatcattgaggatattgaatttggtagaacttcaacaacaagacgattaattcgaccaacgattgtagataataaagaacaacctgatgcaagcgttaaaattgaaattattcatcaaaaagctgaaaaaggaacgtttgaggatattcctaccgaaaaattatctgaatataaggctaaagacataggtaagttgattttaagtagtgatgaaacaatttccctctttaagcatctttgcaatttgtatgctattcacaaagaaaatggtgtcccctctggtcaacattccttcaaatttgataatgatagtaaattggtgcgagttgaatcaaaaagagctgagattatagaaacacttattcagcagggatattcggaagaagtgtgggaaaggttagttgaaaactctcctgatttagcaactaaactcagtctagcgcatatttaccaaaagcgcctaacagctttagagcaatttaaaataatgctttcttgtgatcatagtgagcatgattggcaatccttttttgaaaataataattggatatttggttatggtctgaattataggattttaaagacagttacagatcaacctcactatggtggtgtcgtaattgaaggagttggagctaataaaggcgattttttaagtgctacccaagggactctaaaatttactgttttagttgaaattaaaagagcaaatactaaattattagaatcaaaagaatatagaaacgatgtggtattacctagtgaagatttaataggaggagtctctcaattgagagtgaatggtcggacttgggagcaacaaggatctcaagtacctaaaaatagggatttgttagaagaagcctctatttatacaattcaaccacgaaaaattttggttatcggtaatactaatgaattaaataatcgtttaaagcgagaaaattttgagttatttcgtagaggacaaagtgatgttgaaatcataactttcgatgaactgttatatcgagcgcaatacatagcagaacatacggaggaaattaaaggatgttaa

SEQ ID NO: 61871 - DNA, 1143 bp, Acinetobacter lwoffii SH145
atgacaacaatgtatacactagaagaagactttctctttttaccacgagatgttgaaatcgcccaaacttctcttatcaataccctctacaatcatattcataaacaaaatttaagatttctaaccacttatattgatgaaacagacactctacatattcagacaactcatcgtctaaaatttcaaatcacgtgcgtcaaaaataatattaatagtttcaaaatcacaaaatttgatagaacaaaagaagttgaaacactcactttcagtaaagtaacaatcaccaatattataaatttcttagaattaatatcttctctagatattaaagatattgaccaaagaaaaatttctttaaatcagatatctaaaaccgatataaagaactctatatctcaactaattcaatcaacactggagaacaaagatcaagctgagctattaacaagttttctaaataatggactaataacttgtcaagacatagtaaatacagggtacagaaaacaacagttagatgtttttgagaaactactttatgaacctgatgctatcactgaatatcaaataaccaatcaactaacaagtttttctgaagagaaaacttggcaacatttttttgagaaaaatgaatggatttttggatatggcttagattacagattcaacaaaatcttacaacgtgaagcacatttaaatccatcaaatctcgacggctcaaatttcgttattgttgattacgtaatggctgataatagattcactacttttgtcgaaataaaacgaccaaatacccccctatttaaatcacaaaaactgcgaggtaattgttggcgcatttccaatgacttatatgaagcccatagtcagattctcgcacaaaaaatttgcgcccaaactaaatttgaaacaaataatgcaggtttttgcagtaaagggaaaagaattcaacaaggtgcttatgatcctaaagctattcttataattggttgttggagcgaaattgagtcagatagtgaatatatacagaacttaaaaattcgaacatttgagttatttcgtcgtgacttaagaaatatagaaattattacctttgatgaactttatgatcgagcgaagtttattgttgaacatcatcaatag

SEQ ID NO: 61872 - DNA, 1416 bp, Burkholderia gladioli BSR3
atgtcggacacgtcggaagagatggggagcctgccgtcacctgagtttcggctggaaccgcatgtgggtgcaacgcctcccgcagtacagttgtacctacagacattcacccggtccccgacgaacccggatgcctgggtttcccgccctccgactgattggcacttgctcgctgtcatcgaagcgcaccagattacgtcacatcccgtctttactaacccgtacacacagcgttaccttcaaccgaagcacggacagttccataagctcgtactggagcgtgattcggacacgccgttgccggaagacgaagaagaagcagtgcgcgaaattagttcatattggagacttttcgacgagccatcctatggtttcggtttcgtcaaaaacctcgacccgctccgctatgggctggcagccttacagcacgttgacactatcaagctgtcgtcgaccgggggaccgcaaattgacggcagcatattgacgataccaatgccgttgctcgaccagttccgacgagccttcgagcgaaatcgtcgactgggtcgtcaggaggtgcggttggcgaacagtcatttagttcgtaacaacctgctgtcagagatggaccctgagcgctttccgcgaatcgttgcaagcacgccatctgggcaactcgttcaggttcgacttgaccgaacgcggccagcgccagcgtctatccgcacggagcgaacttcttccatgcgcgcattgcgagagaacctaccgcaaattgcagctgacatgcctcgcgagcttttcgaactgcattccgagattgagcgtgtcacgctcgcaaacatgattgaacgttacgagagcttgctcctgcaaaatctgtcggaagcacggtggcagcggttcttcgaggacaatcttttcattttgtcgatggcctttgctcgaccggtccacctgcttcacacgcagtttcacgcgcaagggtctggtctcgatggaaccggggcgcaagtaggcgattttctcttcgcagagcacggtcccgcgcttgccattgtagaaatcaagaagccaggcaccgagttgatgctgaacagcccttatcgaaacacgcaggtgtttggtccgagcgcggaattgagcggcgctgtcacgcaggtgttgtatcagcagagtagcttgcggagccattggatactgcatggcagactgcccgaactcgcaaattcgcatccagacaacatcagatgcgttgtcatcgcgggtcaattgcccactgacgagacgaggcggcgcagtttcgaaattttccgtagtgcatgtaaagacgtagacgtcgtcacctttgacgaactcctacagaagctgcgattgttgctgagtcacctcaacgcccaacacaacgcgcgcaacgccgacgtcccattctag

SEQ ID NO: 61873 - DNA, 1227 bp, Alteromonas macleodii str. 'Balearic Sea AD45'
atgacatcaaaagactgtttagatatcaagcagttagtaatgaaatttttacatatgcatatgaaagaatacattagtccaatgtatcactatgtaaaagaaaatccggaattaattaagacggtacctgggtttctcatgaacccaagatcgatatctgtatatcttgggcgcactcatataggtgttgagtttgatggtccagagtttattactgagttagagtcaggttcgaacattgaggttaaatacttcgattactctgtagacgaatgtaatttattagagaagatcattggctttgaatttgattcaacacgaccaatttcactaccattacctccttactctgaagatattatattcccgacaaatcgtggttttgataagttgagagagttaaaatggaatttttcagcgcaaaattcaatcatgggactaaatgtacctaccccgtcggtaatgaacgatcgctttacacgagtaataaatgcgttcttttttgatgctgatgaatctggtttgataactaggcaaattaagtggctagacttaatccctattgagtttgacagtagtgaccctgaaatggatagttttggctttaatctaagtatctatagggagctagtgaagcctgatgctcattatatctatcctgctccagatgaatttaagtatatgcaactgcctaagatcaatagatttattgaactttggggtaacaaagattcaagcgaagtagatataacaaactttatcagtgaagaaaataatcagttcattctatctatgaaatttggcgcaacagcaattcattctgaactgacatgttattggcaaagcgaagaccgcaaatcgatcagacctgacttttttgtggttcaacctaatgggtatgcggatattgtcgagttcaagttacctcatatatctaaatcatttgtggtcggctcagaaaatcgagaaacattttcggcatggcttaacacgtacatatcacaaactagggcttatgtctcattttttgacgatcctaataatcgcaggtggttcgaagacaagtatggcttcaaggttcataagccaaaacgttatctagttgtcggtcgtcgtcatgatttcaaatcggatgtatggcgtgagattcaatcagactttagggacctagaaataattacctttgatgatcttatcgacggcgtgaaagcacaattttaccaatag

SEQ ID NO: 61874 - DNA, 1620 bp, Vibrio nigripulchritudo MADA3029
atgaaacttgtagcgaaaagagtagataatttagagcctctttcatataaaagcgatggagtatcaatgcttagtgagctccgaagagagcttctactcgatatttcagacggagaaaaaaggataggaactttagatgaaataaaaagttggatttttgaacagtatcaatccaaccccttagttggtgatatgtttaatgcaatattaatgataaaaaaagacttaatctattctgagagtgacttaccacagctctcagaatgcatgtctaaaataactaagctggaaacactacctcttccagagttttgctttataacttctagtattcaaggtgatgtaaagggagtgttaattcaaagagaagagcttataagatcaggtttagtatattctattaccatttttgatagagataacttgaccaagagagttgcacgtctagaaattagagcatgtaaagaagagcccgaaccatttatttctattcttaccttaaatggctgggctcatatctctagggaggatgtaaagtcaaacgagtatgctgtgttttctctccgatgtttgatagctactcatggttatgagtatccggtgttaacgaaaggatcaataactgttgatgaacaaagtagacctgctaccaataaatatttactagaacttatattgcaggctcatagaaataaaataaaatgctataaagcggaagttccattgagtattattaagttgcgtgatattaattacgcattgtctattcctgatgaaataattcagtattatattagcgaagtatatgaatttggttttcctttctctgagttacttatatatcaagatggtaatattttcatatctgatgatgattaccctgtatatcttgcttatacagcaatggatattagtattgttccggtggttatattaggtgactttaatagctctggtgtgaaggttttgtccgaagggggaggtgagctgttgcctccaataggtgtacaagaaataaatgattctcgcacacttatgaaaactaaggaacaagtactcagagaaaaagtatctagtttatgtcccaaaatttctaattctacgatactagaaaatagatttgttcatttttgtagactaattggtagtagttctacaaaagaaaaagatctacatgaatttttaaataaaaatccacaaattttagatggccatatggcctctatgtttagtgaagttcgaataggtcgctatagagcggatatagttatacgttatgagcaagttgacaaaaaagtagtattgattgagctggaacgccatagtgataaaatatttacaaagtcaaatcgtattagaaaaaaggtaactcatgcatcccaacaagtggaggattggattaatgaaattagattaggtgcgaataacgtacctgaatggttgactaatcagtataatcctgagggttttgtcgttattggtcgttcaaaagacctatcagaagatcaaaaacaaatcttgttttcattaaatgtgaatcgtaaggtaaagatattaacctatgatgatttgttggagcgaatgaaacggcttatgacagtgattggcaatttaaattag

SEQ ID NO: 61875 - DNA, 1362 bp, Leptospira santarosai str. HAI1380
atggcgaaatggaaagttacgtatagatacttagagaccaatgcaaaagataagtttaattggcctattattgaagtcggtgaagatgttcaaatccttgaggatagcaaaattcagcgaatttggacaaaaggaaaagaaatgttgttatcgaatttgtctgactcaattcttggcatttcaattaccaatattgaaagagtagataaagaatccaacattcaatacttttcagatgaagatattagacctttagattttactatgtctgaagaagaaatagatatatttgaaagtattaaagatgaaatatgcggggttcaggaacatcaccccagatttggtcgatctatatttaaagcgatgatcttaaatgtaaatgaccgagaatcttatttagctaataatatttatgcattaaaacgtgaagaagcgctattacatttagagaaagttaaaaaattttatgagaagatagaggatagacatattgaaattcttaatattaactcaaatcatgtctcttatgaagaacacttgttaattcaaggctatttacagggcgtcgaatggcggggagttcgcgatagaaacgaaataataaaaaataatgaaccatcaaatcaaagactaaacgctttaactgataaaataaaagatccggagatgatatctgatcttcttgaatggattattgagaatggagaaaatctttctttaatcaagaacttaggaaaattaaaacctgaaaatctaaataagttaaacacgttttctggcgtattaaatcttaaaaattgcctttcgcattgggaacgtaaccaagagaatccaaatgaagaattttggcagaaagagtttaaagaaaattcgtttttagtctcacaactttttacaacgccagttcttattatgaatcaaaaaggttatgtaggaggtaaaagtatctccaattctggaggttcgataacggatttcatatttgcgaataagttaacgaaaaataccagtatcatcgaattaaaaactccagtaactaaaattctcggctccatgtatcgaaatggggtatatcatatttcatcggaaatatcaggatcaatcgtccaaatttgcaattataaagatcaaataacaaagaattattattcactggcttcaaatacagaggatgtattccatgtctatgatcctacctgtatacttattgttggaaattgtagtaaagagttaactgataaagaaaaattgaaatcatttgaattatttagacagcaattaggtaatattcaagtggtaactttcgatgagctttttgagaaaatgagaattttaattggaatgttcgagcgcacactgtag

SEQ ID NO: 61876 - DNA, 1128 bp, Leptospira santarosai str. MOR084
ttggcctatactttaaataaaaaagataccgaccgaatttatgcgattcagtataatctctttcctataaatctcccccgaaccgattatagttttttaaaggtactgattcccgatttatctgtctttaatttaactgaaaattactctatcctcctggaaaatccttgggccagtggagaaaatttgagtgtactggatttcgaaaatgccaaatacgttatcaaaacactccaaaacttttaccgaaactacgattggctagacgttggaattcttaaaatccatccccacttggttacctacgaagacaatgaattgattagaaggttcttagaaagaaataaagactctacttcagaatattcatcagaaattaatacaaaggctgaagttatagaattactagactctaaattcaagaatccggaaattgcctccattgtgatagactggattatcgataatgagaaagacccagaattaattcgaaatctcagtaagctaacgagagaaaatttaaacaaaattaacacgttctcaggaatcgccactctacgaaattgtttgcaaaaatggacggaaaacatagataaccccactgaggatttttggcaaaatgaattcaaagaaaactcatctgtcatttcgcagctatttacatcaacattggttattatcaaatcaaaagcatatatcggaggaaagaatatagaaaatgaaggaggcttagttgccgactttatatttgcaaacaaattatcaaaaaatacaagtataatagagttaaaaactccatcctcaagaattcttagctctaaatatcgggagacaatatacaatgtttcatcggagctaacgggagcaataattcagctctgtaattacaaagatgaattcacaaaaaattactacaccctctcaagatcgcaaagtgaagcgactcgatcctacgatccgagttgtattcttatcataggaaattttcaaaaagaatgcacgagtgaagagaaaataaaatccttcgaattatataggcaacagcttaataacattcaagtgataacctttgatgaattatttgaaaaaatgaaattactaatttctcttttagaaaaaggacactga

SEQ ID NO: 61877 - DNA, 1362 bp, Leptospira santarosai str. HAI1349
atggcgaaatggaaagttacgtatagatacttagagaccaatgcaaaagataagtttaattggcctattattgaagtcggtgaagatgttcaaatccttgaggatagcaaaattcagcgaatttggacaaaaggaaaagaaatgttgttatcgaatttgtctgactcaattcttggcatttcaattaccaatattgaaagagtagataaagaatccaacattcaatacttttcagatgaagatattagacctttagattttactatgtctgaagaagaaatagatatatttgaaagtattaaagatgaaatatgcggggttcaggaacatcaccccagatttggtcgatctatatttaaagcgatgatcttaaatgtaaatgaccgagaatcttatttagctaataatatttatgcattaaaacgtgaagaagcgctattacatttagagaaagttaaaaaattttatgagaagatagaggatagacatattgaaattcttaatattaactcaaatcatgtctcttatgaagaacacttgttaattcaaggctatttacagggcgtcgaatggcggggagttcgcgatagaaacgaaataataaaaaataatgaaccatcaaatcaaagactaaacgctttaactgataaaataaaagatccggagatgatatctgatcttcttgaatggattattgagaatggagaaaatctttctttaatcaagaacttaggaaaattaacacctgaaaatctaaataagttaaacacgttttctggcgtattaaatcttaaaaattgcctttcgcattgggaacgtaaccaagagaatccaaatgaagaattttggcagaaagagtttaaagaaaattcgtttttagtctcacaactttttacaacgccagttcttattatgaatcaaaaaggttatgtaggaggtaaaagtatctccaattctggaggttcgataacggatttcatatttgcgaataagttaacgaaaaataccagtatcatcgaattaaaaactccagtaactaaaattctcggctccatgtatcgaaatggggtatatcatatttcatcggaaatatcaggatcaatcgtccaaatttgcaattataaagatcaaataacaaagaattattattcactggcttcaaatacagaggatgtattccatgtctatgatcctacctgtatacttattgttggaaattgtagtaaagagttaactgataaagaaaaattgaaatcatttgaattatttagacagcaattaggtaatattcaagtggtaactttcgatgagctttttgagaaaatgagaattttaattggaatgttcgagcgcacactgtag

SEQ ID NO: 61878 - DNA, 954 bp, Capnocytophaga canimorsus Cc5
ttggatactaaaaatacttctgcatcagtaactaactcaatagaagcaatttaccaaacattaacagaaaaatataatatacctaaaacgagtatttttatagaacattatgaagttccaactcatacttttagtattgttaatatagacccaaaaaacaatacagaatggaaatcaataacactaccacaagttttaaaactaatagaatctgatgaaaatgaaatcaataatctaacacttaaaaatcctcaattattagcggaaatcgaacaatttagaacaataatttctcctcatttagggcttccctatcaagtacagccagaatatatcttacggcaatttgaaattgaaaacaatatgatttcaaaaaatgaattgagagaacttattgataatcattcaatagaatcgaaatttttagaactcctaaaaaaagacaagtctttttttgcggaaatttatgcttctccgaatgatagttatatttgtttttcagagtttcctgtgggagaagggactgttgattttgtactttttactggcagatcaagaatggatgtctttttaatagaaattaaaggggctgattttaatttattaactcaaggttataaaaaattcaaccataaattagatattgctataaaccaaattcgtgatagacttgattatatttaccgaaatatctcatcattccgagaatctgttcacgagtatagagaaagagtttctaacggagagcgtctgtttaactctttgatgggaccttgtcaagatattttagtagataaaaacaaagatattaatattcatagtgttgtaataggaggaagaaccaaagatgatttagaagaaagctataaaagacattcttttgaatcaacttttaatttacctattaaacttgaatcttgggattctttttacagaaaattacgcaggagataa

SEQ ID NO: 61879 - DNA, 1071 bp, Capnocytophaga canimorsus
atgaaagttaatgattatatacttagatattcgtctaatagtcttattagagatggaatttgtagagtaagaacttttgttaattcaaatctaaatgtaatcatcttaattacagatttggatactaaaaatacttctgcatcagtaactaactcaatagaagcaatttaccaaacattaacagaaaaatataatatacctaaaacgagtatttttatagaacattatgaagttccaactcatacttttagtattgttaatatagacccaaaaaacaatacagaatggaaatcaataacactaccacaagttttaaaactaatagaatctgatgaaaatgaaatcaataatctaacacttaaaaatcctcaactattagcggaaatcgaacaatttagaacaataatttctcctcatttagggcttccctatcaagtacagccagaatatatcttacggcaatttgaaattgaaaacaatatgatttcaaaaaatgaattgagagaacttattgataatcattcaatagaatcgaaatttttagaactcctaaaaaaagacaagtctttttttgcggaaatttatgcttctccgaatgatagttatatttgtttttcagagtttcctgtgggagaagggactgttgattttgtactttttactggcagatcaagaatggatgtctttttaatagaaattaaaggggctgattttaatttattaactcaaggttataaaaaattcaaccataaattagatattgctataaaccaaattcgtgatagacttgattatatttaccgaaatatctcatcattccgagaatctgttcacgagtatagagaaagagtttctaacggagagcgtctgtttaactctttgatgggaccttgtcaagatattttagtagataaaaacaaagatattaatattcatagtgttgtaataggaggaagaaccaaagatgatttagaagaaagctataaaagacattcttttgaatcaacttttaatttacctattaaacttgaatcttgggattctttttacagaaaattacgcaggagataa

SEQ ID NO: 61880 - DNA, 1191 bp, Arcobacter butzleri L348
atgatacatgatgataaagaatatatttatttcactaaacttcaaaaagatacattaagtgtaagtcctcaatttacaaataaatattatgatgaaaaggaaattgaaatacgcactagaggtgtttcaatgaaatttggggatagtgcaaatcacgaaatgacaaaaagaattgaaacaaaagatggcattgaaatacacttaaaagcaacagataataaacagcaggaaataaaagcatatttttatgaagatacaagagatattaagacattaaccgttcaaagatggattacaaaaacaggtaatgctcacaaagaatctatggttttatatggagaacaattagacttactattaaaatttgttcagtcactaaaaggtattccactaaacggaaaaggaaaagtcacaatacctttagatattgcattgagtaaaattaatgagcctagtattacagatgagaatatatcgaactacttaaaaactaatccaactttgttaaataaaatagttgaaaatgatttaactgaaaatgatgttgtttcaataggatatagaaaaaaacaacttgaagtttttaaaacaatgcttgataatgatttaaaagaatcagattggcaaaaattctttgaaaataatagttggatttttggatatggattatcctatatttttaatgatagcatgattgatcaaaaacttgaacaatatacaagtggatatgattttaatagtaacggaaaaagaactgatgctttactaaaaacatcaggctttataaaatcgctttgttttgttgagataaaaactcataaaactaacttactaaaacaagtagcaagtgcttatagaggtgattcttgggctatttcagatgagttagctggtggagtcactcaagtacaaaatacagtaatagcaaatttaaaaaattggtatggaaagattcaagttaaaaacaaaaaaactggcgagttaacaggtgaagaggtttttaattttcaaccaaagtcgtttttagttataggaaagttggacgagtttattggaaaatatggcgttaatgaagataaatatcgttcatttgaactttttagaaaaaatattaattcacctgaaataatcacatttgatgagctttatgaaagagcaaaattcatagttgattcacaagcagtaaagtga

SEQ ID NO: 61881 - DNA, 792 bp, Clostridium propionicum DSM 1682
atgaagttacaggatagaaattatgaattgatattaactgaaaaagagcaggaggcatatgaagcagaacttgcatatgaatcaaaaaaaggaccaaagaatactcgcaactttccacgtttttcccatccagataaagaaataagaaaattcatatggcataaaaggtctctcttccccaacaattttctgtacttgggagaatacaaggacatggattttgaactagaagctagtaaattacaaaatataatatatactgcagaaaatgagttgaaaattcagcaatatattaagcagaataagaaatggtttatacctggatcaatattcttggattataattttggtcatcatgatgcatatctattcccagaacagcaactgggaaatgagtatgctgctgattatatgctagtgggaaagaattctgatggatatagtattgtccttattgaatttgaaaaggcaaacacacactatcttattacttcagctaatacagaaagtgaaagtgtaagaaagggcttaacccaaatacaagattggaaaaggtggatagatagtaatagggattacttcttgaaaaatatagaacttttacaacaagggatagatgttcctgtatacagaatatattattatctagttgtaagtagaagagattttatgaatctaacggccttagatgttcgaagtcaaagtatgtatgaaaaaataaatactaagattgtgacatttgatagattggttgataatataaaaaaactaggagaaagacttacctggtag

SEQ ID NO: 61882 - DNA, 1227 bp, Burkholderia pseudomallei 1026a
atgggtgacgattacgagtattttcgcaacaagcgcgccgatcgcgtttatctgagccgctcgttgtcggacaaacagtacaggaagacagaagacggggacgtggaggaatttgagcgcccttttcgcatcgtctcgaaagtcgtcgattgcgctgagtcacaccagttttttcgggacggcaagcaggtatcgcttcgaatcactgaaggagcgcggcaggagataaaggcgaaattctacgaagatactcgcggggtggcgacactgaccattcaacggtatacggtagagagcggtagtccgcatagcacctacttcaccttcattaacgacgaaatttcgattctgtacaacttcctcagaaacgttccgtttctgccgctaaaggacgagcagagcgcaaagctcgacgataaatttgtagaaagcctcgtgctcagtcgtgaacaggctctcgaacttctaaatcagcagcctgatcttcttgaggaactggtccgaagtcgagtgacggcgcgcgaagttgcggagctcagtcttcgaaaggagcagcttcaggagttcgaacgcttactgtgcgacgcgacgtactttgaacaacgaaagcgggagacaagcaagggcagcggcggctcggaagcagtatggcaacagtttttcgaaaagaatacctggatttttggctacggtctcaactacgttttcaattcaacacttgacgaccgaaagctcgagcaggtggttagaggacacgacatcgcgggcgcagggaagcgcgtcgatgcgcttttgaaaacccatggtcttatcagcgctgtatcgtttggtgagatcaagacccacgcgacgccgctgcttaagcaagttgccagcccgtatcgaaaagaatgctggcaaatctccgatgacctggcgggagcgattgcccaggtgcagcgttcggtacaggtttctctcgccagcattcgatcgcggctcgatgtaagaggcgaagacggcgctccgaccggggagacgctatttctctaccagccccgctcgtttctcgtcattgggtctctagccgagttccgtgcggagcacgggatcaacgaagaaaaatattcgtcatttgaactcttccgcagaagcgtggctgctccggaaatcatcacttttgacgaactcttcgaacgagcacgattcatagtcgaggcaggggagcatcagcgccgcgacgcgtga

SEQ ID NO: 61883 - DNA, 1227 bp, Burkholderia pseudomallei 1026b; identical to SEQ ID NO: 61882

SEQ ID NO: 61884 - DNA, 1095 bp, Burkholderia pseudomallei NCTC 13179
atgaaggtcagcgattttatttttcaattcaatagtggtcgaggtatgaaggcgcgcggactgtgccgagttcgtgtttttgtcataaccgacaagcaagttgctgcggttcttacggatctcacgaacgtaggcatcggaagtacaggacctagcgttacaaacagcgttgagattatccgtaaagctctgattgatcgtggatttgcatccgacgacacgatggtgatcgagcactatgaggatatggatatacgcggtgcgacctttgatattgttgcgttctcggaagccaatactccttcatgggagtccgcgactgtagatgaaatctgcgaacgtctgggttgcgacaaagccgaattcgaatctattaccgcgaaagatttacgtttgcttgcagacattgataggattagaaaatccatcgatccgttttctggatcccctttcccagaaagtcccgaggtaatcaatcgacgctgggatatcgaagaaggcatgatcagcaagcaggcgcttgcgagagtgatcgattcgggggctagtgaaatggagttgcatcggttgttgaaaaatgatctctctattttttcggaagcttatgcggaactagatgatgaatatatctgcttttctgaattccccgtcggagagggcttcgttgacttcgtcgtattctctggtcgctcaagaatggatgtcaccctgattgaaattaaaggtgcagatttttatttgacaaccaccggcacatataaaaatttctcgagcaaagtgaacgaggccatccaacaaataagaacgcgggtaggtgttgtataccgagacatggaaggattcaggaacagtgttcacgctgtccggcagcgcgtggaggcaggtgaatcactccatggatcgtttgtcggtccatatgcgcgacttgaagtcgatccgaacaaagacattaatgttcgcagtgtggtaatcgcgggaagaaccagagacgatttggaggaaagccgacaacggcatgactatgaatggaacgctaaacccccagtgaagatagagacatgggatacatttctgcggaaactccagcgtacctaa

SEQ ID NO: 61885 - DNA, 1224 bp, Burkholderia pseudomallei NCTC 13178
atgggtgatgattacgagtattttcgcaacaagcgggcagatcgcgtttacctgagccgctcgctgtccgataagcaatatcggaagggcgaagacggaagcgtcgaggaattcgagcgcccttttcgcatcgtctccaaagtcatcgattgcgctgagtcgcaccagttttttcgtgacggcaagcaagtgtcgcttcgaattaccgaaggcgcgcgacaagagatcaaggcgaagttctatgaagatactcgcggcgtctcgacgttgacgattcaaaggtatacggttgagagtgggagtccgcacgccacctacttcaccttcattaacgacgaaattgctatcctgtacaacttcctcagaaacgttcagtttctgccgctaaaggacgaccagagcgcgaagctcgacgataaattcgtggaaagcctcgtgctgagtcgcgaacaggctctcgaactgctgaatcggcaacctgatcttcttgacgagttggtacgaagccgtgtcacggcacgtgacgttgccgagcttaaccttcgaaaggatcagctttgcgagttcgaacgcttattgtgcgacgagaagcactttggacaacgaaggctggagacgggcaaaggcggtggccccgaggcggtatggcaacagtacttcgaaaagaatacgtggatttttggctacggtcttaactacgttttcaactcaacactggacgaccgaaagcttgagcaggtggtgagagggcacgacatcgcaggtgccgggaagcgtgtcgatgcccttctgaaaactcatggcctgatcagtgctgtatcgtttggcgaaatcaaaacccacgcgacgccgcttctcaagcaggttgccagcccgtatcgaaaggaatgctggcaaatctccgatgaactcgcaggagcaattgcgcaggtgcagcgctcggtacaagtttctctcaccagcattcgatcacggctcgatgtaaggggtgacgatggcgctcccactggggagacggtattcctttaccagccacgctcgtttctcgtgatcgggtctcttgcggaattccgcacacagcacgggatcaacgaagagaagtactcatcgtttgagctcttccgcaaaagcgtcgccgcgccggaaattatcactttcgatgaactcttcgaacgagcgagcttcatagtcgaggctggggagcacaagcaccgcgacgagtga

SEQ ID NO: 61886 - DNA, 1242 bp, Burkholderia pseudomallei NAU20B-16
atgggtgatgattacgagtattttcgcaacaagcgggcagatcgcgtttacctgagccgctcgctgtccgataagcaatatcggaagggcgaagacggaagcgtcgaggaattcgagcgcccttttcgcatcgtctccaaagtcatcgattgcgctgagtcgcaccagttttttcgtgacggcaagcaagtgtcgcttcgaattaccgaaggcgcgcgacaagagatcaaggcgaagttctatgaagatactcgcggcgtctcgacgttgacgattcaaaggtatacggttgagagtgggagtccgcacgccacctacttcaccttcattaacgacgaaattgctatcctgtacaacttcctcagaaacgttcagtttctgccgctaaaggacgaccagagcgcgaagctcgacgataaattcgtggaaagcctcgtgctgagtcgcgaacaggctctcgaactgctgaatcagcaacctgatcttcttgacgagttggtacgaagccgtgtcacggcacgtgacgttgccgagcttaaccttcgaaaggatcagcttcgcgagttcgaatgcttattgttcgacgagaagcactttgaacgacgacggctggagacgggcaaaggcgctggccccgaggcggtatggcaacagtacttcgaaaaaaacacttggattttcggctacggccttaactacgttttcaactcgacgctggacgaccggaagcttgagcaggtggtgagaggacacgacatcgcaggtgctggaaagcgcgtcgatgccctgctgaaaactcatgggctgatcagtgcggtatcgtttggggaaatcaaaacccatgccactccgcttctgaagcagattgccagtccgtatcgaaaggaatgctggcaaatctccgatgaactcgcgggcgcaattgcgcaggtacagcgttcggtacaagtctctcttagcagcattcgatcacggctcgatgtaaggggtgacgacggcgctcccacaggggagacggtattcctttaccagccacgctcgtttctcgtgatcgggtctcttgcagagttccgcacacagcacgggatcaacgaagaaaagtattcctcattcgagctcttccgcaagagcgtcaccgcacccgaaattatcacttttgacgaactcttcgaacgagcacgattcatagtcgaggccggggagcaccgcgacaggcgagaggatggcgcggtgcgtatgtag

SEQ ID NO: 61887 - DNA, 1242 bp, Burkholderia pseudomallei MSHR511; identical to SEQ ID NO: 61886

SEQ ID NO: 61888 - DNA, 1242 bp, Burkholderia pseudomallei MSHR146; identical to SEQ ID NO: 61886

SEQ ID NO: 61889 - DNA, 1227 bp, Burkholderia pseudomallei; identical to SEQ ID NO: 61882

SEQ ID NO: 61890 - DNA, 1224 bp, Burkholderia pseudomallei; identical to SEQ ID NO: 61885

SEQ ID NO: 61891 - DNA, 1242 bp, Burkholderia pseudomallei MSHR4304; identical to SEQ ID NO: 61886

SEQ ID NO: 61892 - DNA, 1242 bp, Burkholderia pseudomallei MSHR4308; identical to SEQ ID NO: 61886

SEQ ID NO: 61893 - DNA, 1053 bp, Burkholderia pseudomallei MSHR3016
gtgtcgcttcgaattaccgaaggcgcgcgacaagagatcaaggcgaagttctatgaagatactcgcggcgtctcgacgttgacgattcaaaggtatacggttgagagtgggagtccgcacgccacctacttcaccttcattaacgacgaaattgctatcctgtacaacttcctcagaaacgttcagtttctgccgctaaaggacgaccagagcgcgaagctcgacgataaattcgtggaaagcctcgtgctgagtcgcgaacaggctctcgaactgctgaatcagcaacctgatcttcttgacgagttggtacgaagccgtgtcacggcacgtgacgttgccgagcttaaccttcgaaaggatcagcttcgcgagttcgaatgcttattgttcgacgagaagcactttgaacgacgacggctggagacgggcaaaggcgctggccccgaggcggtatggcaacagtacttcgaaaaaaacacttggattttcggctacggccttaactacgttttcaactcgacgctggacgaccggaagcttgagcaggtggtgagaggacacgacatcgcaggtgctggaaagcgcgtcgatgccctgctgaaaactcatgggctgatcagtgcggtatcgtttggggaaatcaaaacccatgccactccgcttctgaagcagattgccagtccgtatcgaaaggaatgctggcaaatctccgatgaactcgcgggcgcaattgcgcaggtacagcgttcggtacaagtctctcttagcagcattcgatcacggctcgatgtaaggggtgacgacggcgctcccacaggggagacggtattcctttaccagccacgctcgtttctcgtgatcgggtctcttgcagagttccgcacacagcacgggatcaacgaagaaaagtattcctcattcgagctcttccgcaagagcgtcaccgcacccgaaattatcacttttgacgaactcttcgaacgagcacgattcatagtcgaggccggggagcaccgcgacaggcgagaggatggcgcggtgcgtatgtag

SEQ ID NO: 61894 - DNA, 1227 bp, Burkholderia pseudomallei 1026b; identical to SEQ ID NO: 61882

SEQ ID NO: 61895 - DNA, 807 bp, Salmonella enterica subsp. enterica serovar Typhi str. CT18; identical to SEQ ID NO: 61638

SEQ ID NO: 61896 - DNA, 807 bp, Salmonella enterica subsp. enterica serovar Typhi; identical to SEQ ID NO: 61638

SEQ ID NO: 61897 - DNA, 807 bp, Salmonella enterica subsp. enterica serovar Typhi; identical to SEQ ID NO: 61638

SEQ ID NO: 61898 - DNA, 807 bp, Salmonella enterica subsp. enterica serovar Typhi; identical to SEQ ID NO: 61638

SEQ ID NO: 61899 - DNA, 807 bp, Salmonella enterica subsp. enterica serovar Typhi; identical to SEQ ID NO: 61638

SEQ ID NO: 61900 - DNA, 807 bp, Salmonella enterica subsp. enterica serovar Typhi; identical to SEQ ID NO: 61638

SEQ ID NO: 61901 - DNA, 807 bp, Salmonella enterica subsp. enterica serovar Typhi; identical to SEQ ID NO: 61638

SEQ ID NO: 61902 - DNA, 807 bp, Salmonella enterica subsp. enterica serovar Typhi; identical to SEQ ID NO: 61638

SEQ ID NO: 61903 - DNA, 807 bp, Salmonella enterica subsp. enterica serovar Typhi; identical to SEQ ID NO: 61638

SEQ ID NO: 61904 - DNA, 807 bp, Salmonella enterica subsp. enterica serovar Typhi; identical to SEQ ID NO: 61638

SEQ ID NO: 61905 - DNA, 807 bp, Salmonella enterica subsp. enterica serovar Typhi; identical to SEQ ID NO: 61638

SEQ ID NO: 61906 - DNA, 807 bp, Salmonella enterica subsp. enterica serovar Typhi; identical to SEQ ID NO: 61638

SEQ ID NO: 61907 - DNA, 807 bp, Salmonella enterica subsp. enterica serovar Typhi; identical to SEQ ID NO: 61638

SEQ ID NO: 61908 - DNA, 807 bp, Salmonella enterica subsp. enterica serovar Typhi; identical to SEQ ID NO: 61638

SEQ ID NO: 61909 - DNA, 807 bp, Salmonella enterica subsp. enterica serovar Typhi; identical to SEQ ID NO: 61638

SEQ ID NO: 61910 - DNA, 807 bp, Salmonella enterica subsp. enterica serovar Typhi; identical to SEQ ID NO: 61638

SEQ ID NO: 61911 - DNA, 807 bp, Salmonella enterica subsp. enterica serovar Typhi; identical to SEQ ID NO: 61638

SEQ ID NO: 61912 - DNA, 807 bp, Salmonella enterica subsp. enterica serovar Typhi; identical to SEQ ID NO: 61638

SEQ ID NO: 61913 - DNA, 807 bp, Salmonella enterica subsp. enterica serovar Typhi; identical to SEQ ID NO: 61638

SEQ ID NO: 61914 - DNA, 807 bp, Salmonella enterica subsp. enterica serovar Typhi; identical to SEQ ID NO: 61638

SEQ ID NO: 61915 - DNA, 807 bp, Salmonella enterica subsp. enterica serovar Typhi
atgtatatgactggtcaagaaataaacgataaaaagaaagagtatcttgaattactagatcgagaagagaatgaacagatttatcaaacataccttgaagaaaatacaatgttcataccaagagaattcgagcaaaaccatggaattcacttcagtacggtatttagaaagttgcctctatcaagcgattataaacctgatttcgtatatttatcaaaaagctcggataactggaatgtagtattagttgaaattgaaaaaccatcgtcgaaatattttaaaaacaactctacaacttttcatgcagacttcaatcttgctttgcagcaaatgaacacatggagggcttggtttgatgatgaatcaaacagaaatcactttaaaaacaatatattgcagggatttatagaaccggcacatatggggagaaatccatttaatttcaagtatgtccttgttcatggtcgtagatcagaatatgaaaataatacacagaaaactgcactaatcagagggcaacagcgaagtgacttctcaataatttcatttgatagtttggctgaaaatatagagaaaaaatataagttatatgttggagtgaaaaaaaatagtcactatgaattaatatcaaaagaatttgttgatggagggatattttcatggatgaacatagattttttagcaattacacaaagtatatatgatgatgcaatcgcaaaatcagatagttggcatcactatataattaaagaaaatggaaccgtcaaaacaatggattatgctctccctcgaattaaaataatttga

SEQ ID NO: 61916 - DNA, 807 bp, Salmonella enterica subsp. enterica serovar Typhi; identical to SEQ ID NO: 61638

SEQ ID NO: 61917 - DNA, 807 bp, Salmonella enterica subsp. enterica serovar Typhimurium; identical to SEQ ID NO: 61638

SEQ ID NO: 61918 - DNA, 807 bp, Salmonella enterica subsp. enterica serovar Typhimurium; identical to SEQ ID NO: 61638

SEQ ID NO: 61919 - DNA, 807 bp, Salmonella enterica subsp. enterica serovar Typhimurium; identical to SEQ ID NO: 61638

SEQ ID NO: 61920 - DNA, 807 bp, Salmonella enterica subsp. enterica serovar Typhi; identical to SEQ ID NO: 61638

SEQ ID NO: 61921 - DNA, 807 bp, Salmonella enterica subsp. enterica serovar Typhi; identical to SEQ ID NO: 61638

SEQ ID NO: 61922 - DNA, 807 bp, Salmonella enterica subsp. enterica serovar Typhi; identical to SEQ ID NO: 61638

SEQ ID NO: 61923 - DNA, 807 bp, Salmonella enterica subsp. enterica serovar Typhi; identical to SEQ ID NO: 61638

SEQ ID NO: 61924 - DNA, 807 bp, Salmonella enterica subsp. enterica serovar Typhi; identical to SEQ ID NO: 61638

SEQ ID NO: 61925 - DNA, 807 bp, Salmonella enterica subsp. enterica serovar Typhi; identical to SEQ ID NO: 61638

SEQ ID NO: 61926 - DNA, 807 bp, Salmonella enterica subsp. enterica serovar Typhi; identical to SEQ ID NO: 61638

SEQ ID NO: 61927 - DNA, 807 bp, Salmonella enterica subsp. enterica serovar Typhi; identical to SEQ ID NO: 61638

SEQ ID NO: 61928 - DNA, 807 bp, Salmonella enterica subsp. enterica serovar Typhi; identical to SEQ ID NO: 61638

SEQ ID NO: 61929 - DNA, 807 bp, Salmonella enterica subsp. enterica serovar Typhi; identical to SEQ ID NO: 61638

SEQ ID NO: 61930 - DNA, 807 bp, Salmonella enterica subsp. enterica serovar Typhi; identical to SEQ ID NO: 61638

SEQ ID NO: 61931 - DNA, 807 bp, Salmonella enterica subsp. enterica serovar Typhi; identical to SEQ ID NO: 61638

SEQ ID NO: 61932 - DNA, 807 bp, Salmonella enterica subsp. enterica serovar Typhi; identical to SEQ ID NO: 61638

SEQ ID NO: 61933 - DNA, 807 bp, Salmonella enterica subsp. enterica serovar Typhi; identical to SEQ ID NO: 61638

SEQ ID NO: 61934 - DNA, 807 bp, Salmonella enterica subsp. enterica serovar Typhi; identical to SEQ ID NO: 61638

SEQ ID NO: 61935 - DNA, 807 bp, Salmonella enterica subsp. enterica serovar Typhi; identical to SEQ ID NO: 61638

SEQ ID NO: 61936 - DNA, 807 bp, Salmonella enterica subsp. enterica serovar Typhi; identical to SEQ ID NO: 61638

SEQ ID NO: 61937 - DNA, 807 bp, Salmonella enterica subsp. enterica serovar Typhi; identical to SEQ ID NO: 61638

SEQ ID NO: 61938 - DNA, 807 bp, Salmonella enterica subsp. enterica serovar Typhi; identical to SEQ ID NO: 61638

SEQ ID NO: 61939 - DNA, 1221 bp, Salmonella enterica
atgattgatttcataactactaatacagggattgtattgaaatatgatccagaaacagcaggtacatcttgggtttggaatgaattaaaaactcattcaactgtaacaatttctaaagttttttattttaatattagcgatctgctcaaccctccatcaccaaatcaagattttgatagttatttttatgagtttcagtttggaacttttaggggtgattatattgttataccaagttatattttaaatattcaaaatgatttatatataagtaaagatatcaatcttagtaggagcgtctttgctgcagagcgtaatatttctatttttggtcgactctcgcgaatattgaatcacagcaatccaatttatattggcggggattctgcggaggcaataccttctaatatttttagtgagttattaagcaaatttcctaactcgtacgaagtagatagatatgccgatgctagagtacatacgattcttgagcaatatttggaaggcatgaaagatgccagaggcctctacgaaacatatctcaataaaatagaaccaattagaaaaagtaatctcgacttaacaactatcaaagaattagaaatagaaaaatacactttaattagagataccattgagaatgctttaagtacgaaacagcactggtccgaaaaagattggcaaaaattgatggtgcaattccttcttcttttatttccaaagtatattcatgttattgaaaatattaccatccatgattactacagcatcccaggcaagaaaaaagatcgatacatagatataggcttggttgattctaatggtaatttagatattatcgaagttaaaaagccatttgacgacaagatcttgcgcaggacaaagtatagaggaaatagcataccaacgtctgagctaagcggtggtatcatgcaagctgaaaaatatctcttccatttatcaaaatggggaacaaaaggtgaagacaaccttacaaaaaaatatgcaagtgaactaccctctgggatgagcattcatatttctaaccccaaggctatcatcatagttggacgtgaccaaattggtaatggaaatatgacagaaaatcaaaaacttgatttcgaaattatcaagcggaagtataccaatatgatggacatcattacctacgatgacctattgagacggcttaaccgtacaatttcagcacttaaaaagtaa

SEQ ID NO: 61940 - DNA, 1221 bp, Salmonella enterica
atgattgatttcataactacaaatacagggattgtattgaaatatgatccagaaacagcaggtacatcttgggtttggaatgaattaaaaactcattcaactgtaacaatttctaaagttttttattttaatattagcgatctgctcaaccctccatcaccaaatcaagattttgatagttatttttatgagtttcagtttggaacttttagtggtgattatattgttataccaagttatattttaaatattcaaaatgatttatatataagtaaagatatcaatcttagtaggagcgtctttgctgcagagcgtaatatttctatttttggtcgactctcgcgaatattgaatcacagcaatccaatttatattggcggggattctgcggaggcaataccttctaatatttttagtgagttattaagcaaatttcctaactcgtacgaagtagatagatatgccgatgctagagtacatacgattcttgagcaatatttggaaggcatgaaagatgccagaggcctctacgaaacatatctcaataaaatagaaccaattagaaaaagtaatctcgacttaacaactatcaaagaattagaaatagaaaaatacactttaattagagataccattgagaatgctttaagtacgaaacagcactggtccgaaaaagattggcaaaaattgatggtgcaattccttcttcttttatttccaaagtatattcatgttattgaaaatattaccatccatgattactacagcatcccaggcaagaaaaaagatcgatacatagatataggcttggttgattctaatggtaatttagatattatcgaagttaaaaagccatttgacgacaagatcttgcgcaggacaaagtatagaggaaatagcataccaacgtctgagctaagcggtggtatcatgcaagctgaaaaatatctcttccatttatcaaaatggggaacaaaaggtgaagacaaccttacaaaaaaatatgcaagtgaactaccctctgggatgagcattcatatttctaaccccaaggctatcatcatagttggacgtgaccaaattggtaatggaaatatgacagaaaatcaaaaacttgatttcgaaattatcaagcggaagtataccaatatgatggacatcattacctacgatgacctattgagacggcttaaccgtacaatttcagcacttaaaaagtaa

SEQ ID NO: 61941 - DNA, 807 bp, Salmonella enterica subsp. enterica serovar Typhimurium; identical to SEQ ID NO: 61638

SEQ ID NO: 61942 - DNA, 807 bp, Salmonella enterica subsp. enterica serovar Typhimurium; identical to SEQ ID NO: 61638

SEQ ID NO: 61943 - DNA, 807 bp, Salmonella enterica subsp. enterica serovar Typhi; identical to SEQ ID NO: 61638

SEQ ID NO: 61944 - DNA, 807 bp, Salmonella enterica subsp. enterica serovar Typhi; identical to SEQ ID NO: 61638

SEQ ID NO: 61945 - DNA, 807 bp, Salmonella enterica subsp. enterica serovar Typhi; identical to SEQ ID NO: 61638

SEQ ID NO: 61946 - DNA, 807 bp, Salmonella enterica subsp. enterica serovar Typhi; identical to SEQ ID NO: 61638

SEQ ID NO: 61947 - DNA, 807 bp, Salmonella enterica subsp. enterica serovar Typhi; identical to SEQ ID NO: 61638

SEQ ID NO: 61948 - DNA, 807 bp, Salmonella enterica subsp. enterica serovar Typhi; identical to SEQ ID NO: 61638

SEQ ID NO: 61949 - DNA, 807 bp, Salmonella enterica subsp. enterica serovar Typhi; identical to SEQ ID NO: 61638

SEQ ID NO: 61950 - DNA, 807 bp, Salmonella enterica subsp. enterica serovar Typhi; identical to SEQ ID NO: 61638

SEQ ID NO: 61951 - DNA, 807 bp, Salmonella enterica subsp. enterica serovar Typhi; identical to SEQ ID NO: 61638

SEQ ID NO: 61952 - DNA, 807 bp, Salmonella enterica subsp. enterica serovar Typhi; identical to SEQ ID NO: 61638

SEQ ID NO: 61953 - DNA, 807 bp, Salmonella enterica subsp. enterica serovar Typhi; identical to SEQ ID NO: 61638

SEQ ID NO: 61954 - DNA, 807 bp, Salmonella enterica subsp. enterica serovar Typhi; identical to SEQ ID NO: 61638

SEQ ID NO: 61955 - DNA, 807 bp, Salmonella enterica subsp. enterica serovar Typhi; identical to SEQ ID NO: 61638

SEQ ID NO: 61956 - DNA, 807 bp, Salmonella enterica subsp. enterica serovar Typhi; identical to SEQ ID NO: 61638

SEQ ID NO: 61957 - DNA, 807 bp, Salmonella enterica subsp. enterica serovar Typhi; identical to SEQ ID NO: 61638

SEQ ID NO: 61958 - DNA, 807 bp, Salmonella enterica subsp. enterica serovar Typhi; identical to SEQ ID NO: 61638

SEQ ID NO: 61959 - DNA, 807 bp, Salmonella enterica subsp. enterica serovar Typhi; identical to SEQ ID NO: 61638

SEQ ID NO: 61960 - DNA, 807 bp, Salmonella enterica subsp. enterica serovar Typhi; identical to SEQ ID NO: 61638

SEQ ID NO: 61961 - DNA, 807 bp, Salmonella enterica subsp. enterica serovar Typhi; identical to SEQ ID NO: 61638

SEQ ID NO: 61962 - DNA, 807 bp, Salmonella enterica subsp. enterica serovar Typhi; identical to SEQ ID NO: 61638

SEQ ID NO: 61963 - DNA, 807 bp, Salmonella enterica subsp. enterica serovar Typhi; identical to SEQ ID NO: 61638

SEQ ID NO: 61964 - DNA, 807 bp, Salmonella enterica subsp. enterica serovar Typhi; identical to SEQ ID NO: 61638

SEQ ID NO: 61965 - DNA, 807 bp, Salmonella enterica subsp. enterica serovar Typhi; identical to SEQ ID NO: 61638

SEQ ID NO: 61966 - DNA, 807 bp, Salmonella enterica subsp. enterica serovar Typhi; identical to SEQ ID NO: 61638

SEQ ID NO: 61967 - DNA, 807 bp, Salmonella enterica subsp. enterica serovar Typhi; identical to SEQ ID NO: 61638

SEQ ID NO: 61968 - DNA, 807 bp, Salmonella enterica subsp. enterica serovar Typhi; identical to SEQ ID NO: 61638

SEQ ID NO: 61969 - DNA, 807 bp, Salmonella enterica subsp. enterica serovar Typhi; identical to SEQ ID NO: 61638

SEQ ID NO: 61970 - DNA, 807 bp, Salmonella enterica subsp. enterica serovar Typhi; identical to SEQ ID NO: 61638

SEQ ID NO: 61971 - DNA, 807 bp, Salmonella enterica subsp. enterica serovar Typhi; identical to SEQ ID NO: 61638

SEQ ID NO: 61972 - DNA, 807 bp, Salmonella enterica subsp. enterica serovar Typhi; identical to SEQ ID NO: 61638

SEQ ID NO: 61973 - DNA, 807 bp, Salmonella enterica subsp. enterica serovar Typhi; identical to SEQ ID NO: 61638

SEQ ID NO: 61974 - DNA, 807 bp, Salmonella enterica subsp. enterica serovar Typhi; identical to SEQ ID NO: 61638

SEQ ID NO: 61975 - DNA, 807 bp, Salmonella enterica subsp. enterica serovar Typhi; identical to SEQ ID NO: 61638

SEQ ID NO: 61976 - DNA, 807 bp, Salmonella enterica subsp. enterica serovar Typhi; identical to SEQ ID NO: 61638

SEQ ID NO: 61977 - DNA, 807 bp, Salmonella enterica subsp. enterica serovar Typhi; identical to SEQ ID NO: 61638

SEQ ID NO: 61978 - DNA, 807 bp, Salmonella enterica subsp. enterica serovar Typhi; identical to SEQ ID NO: 61638

SEQ ID NO: 61979 - DNA, 807 bp, Salmonella enterica subsp. enterica serovar Typhi; identical to SEQ ID NO: 61638

SEQ ID NO: 61980 - DNA, 807 bp, Salmonella enterica subsp. enterica serovar Typhi; identical to SEQ ID NO: 61638

SEQ ID NO: 61981 - DNA, 807 bp, Salmonella enterica subsp. enterica serovar Typhi; identical to SEQ ID NO: 61638

SEQ ID NO: 61982 - DNA, 807 bp, Salmonella enterica subsp. enterica serovar Typhi; identical to SEQ ID NO: 61638

SEQ ID NO: 61983 - DNA, 807 bp, Salmonella enterica subsp. enterica serovar Typhi; identical to SEQ ID NO: 61638

SEQ ID NO: 61984 - DNA, 807 bp, Salmonella enterica subsp. enterica serovar Typhi; identical to SEQ ID NO: 61638

SEQ ID NO: 61985 - DNA, 807 bp, Salmonella enterica subsp. enterica serovar Typhi; identical to SEQ ID NO: 61638

SEQ ID NO: 61986 - DNA, 807 bp, Salmonella enterica subsp. enterica serovar Typhi; identical to SEQ ID NO: 61638

SEQ ID NO: 61987 - DNA, 807 bp, Salmonella enterica subsp. enterica serovar Typhi; identical to SEQ ID NO: 61638

SEQ ID NO: 61988 - DNA, 807 bp, Salmonella enterica subsp. enterica serovar Typhi; identical to SEQ ID NO: 61638

SEQ ID NO: 61989 - DNA, 807 bp, Salmonella enterica subsp. enterica serovar Typhi; identical to SEQ ID NO: 61638

SEQ ID NO: 61990 - DNA, 807 bp, Salmonella enterica subsp. enterica serovar Typhi; identical to SEQ ID NO: 61638

SEQ ID NO: 61991 - DNA, 807 bp, Salmonella enterica subsp. enterica serovar Typhi; identical to SEQ ID NO: 61638

SEQ ID NO: 61992 - DNA, 807 bp, Salmonella enterica subsp. enterica serovar Typhi; identical to SEQ ID NO: 61638

SEQ ID NO: 61993 - DNA, 807 bp, Salmonella enterica subsp. enterica serovar Typhi; identical to SEQ ID NO: 61638

SEQ ID NO: 61994 - DNA, 807 bp, Salmonella enterica subsp. enterica serovar Typhi; identical to SEQ ID NO: 61638

SEQ ID NO: 61995 - DNA, 807 bp, Salmonella enterica subsp. enterica serovar Typhi; identical to SEQ ID NO: 61638

SEQ ID NO: 61996 - DNA, 807 bp, Salmonella enterica subsp. enterica serovar Typhi; identical to SEQ ID NO: 61638

SEQ ID NO: 61997 - DNA, 807 bp, Salmonella enterica subsp. enterica serovar Typhi; identical to SEQ ID NO: 61638

SEQ ID NO: 61998 - DNA, 807 bp, Salmonella enterica subsp. enterica serovar Typhi; identical to SEQ ID NO: 61638

SEQ ID NO: 61999 - DNA, 807 bp, Salmonella enterica subsp. enterica serovar Typhi; identical to SEQ ID NO: 61638

SEQ ID NO: 62000 - DNA, 807 bp, Salmonella enterica subsp. enterica serovar Typhi; identical to SEQ ID NO: 61638

SEQ ID NO: 62001 - DNA, 807 bp, Salmonella enterica subsp. enterica serovar Typhi; identical to SEQ ID NO: 61638

SEQ ID NO: 62002 - DNA, 807 bp, Salmonella enterica subsp. enterica serovar Typhi; identical to SEQ ID NO: 61638

SEQ ID NO: 62003 - DNA, 807 bp, Salmonella enterica subsp. enterica serovar Typhi; identical to SEQ ID NO: 61638

SEQ ID NO: 62004 - DNA, 807 bp, Salmonella enterica subsp. enterica serovar Typhi; identical to SEQ ID NO: 61638

SEQ ID NO: 62005 - DNA, 807 bp, Salmonella enterica subsp. enterica serovar Typhi; identical to SEQ ID NO: 61638

SEQ ID NO: 62006 - DNA, 807 bp, Salmonella enterica subsp. enterica serovar Typhi; identical to SEQ ID NO: 61638

SEQ ID NO: 62007 - DNA, 807 bp, Salmonella enterica subsp. enterica serovar Typhi; identical to SEQ ID NO: 61638

SEQ ID NO: 62008 - DNA, 807 bp, Salmonella enterica subsp. enterica serovar Typhi; identical to SEQ ID NO: 61638

SEQ ID NO: 62009 - DNA, 690 bp, Clostridium argentinense CDC 2741
ttgtatcatcaatatctaaaagcagcaaggcattatataagtctatttcctaataatttacttgatattgttgaacttgaagatgaacaaaacttgagacagaaattgattggatttcaaggtgtattagattctgaagatactagtgaactagatattctaagatatattatggatcatcaggcttattttataatagggtctatactaaaaagcaattatagtttcgggcatcatgatacatttttatttccagaatttatgttaggaacttcgtttaaagctgattatttagtagtaggaaagagttcaggcggatatgaatttgtgttcgtagaatttgaaaatcctactaaaaatattacaataagtgatggagaacttggaagcacattccgtaagggattgaaacaagtacatgattgggagcgatggttacagtcaaattttatgaatcttaaggaagtctttaataagtataaaaattctaatcaatcattacctgaatgttttttaacttatgatagcacaagaattcattatgttgttgttgcaggaagacgtgaggattttaatgaaaatacttatagaataaaaagaaggcatagagatacagaaaaaataacgatattacattacgataacttatgtgatagtgctaattctgtaattggtaaagttacatattag

SEQ ID NO: 62010 - DNA, 753 bp, Clostridium scindens ATCC 35704; identical to SEQ ID NO: 61828

SEQ ID NO: 62011 - DNA, 1050 bp, Clostridium spiroforme DSM 1552
atgaaaattaatgattttatacatgtatataagagaactatttgtagagttcgtacatatatgaatgataataaaaaatatattttattaactgaattagatgaaaatcaaggtccttctgtcacaaattccattgaatacttaattcagtctcttattaatcaaggacatgctgaattaacagatacttttatagaacattatcctaagattcaatttttttcagaagaatttgatgaagtaaaattagatgaatttaattttccaacttggcatggtcgaagcaaagagaaagtgatgctattaattaatgaaaatccagatgattttgatactgatacaaaaaaagatcaaaaaagcaaaatagatattttaaaaaataaatatgaagatttaaaatttatggataataaatttatagaagatccttctataacagctcgtagagagaaaataagaaaaaatatgataactaaagagtatttaagaaatctaattaattctaaacctaaagagtcggaaataggaagcatactaaagaaagatttatcaatttttgctgaagtttatgctagtccagaagatgaatatatttgtttttcggaatttccttttttttcaaagagaatagattttgttgtatttacaggtagatcatcaatgaagatatatttaattgagattaaaggggctgataaaaaaatattggtaaataattcttatcaaccatttactagtaagttttttgaaggagttacacaattacacaacgaatttgattatatacataacaataaagagatggtaagaaaagaaatgcataggattagacaagcagctataaatgatgaaataccttgttttaagggacctaaatacgatttgcaagttgattcaaataaaagtgttaaattttatggtgttttgatttgtggatatacaaacgatgatttagctgaaagcaataagcgacattctctggaagatagatataatgataattatattattgaaacttgggatagctttattaataaattaactcgataa

SEQ ID NO: 62012 - DNA, 1113 bp, Rhizobium etli bv. phaseoli str. IE4803
gtgatcatcgaggacgatggcaaccgttctgtcgagtatatcccgccgtttccgtcccggaacaggatgaaggtgaagttcaccttcatcaccgaacgcaacgagatcaccaaaatcgagttgcgcaaatacaaggaatacaaggacggctggcgggagcagtggtcaggggcggatgatccgatcggcctgacgcacttctcgttccagaagatcatggcgctgctccagttgatgacagagctggatctggccagcgtcacagagcgcaggctagcgatccataacggccccggccctatcgacaaggaaacggctgacaaggttaagtccatcgttgccttgccggaagggcataagatactcgacgaggtcttgcaaagcggcctgatccagtcccacgacatcgtcaacatcggttatcgcaaggcgcaactcgccatcttcaagcggctgctggaagagccggattacctcgacgcttacaaggcggaggaaggcttgacgacgccacaggaggaaaaggtctggcagcattttttccagaagaacccttggatcttcggcttcgggttggattaccgctacctgagcatcttgcagactgaggcgcatatagccgataccgatctgggcggcaatgatgccgcgatcgtggacttcctgatgggctgcacgaacttcacggtactggtcgaggtgaaaaagccgtccacgcctctgttcctgaaaaatcagaaccgggcgaatagctggcggctgtcgagggatttcacggatgccgtttcgcaaatcctggagcagaaggcgagctggcagcttaaggccgagactaacgcgcacaagaacctcaatgctgctggggagctactgcgccaacgcaccctagaccccaaatgcatcctgatcacgtcgtccagcggggcgttcgccggttcggaaagggagcgcgagatcaagctcaggactttcgagctattccggcgggacacccggaacattgagatcgtcacctatgacgagctgtatgagcgggcgtgcttcatcgtttccgacaaaggctctggcagccatgcaaacaccaatgccagtgatgccgattatcccttctga

SEQ ID NO: 62013 - DNA, 1008 bp, Yersinia aldovae
atgagcattgaccattcatatttgattggaagagatgatgttaatgatttggtattaaatatatcaggtcttgatgcagactctagggatgtatctacgttaagtgcaaatatttttgctcattgcactagcactggatctccaaaatttacttgccaattaaatattggtcacttgcaaagtctttatcaacacctttcacaatatagtgttattcgtgatactgcatctgtaagtactggtcgttttatagagatccaaagcaatcatgaggaaataatgagagttttggagcattcggataacacttctttagtattagcattacagcacatcgtaagtaatagacttacaaatactgatattaatacgattttagggcgaaaagatgctcttgatgagtatgagcgaatgtatgaaaatgctaatgattataatgaaatagactggcagcgtttttttgaaaggaatgagtggatatttgggtatggtttaaattataaatatttaaaaatcctacagagagaagcacacatctctcatacagatctcaatgggtctaatgatgttataacggattttttattatcagactctagatttactaaaattgttgaactgaagacacctacaacaaacttatttgtcaatcgccagaatagagctgattcttggcgcttatcaagtgagcttactgatgctgttagtcaaatattggcacaaaaggcaaattgggaaatagaaagccaaagaagtaactacacctctgatggggatttgataagagaagaaacacatgatgccgaatgtatattagtaatcggatctatatcttctattagtgggagtgaccgcgaaaagttaataaaaagaaaaacactagagctttatcggcgtaatttaaaaagtattaacattctgttttatgatgaactattagaacgcgctcgatttattgtaagaagcgccgaaattattgaaaatgccattgttgaaattttagaataa

SEQ ID NO: 62014 - DNA, 1008 bp, Yersinia aldovae
atgagcattgaccattcatatttgattggaagagatgatgttaatgatttggtattaaatatatcaggtcttgatgcagactctagggatgtatctacgttaagtgcaaatatttttgctcattgcactagcactggatctccaaaatttacttgccaattaaatattggtcacttgcaaagtctttatcaacacctttcacaatatagtgttattcgtgatattgcgtctgtaagtactggtcgttttatagagatccaaagcaatcatgaggaaataatgagagttttggagcattcggataacacttctttagtattagcattacagcacatcgtaagtaatagacttacaaatactgatattaatacgattttagggcgaaaagatgctcttgatgagtatgagcaaatgtatgaaaatgctaatgattataatgaaatagactggcagcgtttttttgaaaggaatgagtggatatttgggtatggtttaaattataaatatttaaaaatcctacagagagaagcacacatctctcatacagatctcaatggatctaatgatgttataacggattttttattatcagactctagatttactaaaattgttgaactgaagacacctacaacaaacttatttgtcaatcgccagaatagagctgattcttggcgcttatcaagtgagcttactgatgctgttagtcaaatattggcacaaaaggcaaattgggaaatagaaagccaaagaagtaactacacctctgatggggatttgataagagaagaaacacatgatgccgaatgtatattagtaatcggatctatatcttctattagtgggagtgaccgcgaaaagttaataaaaagaaaaacactagagctttatcggcgtaatttaaaaagtattaacattctgttttatgatgaactattagaacgcgctcgatttattgtaagaagcgccgaaattattgaaaatgccattggtgaaattttagaataa

SEQ ID NO: 62015 - DNA, 1071 bp, Yersinia frederiksenii ATCC 33641
ttgaaaattttagatttagttcacgattttggcaataaccgaacttcaggagttggtggaatttgcagagtcagatgttacataaacaaaaaagatattattgtgcttttaaccgacttagatgcattaaacgatggacagtcagtaaccaatgcagtagaaaaaataataagttcagtctatgaacatggggtagttacacaaccagccattttcatagagcactacgaaagaaactcacataagcttgatacgtttgatatagtgaacataaacccaaaaacagagtggatctcaatatcaagagaaaaagtgttagacttactcggttgtgatgaagatgagctttctgaacgcagcataaataatgggaggatatatgagaaagctgataaaataaggtacgctcgagatccttttatagattcaagttatataccttcaccagaattcatttctcgtaagtgcgaaatattaaactctatgattcccaagtcttcaattgctcagctaattgagtcaggtgcaaaggaacaagaaattcagcgagttataaaaagtgatttgtctttaattgccgaggcttacgtcggtggtaatgaatatatttgcttttccgaatatccattagctgacggatcagtagattttgtaattttcacaggcaggtcgcgtatggatatcatcctaattgaagtgaaaggggctaactttaacttagttaatgcgaataactacggttcatttaaccataaagttagagatgccgcagagcagatcgaaaaaaggcttggtctagtctatagggattatgaatcgtttcggaaagatgctcatgaaaaacgaatgaaagttttatcaggtgatttaatccataatgcattcgtcggacccaaatcttgtaaacaagtagatccaaataaagatgtatacgttcgttctattgtcattggggggcgaacagtaaatgatttagaagaaagtaaaaaacgccatgactatgaaattcattcaactccgcctatccgtattgaatcttgggatacttggcttaggagattaacacgatag

SEQ ID NO: 62016 - DNA, 1071 bp, Yersinia frederiksenii ATCC 33641; identical to SEQ ID NO: 62015

SEQ ID NO: 62017 - DNA, 1158 bp, Yersinia frederiksenii
atggacagctacatggagccagatccggagaaaacttatataagccccagcttgccatcttttggtaacaaagatttgaaaatacgaattgcctcaaaagcgatagttagtaatgaaggatatgagttcgcaaaaattaaggatgaaattatactcaggcacaagctagatgcatcaacttatataacagcgaagttttttgaaagtagcaaggaaatatttgttctatctattcaaaagttttccacgcaaactggacagccttatggttctggtttttcttttataggtgatgaaattggtaagtttattgaatttctagctaacattaattcaatgggctttaacggcaatggccccatgaaaattacggatgaggagcttagggaaatcgttttaactaataaccaagcttcacaacttttaaatgggaatgaggtggctatctctgaggcgcttaaaacacatgtgactaaaaaagatattatatcaatagcataccgtaaaaaacaacttgatacatttaatcgacttcttaatgatgaagcattttttgaatatgctaagaaagaaaaaaactgttcgaatgaggctttgtggcaaaagttttttgaaaaaaatccttggatttttggatatggattaagttatatctacttatcaagtttgaacgataagaaaatagagcaagttgttcagggagtgcagattggccaacatggaaaacgagttgatggattgctgaaaacaagaggtgcaatttctaatctatgtttcgttgaaataaaaacaaatacaactggtttactagctaatactccatatcgctcaggttgttgggccccatctagtgaattaactggtgcggtggcacaaattcaagggacagtttcttacgctatggattcaataaaaaggaatttaaatttaacagattcttatggggatccaacgggagaggaactatttaattttaatccaaaatcatttttggttgtaggtaatctctctcagttttcatctgataatggtatcaatcatgataaattgcggtcgtttgaaaattttagaagcaatttgatacgtccagaagttatcacttttgatgagctgtatgaaagagctcggtttattgttgcatttagcgaaaatatatga

SEQ ID NO: 62018 - DNA, 675 bp, Vibrio navarrensis; identical to SEQ ID NO: 61761

SEQ ID NO: 62019 - DNA, 1090 bp, Vibrio navarrensis
ctttcttttgagtttggaggtaaatttgtcagtaggctcaattggtaaaaagcaagcaaagtctggaaacgttgggtacagtgatccagtaacgatccatgaaaccacacgttcaagaatagactttgttccattttatataactaaatctcatggcgtagagcttgctggaaagatcatcacgtacaagaaagacaaaacaccttttgggtggcttcctgttgatgagaaatctgtgtcgttacaagcaggttcgttactaaaactatacgaagcaattaaatctcacgttgcggttaaagatgaaacagagggtgactttcttctaattcgtgtcaatgacggtacagctcaattagctgaacatgaccctcaatctgtagcaaatgcgttaacagcagtgttatctcaaactgaaatcgttaagcatctggaaaataccgacctatcggatgaattagcaaatgcattaaaaggttctatccgcctaaaagacatgaagtcagcagttaatcaattgcgcaaccatctaaacaaccaagaaaacgatgaaaagatataccaaaagtggtgtgaggaatatccttgggcatttggtaatgcatacgtcgttaacgacgatgttagagctatctcccctcacgaccacttagacttgatgctatccaatgttattggcggctttagggatatcatcgagttgaagcgcccaaatatggaagttttaaactacgatagttctcatcggaatttctatttttcttctgaagtttctaaggcaattggtcaatgccataggtatatggatgtctttaatgatgtcgcatccaaagggttagcagatcaccctgaaattgttgcatatcatccaagagcaacgattgttattggtcgttcttacgattggactcctgaaaagcacaaagcgctacatggcttgaattcacgactaaccagtttatcaataatgacttacgatcaccttttgaaccaaggagaaaggcttgtaaatctacttgaacctagtcagtgtactgaaagtgaaagcaattctgtagataatgatgattggttagatttcgagttttag

SEQ ID NO: 62020 - DNA, 1086 bp, Methylobacterium radiotolerans JCM 2831
atggagcccacgaaagtctacgtcgacaagcgagacccgtccgttaacccgaacctcctcgggcggaaggagtgcgtacttaaagatgggcgggcagaccggtcaaaggtccgccggatcgcgcggctgacgagcgttcgcgaccagcacaccggcgagcaccaccacgacgcgctcaccatcaagaccatcgccctgtccaagacggcgtgcgaggtcgatccaacacgcagcgtgcagctcggcggcgatgagacccggcgcctcgccgatttcctggcggcgtccgggagcggctcggtcccgtccgacaccggcggctacatcgtcatgccgaccaagggcagcccagccgacgtgatccgcgccctgcaggacctgaccgccacggaccgcatggacgcgctggcgatgctgctgcgagaggcgtccgagaagccggccatcctcggtgacctggtgtcacgcctggcggcggacgagcgcttcatcgagaaagccgcggccgccatgaacctcgccgtctaccgacaggtcctgttccgcctggagacgatgatcgatgacccgaccgtcaaggaagggcagttccaggcgcttctggaggagcagccgtggctgttcggcagcgagtattcctgcatcctcgaccgccgccgctggacccgggacgaaatcaccgacttcgtgcctcggcggacgacggacggccgcgtcgagctcatcgagatcaagaccccactgcacggcaagtcgctcttcaactgggatgcatcacacaaggtctgggctccgggcgtcgagctatctcgcgtcgtcgctcaggcggagaactacttggagaagctcgaccgaaaccgcgacggcatcctcgccaacgaccgcgaggacgtcaccaagatgcgcgcgcgcatcatcatcggaagggacagggacgatgaccagcgggacgccctgcgacgccacaacggccatctccaccgtatagagatcatcaccttcgacggcctgctggccatcgcgaagcgggtcttgaggtacttcgaggacgcgcctgcagagcagtgtgtcgtcttgggaacttga

SEQ ID NO: 62021 - DNA, 1401 bp, Pseudomonas viridiflava ICMP 13104
atgatgcatagtcagccttccaggctaagggagcggcgcgtgaaagatggcagtgatgagtcttctcaaacgaagaagcaacagcgaggacgggcgaagagcttgccagagcctagtatccgaaagggggtcgtgaatcgagctttttacgtcgagctatcagtgccgtcctcgacggccggcgaacaccctacaaatagctcatctggcgctgactcgcatgtgcttgcgaggatttttgcagaccgaatcgagacttggccaacagtcatcaaccgcgtcttcttcttcttgttctcagaatatacgcagcatagggcgccttaccctctcattgtatatcggcttccaaaaccctttgctgggccactgccaagcgatcttagctcggcggtatctcacatcgaacgcgtattcgactccgggatttttaattgctgcgccaaggggctagggttcgaggcatccttcaactcggtactcagcgcgcttcagatcgacaagagtgtcgataccattgaaatacatttcgaaggcgacctgttcaggcgcgggaacgtagtgtgcgtttcggaagccaccctcaatgatctcaggacggcgttcaacaccggcgatgctttttggaatcgtcaaaaagaggggtcacgaaggtcatacatttacgaagaaattgtggaaaagctagctcctgttctcaaacattctggcgaccgtgggggtcattatctcagcgggtttagtgaagccgagcgagattatctagcgacactgcgagcatacattcgggacttgcctctggggatgccagaagacttcaaggcaatgcgggaatcgatggatcggggcgagctataccgcatgatccaccattatcaaataatgctggcgcaaaacctcagcgcaaccgagtggcaatcgttcctgaaccataacatcgatttggtcgtcaaatgcttgcagcatccggactgcggcgtgctggatccgccgctgggtgcgcaacccaaatccgttgtcgggagcccaatcatttacgggcatgaagcgttggtgctgactgtgagatcgcctcatgcaacgctcatgatacgtgacagcttaggtcgtgttggtgattctgatctagaaggttctggggagccgccaggaaggttgataccccatcccgagttggcatctgcgatagaggaaggtcgaaagctgcggcctgatattccaggacagatccaaaaaccgcggtgcgtcgtagttgccgggctcatgccggcgaacgtggatgaagcggctgcctacataggttaccgagaagcggctaggcaatacaacgggatccatttggtggacttcggcacgctgctgaacgggttacgcttgcttgcctcggcaatagagacttga

SEQ ID NO: 62022 - DNA, 1392 bp, Brevibacterium casei S18
gtggctcgattcggaaacgaccagacgaaaatcggtcgcctcgacgtccgcacgacgaatgaggatggccgggttgaggccttcttcgttccgaccgagctaccgtatgaagagtcctcggcgcaccggcgtctggctgatggtgtgaagctcgtcgagttcgaagccggggcgggaaccctgaagattcaccccatcaacacactttcaaaccacagcgactaccttggcccgaagtacgaccaggtgcagacgctttccctggaaacgtcgttgctggatgagtactacgagggctccgacctggagtcaatctttgagacgctaccgcccggattcgtcaaggacttcgcctacggcctcgggttgctcaaggattgcaaccggctgattcggttgatcgaagccaacactccctgtacagagatcatcttcaccgacggcaacagtgccgccattgacgggacagagttccacctcggcttatcgcgcttcgctgccatctgggccgagatcggtcgaatcaacgaccgaggaaatcgtgcggcgggtcgagtcaaggacgtcttcgtacacaacaatctcgctgcggcacttggtctcgccagcgcagacttctcgcttgggcgacacccggactcgcgcgtgatcgcgaaggccgccaacgggatcgaagaactcagtggcgtagaacgtgatactttggtcgaagcggtcgtgtccgaatcggcagcgatagcagcggaatcaccccagaagtttcagaaactcaagcgagacatcgatctcgtcagcctcgaccgcctcatcgaggcgtacgcagaggccttggaacagggcaaggccgagccgtactggcaggcctttttcgacgacaacgccttcgcgctgcagcaggtcttcggagccccgatggtcagtgtgcgctccggagcgacggtaggcggtcgcggcctgtcgggaagcggcgacaagatcgcggactacttgttcaagaactcgctcacgaacaacgtcgctctggtggagatcaagaagccaaccacgcagctgctggaggctcgtgagtaccgtcagggtgtgttcggtccatcgaaggaactcaacggcgcagtctcccaggtgctcgatcaggcgtacaacctgacgaagaacctcaccggactgaaggagagctcgcgtcagtgggacttggagtcgtacgcaatctcctgcttcgtggttgccggacgcacaccctctgccagcgatccggtaagacaaaagtcattcgagctgtatcgcgcgaactcccgcagcgtgaccatcgtgacctacgacgagattcttgagcgactgagactcctccgtgacttcctcacaccggcctcacccgaggccgaggaggtctga

SEQ ID NO: 62023 - DNA, 822 bp, Lysinibacillus macroides
ttggatggggtatgtgatgtgaaaatatattcaagagattttacagttctaacaaaagaggaattgaaggaatgggaaatcttaaaggataaagaggttgttcataggtcggggaattttgtcgttaggagaagtaagtatagagaatatccagccgcagtaagacactatgaaagtttgtttcccaataatcatttggatatagtcgatctacaaaagatagaacagcttacgaagttaactgaaaaatttcatcaaatgatagacaatcctaactcaaatgaaagatctattctcaattggattcgtgaaaacagagcttactttataatcgcatctatcatgaagggcccttataatttcggtcatcatgatgcatttatttttccagaattccaattaggaaatacatatcaagttgattacctaattgttggaaggaattctgggggttatgaatttatttttgtagagttggaacatccgaataaaaatattacattggctgatggtcatttaggtgatgcaattagaaaaggagagaggcaagtaatcgactggaaatactggttagaagcaaattatgcaacactttatgaaacgtttaataagtataaagatcccaagaagttgttaccagttgagtttatgaaatatgacagtacccgtattcactatgctgtaattgctggaagacgaaatgacttcaacgaaaaaacttatcaattaaaacgacaaaagttaacggaaggtatcttattactgcactatgataatctctatgattcggcaatggcgttaattggtgaatctacatattaa

SEQ ID NO: 62024 - DNA, 795 bp, Pelodictyon phaeoclathratiforme BU-1
atgaaaatttctgacgaggaactgcgccgagtcgtactttccaacgtccaagctcaagctcttttccaagataatcaagagctattcgctgaagtcattcgttcagccgtaacaaaggaggatgttgtagctgtcgggtatcgcaagcgtcaattgcaggttttccagcaacttcttgaaaatgacgaatacttcaaaacggtcaagacgcagaagcaatgtaacagcgaagcagtgtggcaaaaattctttgagaaaaatccgtggatttttggctacggattaagctacatccaattatccacccttgatgacaggaaacttgagcaagtggttcacggtcacacagtatcagagcacggaaagagagtggacgcgctgcttaaaactcgcggggttatctcaagcctctgcttcgtcgagataaagacacacaagacagagttactcaaatcccggccctatcgggttggttgttggtcaccatcagatgagctttcgggcgctatcgcgcaggttcaaggcaccgttgtactcgccactgaaacgataaaatccaaactcgctctcacggatgatgttggaaatccaactggcgaagaggctttcaactacatgcccaaatcttttcttgttgttggcagccttcacgagttcgtcggtgaccacggcgtaaatcaggagcggtatcgttcgttcgaactgttcaggcgcaatacaaacagcccggaaatagttacgttcgacgaactttacgaacgagcacgattcatcgttcaccaaaatgaaacctaa

SEQ ID NO: 62025 - DNA, 459 bp, Streptomyces ghanaensis ATCC 14672
gtggactgccgagccctccacgaggcgatggacaacgccaccgaggaacggcccatgcaggtcgtcctcgagaaccacccagccctcctggccaacgtgatcgccggccaccacggaatctgggtccgcccgcaggtccgtctgggcgataggtacgtctcggacttcctcatcgccagtcggacctcggcgggccttcgctggcacctcgtcgaactggaaagccccaccgagcggcttaccaaccctggaaaccagcgtgagtcgcccacgctgcgccatgccatcgaccagatcccaggactggcgcgagtggctgaaggtcaacctcctgcccgcccgggctacgctcccgggcatcaccgtggatgtacgcgggctcatcatcatgggccgggaggacgtgacggacagcgcccgcgaaatccgggatcgccattccgcgaacgaccggattga

SEQ ID NO: 62026 - DNA, 951 bp, Mycobacterium abscessus
atggtcaagaacctcgtcttctccgacggtcagcaacgaacacatgctgaactcgtgaactcccttgaaaaggtcgtcgatcaagcgaggcctctagctgagaagtacgagggtttcaatgagtacgtggttgacccagaaggcaacccagatttcctcaacaagttgactaagggtctcgattcttcgcctgcgaaatgggcggcctccatcgtcgtgcttggctccgggctctttgaggatgcaaacctcgacgacaaacttcgacaagtattgatatggcaaatcgccaagtttagatcgatgctggtgtttaccgagcacatcgaggatctggcttggcgaggctacttcaactacggagtcgacgtaatcgataaggcactcaccgcttgggatacgagcgaaaagaaggagcctgaaaggtactggcaacgcttccttaaagagcagccgtacctaatcaatctcatcttcccaggccccgtggcgatccgtaagggcgaagcatatttgggtggcaagaagatagacaacaccggtgggcggttggtcgatttcctggtcgagcactcaatcggcgggaacgctgcattgctggagttgaagcgcccggtgacaccgctagtgacgaagaggccctaccgaggcagcgacatctacgctgcctcaagcgatctagcgggcgcggtgtctcagatactccactatcgcgacagcatcatgtccggcaacaagaacatggtggacaccggagaaggcggcagtctgcacgtcttcgtgcccacatgcgtagtacttatcgggaactacgcgagtgaacttgattctgaagacaggcgaagaagtttcgagctttaccgagcatcgttgaacggcgtctcaatcgtcacctacgacgagctgtttgacaggctcagaaagatcctcgacgttctccgaggcaattga

SEQ ID NO: 62027 - DNA, 1404 bp, Mycobacterium abscessus
atgcgggccgagtgggaacacgacgatggggcgggacgggttgtcgcacaccatgaagacgaggtcttggtgctgacgtggtggccggcaaatcacacctcaaagtccaagggcggcattgagatggtgaggttcgatcccactgctgagatgctgcgcatcttcccaaagacgttcttcttgggtaacgagggtcagcaattccagcaagtcagcgaggtccagatcgacaccggggtgtgggcctgggagccctatgatccggtcagcgaaaacgtgtaccgaggggaagcggaactcgttggcctaccggatggctttgggaagattttccagtacgggctaggtttcccccgacaatatcgcggcatcatttatgcaatcgaggaccacacagagtgtgatgttgtccgattcggtgcgtccgattgcgaggggtcgaatggcaacgttttttgccttggacttgatcgattcgctgaatataagcacaccgtggacctcactatccgccgagcgcgagttgtcgccacccgcataatcgagacggagtctttcaactcgatagccggtacgctgggtaaagcccgcgtggcacccacactcggcaggcatccgacaattcaagcgattacccgtgcgctcaccgacgatgtcccactcgatactgacgaccgggcggctctcgtcgggcgcatgtcagcggagtcgcggacagtggctcgggaggatccgccggccttcgggaggctgcgtcaagacattgatctagtgaccctcgaagtcctgatcgaacagttccgtggtgggctggaaggcaaggcggcaggtagcgagtcgtggtggcaaaagttcttcaaaaccaacacctttgctctacaacagctgttcgccgcaccggttgccctgtataaggaccaagctcatgtacgagtaacgaacgcgggtggcggaggaggtcgaatcgcagatttcgtcctcgtcaacacggttgcgaggagtgtcgttgcggtcgagatcaaaacccctggcactaaactcatcgggcccatatatcgtggtacgggcggcggtgaagtatatcttccgcataaagagctttcaggtgctgttgcgcaaattcaagcgcaactagagtccgtcatcacagattttccagaaatagtcaagcattcgcccgatttagagtcggttgataccacaaacgttcgtggagcagtcataatcggcaaactcgattccctcgccgaagaagaacaacgagagtccttcgcccggtatcgcacacggcttcttggcgtagatgtactcaccttcgacgagatataccaccgactgtgcggattgcacgcgatgctcagtaatgagcaaagtggagtccaagatgcctctcataattcgtag

SEQ ID NO: 62028 - DNA, 951 bp, Mycobacterium abscessus; identical to SEQ ID NO: 62026

SEQ ID NO: 62029 - DNA, 1404 bp, Mycobacterium abscessus; identical to SEQ ID NO: 62027

SEQ ID NO: 62030 - DNA, 1224 bp, Mycobacterium abscessus
gtgcctacgttcgagtttgacgttccggccgagccgaacgaagtgacctacgccgaggggcgattgacaacgcgtacgtatgcgactcggagcttcctcgcacagtttgggcgggatgctggccatccatcccgctacatataccgcgtgtttgacgaggtgcagcaagctgacgacgaacattgtgaatggacaagggaagtggtgtacgaaacgcccggtgggcgaaagcaactacaacttcaaattgctcgtgaacagggcgcggttcgaaagctgcgcgtccaaaaggttccgacaagcggcgatgccacgcggttggaaaccgtgctcgaactcgatcgggatcaagccactcgtctcatcgacatgctgcgtgcgatcgagatggtccccgttgagggtgacagttcggtatacgtcgacgaccaacttcttcgtgacctcttcgacgacccgactgccttccacaacctatattcacgagacccagagcggttccgcgcgctcatcgaaaccgatgccgaagccgacgatgttattgctcttcagcgtcgaaagcacgtggccgaaacaatgcggcgctggttaagcgacgatgccgctttcgatgcggcggcagaggcagccggcggtcccgaacgcgcgtggcagagccttctcgaggaaaatccttgggttctcgggatcgggttgggcggccaacttctgacttcatgggacaacgaccgactggaacaaaccgtagtcggccggagcgtcagtggcgtcggtaaaagggttgacgcattgctccgcacggccggcgtcatccggtcgctggcgtttgctgagattaaacaccatcgcactccgctacttgaaggcgagtaccgatccggatgttggtctcccgcaaaagaacttgcaggtgctgtcgtgcaagttcatcagtctgtacacctggcgtgccgcgatataggtgaataccttcgggacacatcagccgacggtgagctactgcccacgggcaccttccttctccgcccgcgatcattcgtgatcgcaggaacgctcgagcaactcactggtgctgcgggagggccggttcccgaccaatttcggagtttcgagctgttccggcgaaaccttcatgaccctgaaatcatcacgttcgacgaactcgtcgctcgcgcggaatggcacgtcgaggttgcagttcgctcagcgggagacgtcacttaa

SEQ ID NO: 62031 - DNA, 1224 bp, Mycobacterium abscessus; identical to SEQ ID NO: 62030

SEQ ID NO: 62032 - DNA, 951 bp, Mycobacterium abscessus; identical to SEQ ID NO: 62026

SEQ ID NO: 62033 - DNA, 951 bp, Mycobacterium abscessus; identical to SEQ ID NO: 62026

SEQ ID NO: 62034 - DNA, 807 bp, Clostridium homopropionicum DSM 5847
atgaggatttatgatagagattatactaaattaaccgaagatgagataaatgaatgggaaatgcttaagaaaaaagaagtggtaaagactacaggaaaatttaatattagaaaatcaatgtttaggaaatatcccaaagcagttagacattatttaagtatatttcctaataactacttggatatagaagatttaaaaaatgaagatatgcttaagactagtatttctaatttctacgattttttaagtaatgaaaacattattgagagtgatattgcaaagtttattaagaataataaagcatattttataattggttctattttaaaatcaaattataactttgggcatcatgatgcatttattataccagagtttatgttgggaaattcatacaaagtagattacctactcataggaaaaaactcaggtggatatgagttcgtctttgttgagttagaaaatccatatggaaaaatcaccttaaaagatggaaatttaggagatacttttagaaaaggtataaaacaggtatttgattgggatgaatggcttgagtcaaattatgtgtcactcagagaaacttttcaaaaatataagaacccaaatgaacagttgcctaatgaattttttagccttgataaaacaagaatacactatgcagttgttgctggaagaagagatgctttcaatctaaaaacatataaagaaaaacgaagatatttagataagcataaaattcttttactgcattatgataatttatgcgatagtgcaaaaagtaccattggtaagcctacttattag

SEQ ID NO: 62035 - DNA, 1113 bp, Nocardia nova SH22a
gtggcacgcatcaaggacctgaggccgaatacgcagaacatccgaccgcacaagctcgagaatggtgtcagctgcgagcatcaagtcattcccgacagcgacgggcaacctctgctccacctttcgacattcggatctgccaatcgtcaattggatcccaagagcagccagtcactgcaagtagacagtcagattgcaacagaactggtcggcatcatccgtagcgcattcggcgatgaatcgctgaacatccaaccgcgagtggacattgccttttcacccgaaatagcaatcgctccgactctgttagcgcaggcctaccagaagaatccggacgcctttcggcagctcgtgagcgacgatgatgcgcgtggcgacatcgtcgcgatggcgcatcgccggaagcaagtcgctcggttccggagattgctggaggacgacggttacttcgaatccgagaagatgcgactacgcaagggcggtccagaggcggtctggcaggactttttcgaacacaatccatggatattcggcgtagctttggccggacaatttctcacctcatgggatcaccagaagttggaacaagtcgtatccggcgactctgtctcctccaccggcaagcgagttgatgcattgctccgaacgtcgggcagaatcaagtcaatggtctttgccgagatcaagacgcacaagaagcccctgctgaaaccgacaaaggatgcgtaccgccccggctgttgggccccgtccgatgaattgtcgggcggagtggtacaggtgcagggcaccgtgcaccgcgctgtcagcgagatggcggagcggttgcaggacacagcgtcggacggtagcgatatcccaggcgaattcacctatctcctgcgcccacgtgcgtatctgatcattggccgcctcgacagtctccggggagaacaaggcggcgaccatcaggataagtttcgatccttcgagctatttcgccgcgcgctgatcgaacccgagattctcacgttcgatgaggtactggcgcgagccgaatgggcagtggaatccctcttaccggacggcgacgccggcaccgatgccgacgatcccgcacagaacagaacctga

SEQ ID NO: 62036 - DNA, 1269 bp, Nocardia seriolae
atggtgcatccccttttcgacgagttgaggagcaaggcgatggcgaatcccattttcgacgaactcctgatgtcgagcaccgacaaagagttcgacgtcgaaggcggtgatttctcgcagctggagatccgtcagagccaggagcattcgtcctttcactatttctacgacaagcaggctcggcgcctcgtcgtcgacttcgtgctgaacgatggggcgcgggtggcgaccatctgttccgtcactctggtgcgggtcgacgatcagtacaccccacgtctcaagttctggaagaaggacaagacgaagcccggcaaggcggcgctggagctgccgctgcctgatctgcccgagtatcgaatgatcaaggcgctagtcgacaccgacagcggccaccggaacttctggaaactcgtcaactatctccaagcgtgcacggagatctcgctgccgagcgaccagttccatctcgtcgcggagaacagcacgcgcttggtcgagatgctcgagggcagcgacaaggacatgctcgtcgcggcgatggccaaactgatcgggggaacggtcacccaggccgacctcgatctcatcgccggccgaaaagggcagctcgactacttccaggacctcctgatggagaagtcattcttcgaggaggagaggcgacgccggtcgaagaagccgacaccgctgaagccggaatcgctctggcaagcgttcttcgaagagaatcagtgggtgttcggttacgggctgaatctcgtggcctgtgagtcctacgatccggcgaagctggagctcccgaccaccggggccaatgctttcgacggagctggtaagcgagtcgacgccctgctccgcacacgtggccagttgagcagtctgatgttctgcgagatcaagcgtcacgacaccccgctcctcgacccgaagccctatcggattcccgacgtctaccgcccgagcgaagaactctcaggtgccgtgtgccaggttcagaagaccgcagacaaagcaatccgcgcgattcgggaccatctgtacgcggcttacaacagggacggtgctcccgccggcttcgacgtagcgaccattcgacctcgtcaggtcgtggtggccgggatggccagccagttcgaagaagacaacgggttgaacagggagaaggtttcgtccttcgagctttatcggcgttcggtcagtgacgtggaggtcatcacgttcgatgagttgcttgcgagggcaaggttcatcgtcgccgacgactga

SEQ ID NO: 62037 - DNA, 1269 bp, Nocardia seriolae; identical to SEQ ID NO: 62036

SEQ ID NO: 62038 - DNA, 639 bp, Eubacterium rectale M104/1
atggaagaattacaaattgcgaaattgccatcgaatttcaaagtatatgagattgatgattatcatgctataaattgtgataaagaagcaaaaaattttttagatattatcaatgaagcaaagaaagaaaacgatgtgcagcgatatataaaaagtaatcaaaagtggtttattccattatcgatattaaaagcatatgattttggacatcatttttcatgtgttgtaccagaatttcagcttggatcacagtaccgattggattatttattggtagggaaaaattcactaggatatcaatttgtttttgttgagtttgaagatgtaaatgtagactttaggattaaaactgcaaatgcagagacagaaaaagtaagaaagggtcttaatcaaattagagattggaaacgctggattgatcagaatagagcatacttttttgcttctgaaggaataaaagagtttgctaataatgttccaagttggggatttaggtactgccttgttgttagtaggcgggataggatggatgaaataagcaatcagctgagaggagaaatgcaaagtgaaacgagggtaactattatgacctatgataggcttgttgaatatgtggaaaggttacacaatggaatataa

SEQ ID NO: 62039 - DNA, 1155 bp, Thiomicrospira crunogena XCL-2
atggatgactatcaaaacccaaaagaagggaaaacttatattagcccaaggttaaaagcctttggtgattctgatagaaaagtccgaattgcatcaaaagtaatagagtcaccagattcttatgcttttggaaaaattaaagacgaagttgtattaaggcataaggaagatgcgaaatcccacatcacagcaaagttcctagaagataatagagggatattcgtactcagcattcaaggctatagcgtagcaacagaaaaacctcacaacgctagtttttcttttgtaggtgaagagattgggaagttactcgaatttattcgtaatattcaatcagtaaacttagatagcccttcaagagttaacataagcgatgaagagcttaatcgtattgtcctttcggataagcaagctaaaagcttgcttcatgaaaaccaagagcttttcgctgaggttcttaggtcggaagtaacaacagaagaccttattgctgtcgggtacagaaaaaaacaattagaggtttatgagaagcttttaaccaaccaatcctacttcaattccataaaagacaagaagaagtgtactaatgaaagtctttggcaaaaatactatgaaaaaaacccttggatatttggttatggtcttggatatattttcttatctggcctggatgacaaaaaattagagcaagtagttcaaggacacagcctagattcacatggtaaacgggttgatgcactaatgaagacaaaggggattatttctaatatttgctttgtagagataaaaacccatttaactgatttgctagattctaaaccttacagatcaggctgttgggccccttcaaaagagttggtaggagctatttctcaagtacaaggtacagttgcatctgcaattgaaaatctatcaatcaagataaacccaactgataaggacggtaacctaacaggtgaagagatatataattatcagcctaaatcttaccttgttataggaagtatggctgagtttgtttcagaaaatggcgtcaataaagacaagctgaggtcttttgaattactgcgaaaaaataccacaaatccagaaatcattacttttgacgaattatatgaacgtgcaaaatttattgtttatcacaatcaaagctaa

SEQ ID NO: 62040 - DNA, 639 bp, Acinetobacter johnsonii SH046
atggatttcgatttagaaaaagtaagagaacagttagtaaaggctagatctaattcttctgaaagagagcttctacaattactaaaagagaatagttttcttttttctgagctattctcaaggcattttgggatacaaccagttttttcagaagttagttttggtaataattttagatgtgatttttgttggctaaatgataattcagatggtcctgagtgggtattagttgaaattgaaaaaccttgtgcaagactttttaatcaaaacaatgaacctagtgcagagttaaatcatggaatcgaacaagtaaaaagttggcaaagatattttgagtttcatcctgctgaaaaaagaagaatttttggtgcggtgagtaaattcagatacattctagtaattggtgaaaaaagcgattgggatgagaaagaggctagtttatggagagcttttgaaaatcagaatagtatcgaaattcgatctatgaatatttttgatagagctatcgaaaattatgaaaaatttcctgatcattattggagctttaaagaaaatcctcttgtattaaacgctagaaaacttcaaacctattgggaagaatatccctacataatgacatggcgaaaaattttaccctaa

SEQ ID NO: 62041 - DNA, 1155 bp, Acinetobacter junii SH205
atggacgattatcaaaatccgaaagaaggtaagacctacattagcccaaggttggatgccttcggtgactctgacagaaaggtgcgaattgcttctaaggtaattgaatcacccgactcatatgcttttgcaaaaatccaagatgaagtagtactgagacataaagagggtgctaagtcatatatcaccgcaaaatttcttgaggacaatcgaggaatatttgttcttagcattcaaggttatactatcgctacagagaagccacgtaatgccagcttctcctttgttggagatgaaattggcaagctcctagagtttatacgaaatatccagtcggttaatttagataacccatctagagtcaatattagtgatgaagaattaaaccgaattgtactgaatgacaaacaggcaaaaagcttgttccacgaaaaccaagaactatttgctgaagttctaaaatctgaaattactacggaagatctgattgcagttggctaccgaaaaaagcaactagatgtctacgagaaacttctttctgatcaaagctacttcgaatcaattaagtccaagaaaaatacaaccaatgaaggtctatggcagaagtactttgaaaagaatccgtgggtatttggatatgggctggggtacatattcttatccgcccttgacgacaagaaattggagcaagttgtccaagggcatagtgtagactcgcacggaaaaagagttgatgcattaatgaaaacgaagggtgtaatttctaacctttgttttgttgaaattaaaactcacgttactgagctgcttgaatctaaaccatataggtcgggctgctgggcaccgtcaaaggagttagctggtgcgatagcgcaagttcaaggtactgtttcatctgctgtcgagagtctatctagcaaaattaatcctagtgatagtcaaggtaacccaactggggaagaaatctttaactatcagccgaaatcatacctcgtaattggtagtatgagcgagtttgttacagaaaacggagtaaataaagacaagataaggtcatttgagctgttgcgtaaaaacactacaaacccagaaattataacctttgacgaattatatgaacgtgcaagatttatcgtacatcataatcaaagctaa

SEQ ID NO: 62042 - DNA, 1068 bp, Stenotrophomonas maltophilia RA8
atggaaaagccaggacaagtccagaaggtcgtcaggaagacggccagcagtggcaaggtggactacgcaccaccagttgtgctcaatgagaccagcaagagcaagctgcacgccctggcttggttcattccacatagcgatggtcgaaccacattttcgctgaagctcgaaggtttcgtgaaggcgaaggatcagccttggatcgaggacaaggccaagaccctcacgttgtcggaaacttcgtccctccagctgctcaaatacctacagacacatctgccccttgccgctcagtcggaaacaggtgagttcatcttaattcgggtggccaacggcgaggccaacctgacgggccacgatcctcaagaactggtgggtgccctgacaaaggtcctgtcgcagtcggagttgctgggccatttgtccagcactgaactcacgcatgagttgagcacggcgctgcgtgggtcaatccgtctgagcgagatgcgatcagccgtggccgaactgcgctccaatctgggaagcggtgaggcaggggagcagacctatcaggcctggtgtgagaagcactgttgggcgttcggaaatgcctatgtggtccgtgacgaagtcagggccatttcgactggagacaaccttgacctgttgttgccgaacgtgatcgccggctatcgggacatcgttgagttgaaacggccggacaaagaggttctgctctacgacgccgctcacaagaattattacttttcggcagacgtttcccgggccatcggccaatgccaccggtatctggacatcctccaccaagctgcgaaagatgggcttctagaccacaaagaggtggtggcctatcacccccgcgccacgattgtgattggccgatcgcacggatggaccgacgaacagcagcgtgcacttcatgggctcaatcgccgtctccacggcatctctgtaatgacctacgaccatctgctggctcaaggcgagcgccttattgaaatgatgagccccgcagagggtgctgatgcggagtcggcggttgaggaggacgatatcccatggtga

SEQ ID NO: 62043 - DNA, 1074 bp, Stenotrophomonas maltophilia
atgaacgatgcagtggatttggctaaagtcgttcggaagacggcgagcagtggaaagctcgactatgtgcccgttgtggtcctcaacgagacgacgcggaccaagctgcatgtggttggatggctgattcctcatagcgaccatacggagttctcggtaaagcttgagggattcaagaagaccaaggcctcgccttggcaagaggacccggtcaagaccatcacgttgaccgaggcctccacgctcaagctcttcaaatacctccagacgcatcttccattggcgcagcaatcggaagccggtgagttcattctgatcagggtggctaacggggcggtggatttaacgggacatgatccacagtccttggtcggcgctctcaccaaggtgctctcccattcggacttggtccaacacttggctagcacggagctcactcatgagctgaccgccgcgctacggggatccattcgcctcagcgagatgcgctcggcggttgctgagcttcgctccagcctagggcgtggagaggccgcagagcaggtttaccagtcatggtgcgaaaagcactgctgggcgtttggcaatgcctatgtgatccgggatgaggtgcgtgcaatcaccactggggacaatatcgatctaatgttgcctaacgtcattgcaggctaccgagatatcgttgagctgaagcggcccgacatggaggtgcttctctatgacagggctcacaagaactactactttcccgcagaggtatcgaaagccatcggtcagtgccatcgttacctcgacatgctccacgaatccgcagacaaaggcttgctcgaccataaggaggtcgtggcttaccacccgcgcgccaccatcgtgatcgggcgctctcatgattggaccgacgcacagcagcgtgcactccacggtctcaatcggcgtatgcatggaatcacggtcatgacctacgaccacctgctggctcaaggcgaccggctgatagatatgattgtgccggctgcagctacatgcacagagtcggctaccgcgcccgagtccgatgacgacattccttggtag

SEQ ID NO: 62044 - DNA, 1176 bp, Stenotrophomonas maltophilia
atgagtgacgaagactatgtggctaacaaacgcagcgacagggtatatgtctcccgaccattcaagattggagtgagtaaggatacggatgctcgatacgtcactagggtctttgatgatggtcagagatcctgcttcgattcggtagacggtgagatcgtaatcagagcaactcatgacgacaaggtgcagatcaaggccgtcgttacaagcgaccaggagggcctaagacatctgacgctgcaaagctttcgcgtctataaagacggcatacggccgaacgagcagtacggcattaatctacggggccaagagatcactgagtttgtcgagttcgcacggctcgtcagcaacgtgcagcttgataacacccgaaagttgcgcttggatggagcgtcgctcgcgcacgtcgctgtggacatggattcagcagcaagggcttggatcgctaagcacccagatgccttacgtgagcttgtggcgaatgaagccacatcccgggacgtagtggcggtggcataccggcgcaggcagttggcggaattcgagcgtcttctgcacgaggacgcccacttcgatcgggtgaccgcagagcgcttcaacggacgcaaggaggcgacttggcaggccttcttcgagcggaatcgctggatcttcgggtacggtctgtttcatttgtccgcagatggattcagcgatgagaagttagagcaagtggtagcaggttccaccgttgctactcccgggaaacgtatcgatggccttctaaggacgcgagggcgtattagcgccgcgtgcctggttgagatcaagcatcaccggaccccgttgcttgccaaggccagctatcgggcagggacgtggcaaccgtcgcaagagctcacgggagccgtttctcagattctgatgtccgtagatggaatggagcgtcagttccagcgcttgctagtgatgaatgacgacgaaggaaaccccacgggagaggaggcggttgtggcgcgtcctcgttcggtcatcgtgtgtggctctctatcggagttcgtcaaagaatttggcgtaaacgaggatcaattccgtagctttgagctctatagacgccacttgttctcccccgacattctgaccttcgacgaactctacgaacgcgcgaggttaatcgtagaatcgacggaatag

SEQ ID NO: 62045 - DNA, 1176 bp, Stenotrophomonas maltophilia
atgagtgacgaagactacgtggctaacaagcgcagtgatagggtgtatgtctcccgaccattcaagattggacagagcaaggatacggacgctcgctacgtcactagggtctttgatgatggccagagatcttgcttcgactcggtagacgatgagatcgtaatcagagcgactcacgacgacaaggtacagatcaaggctgttgttacaagcgatgagcaaggcctaaggcacctgacgctgcagagctttcgcatctacaaaaacggtacgcggccgaacgagcagtacggcatcaatcttcgcggccaagagatttctgagtttgtcgagttcgcaaagctcgccagcaacatgcagcttgataacaccggcaagttgcgcttggatcgagcatcacttgcgcacgtcgatgtggacatggattcagcagcaagggcttggatcgctaagcatccagatactctacgtgagcttgtggcaagtgaagccacatcccgagacgtagtagctgtggcttatcgacgcaagcagttggcgaagttcgagcttcttctgcacgatgacagctacttcgaccaggtaaccgctgagcacttcaaaggacgcaaggaggcaacttggcagggcttcttcgagcgtaatcgctggatctttgggtatggcctatttcatctttctgctgacggattcagtgatgagaagttggagcagatggtcgcgggcgccaccattgctacccccggcaagcgaatcgatggccttctgaggacacgagggcgcgtcagcgccgcgtgcttggttgagatcaagcatcaccgaactccgctgctggccaaggggaattatcgagccggtgtgtggcagccgtcacaagaactcacgggagccgtatcccaaatcctgatgtctgtagatggaatggagcgtcagttccagcgcttgcttgtgatgcgggacaaggacggtaatcccactggggaagaggtagcggtcgcgcgtcctcgatccgttgtcgtatgtggagctttgtctgagttcgtcaaggatttcggtgtaaacgaagatcaattccgcagttttgagctttataggcggcacctgttctcccctgacatcgtgacctttgatgagctttacgagcgagcgaagctcatagttgaatcctcagactag

SEQ ID NO: 62046 - DNA, 1074 bp, Stenotrophomonas maltophilia
atgagtgaatcagccgaagtgtcaaaagtggtccgcaaaactgctcagagtggcaagttggactatgtccctgtcgttgtcctcaacgagaacacgaggaccaagctgcacgtggtcgggtggctgattcctcacactaaccacaccgagttctctataaagctcgagggtttcaagaagaccaaagcctcgccctgggaggaggatccgatcaagaccatcaccttgaccgagacctccacgctcaagctgttcaaataccttcagactcacctgcctttggcccagcaatctgaagcaggggagttcattctcatcagggcggcgaacggcaccgtcgacctcaccgggcatgacccgcaatccttggtcggcgcgctgaccaaggtgttgtcgcaagcagagctcgtcaagcacttggccagcactgagctgacacatgagttgaccgaggcgcttcggggatccattcggctcaatgagatgcgctcagcggttgctgagctacggtccaccttgggccgtggtgagtcggctgagcaggtctaccaatcttggtgcgaaaggcactgctgggcctttgggaacgcctacgtggtcagggacgaggtgagggcaatcaccacaggagacaacatcgacttgatgttgcctagcgtgattgctgggtatcgagacatcgtcgagctgaagcggccggacatggatgtgctgctgtatgacagggcgcacaagaactactacttctctgcggacgtatcgaaggccattggccagtgccaccgttacctggatatgcttcatgacttcgcagacaagggattggttgaccacaaagaggtagtggcttaccaacccagggccacaatcgtcattggacgctctcatgactggacggatgagcagcagcgagcacttcacggcctcaatcggcgtatgcatggaatcacggtcatcacttacgaccacctcctggctcagggtgagcggttgatagagatgatggtgccgacggcgggccttgaagctgcggcggtcgaggccgtcgaacccgacgacgacattccctggtag

SEQ ID NO: 62047 - DNA, 1380 bp, Marinovum algicola DG 898
atgggcaaagttcacaaccgacgcgtgcctgctgatgccaatgccgctgacattctgcgatacatcccaaattacatcgaagcttaccgtcaggaatatcaacgacttatcatattaccacccaacggcccaggtttgccgcaagcccctctgtccccatatcttcagtgccgccgatttgagattctcttggccaaagacggagtggtcatatttgttgctgatcacccaccgaaacacgactggtggattgcaggcggccccgcgctcaaagtcgattacgagccatccagaaccccaaaatgggtgactgcaaagctttccgagaacggcttgctgggtaagcccatcgggatctatcggatagtaagcaaacaggctctacccgaacgaatatggagtggcgatcttccggccccaataaagcagaccacgctaaaagatggttcgcaaattcacatcatgcagttggaatgcgatatcgacgaagcagtagcgcaactgacctttggtgcatttgggcgggtccttgatgtacatctcgagcgcaaccgcacgaatttctggaaacctcacatcatatcaggaatgggatttttcaacgcgggtctgaccggcaaacgtttttgcaattatattgaggttctgccgcacattgacagagcggcttgggatactcgaacgattacgcttcgcgctgctgcagatgtgcgtcgagattttgcccgcttcactggaaaaaaagatggtggtgcgactttcagcttcggtgaatatggtcaatgggtggaaagctaccaaaggtccctgcacaaattgtgggaatccatcattcagttcgaggcgttgcttgctacagcatcagacgctgttgaagaggtgtttcaccagttcttggtgcggaacccaatgctgcttgatccaattggagatgttgtatcgaaaccgcggctagcctacccaaacggaaaaacgtcgccagacggaaaaacgtatgttgagcctgacttcatagtcgcatcgccatctggatcgtaccgcttgatcgagatcgagcgtgcatcaaaaaatcttgcgaccaaggcggggcacgccagacaagacctcgcccaagcagcatttcagattgcagaatggaagcagttcattgcgcaaaactaccatgtgcttgaggaccgcttcccgaacatttcagagaacagcccctctgcaataatcctctcgcgtgcctcacaaaatggtttcgaaagcgaagcttcgctacatagaaaagtggatcaactgaaacgccagtttaatgtcgatgaaattctcacctacgatgatgtcttaaagaacgcccgttcgctatacgacaagctgtccaaccttggtttgtga

SEQ ID NO: 62048 - DNA, 1482 bp, Pseudomonas alcaligenes NBRC 14159
atgccctctcgacgcccctcgcagatgactctccaatctcggactgatggagggccattcatagattttctactctacgatgacgagggggctccgagcgatgatgctcaggaagtgaaaagctgtgatgtctatttcagcgacatcactccagagcttgaatctcctgatgcgttggaaacctggcatcgaatcctgtccataactcccgaagagatatgcatcttccccattcatcagcgagtggggaaaacggactatgggacccctaagcacggtcctatagagcaaattatcctcgcccggccaaaggcccatccatacagcgttcccatcaatcgcgacgagcttgaaggactgctcagctctcttcctagtggcttcgcgaaggattggcaaattggcttgggcctgctgtgggagtaccgtttcgtcatcgaatcgatagccgacataggcggtataaacaccattgtcattcatggcgaagatggctcagatgacgcaaagattgttggcagtgtttactacctcggcatcgatcgatatttagagctcaagcgcagcattgatcgcttgagccaaaggcaccaacgcgaaacacgagcggacaagcaattagtttgctacacgggattagcccacgccgcagacccgattcgaaaccccgagcggccaaagaaacttccggcgaatgtcttgacgggcctcatcaagctaggccgggggcgctctaagctgtctagggccgaccaaaaatcagcggttcatctggtgaaagacaacgccgaggtaatcgtcaagcaggcgccccagatgctgcttgaactcaaggcggacattgagcgggtaaccttaggagagctgattgaacgctatataaaactcatgtctgccggcgcgccggaaggcaagtggcagaagtttctcgctgagaatccgttcatcctggatatggcgtttccctatccagtgaaggtggtctgcgaacgaccgtacgtgggcagcaagcgcctctctgggcggggcggaaacttctcagacttccttgttgcggcaaaatcgacaggcaacgttgcgatcatcgagatcaagcacccgcaacatgatctgctgaaagtccctgaatacagaaacaatacgtatggcccctccttcgagctgagtggcagtgtcgcccaaataatcaatcagcgggcaagcctgcagcgacaaattcacgaccttaaagaagagttggaggatgaggtacacgcgcacgccattccagccatcatcataattggtcgcacacccactgataaacaccagcggcgctcgttcgagcagtaccgaaatgctcttaaagatgtgtctgtggtgacttttgatgagctgcagcagcgcttggaagacattcacaaggtgctcgcaccttcgacgtcagcgagttccaaccaagatccgagcgctagcgctgagtatgacaacgttccgttctag

SEQ ID NO: 62049 - DNA, 1461 bp, Pseudomonas alcaligenes NBRC 14159
atggcttctgttccacacaccgagtttcgcaaccagtcaaggacagatggaggcccattcctggccctggaatctctggatgaaacaggggctcccaccattggtgatgaagtccctgtgtccgtggaggtctactactcagatctccccgtgccggagggcactccagtaggtgctgatccttggatcaggatcatgagcgttgatgaggacgggctgactatctggccagttcatcagcgagccggcacagaggagtatggaaaacccatcttttactcaatcaagcagctcatcatccctaggccctacgtcgactttgatgagcttcctgaaacccaagaggccctcgaagacatgcttgaaggcctgcctacagatttctatcgggactggcgacatggcttaggtgtgaagtgggagttcaggagcatcctctctacggtcgagaacatgcccgagatcgatactgtgtacttctgggatggttccggtgatgtggacaaggaatacactacccactcgttctacattcttcgcatgagcaccttccagtccttacggaagcggcttgccgcgattggaagccggcaccagcgcgccgcgcgtagggaaaagcgagtggcctgcaacaacacacttcttcatggtgcagatccacttaacttccccaaagagcgtgtggtgttacccgaaggggcgctggcggaaatggccacggcaggcaccagggtgaaactctccaagggtgatcagcgagcagtagtccagatggttcaggaccacgccgagactctggcaaaggaggagccggcggagctgctgcgcttgaaggagaacatcgagcttgtcagcctggccagactcatcgagcgttgcagcgagttgctgcagccatccactacagagaccaagtggcaaaaactgctctccgagaacccgtttatcctgtctttggccttccactacccagtgatttgcattggggatgttccctacgtcggcggcaaatcgcacactgggtccgggggctcacacagcgatttcttgatggctgctgtagccaccagcaacctcgctctcgtggagatcaaggggcctggtactccgatcgttgggaagccgtataggggcatctatccgccttctaccgatctctccggtgcggtggcgcaggttctgagccagcgcggggagctacagctcaacttcatgtcttcggttggccgcccactggatcgccaggggttccgccctcactcaactgcctgcgtagtgatagcgggcctccggcccaccgatgaggagcagatgcaggggttcgagcagtaccgacacactctgcagggagtccatgtcgtcacttttgacgaactggtcgagaagctgaaggcactgcacacgttgctcgccggcgaccaggccacgccgacggcggcgagcggcgcggctgctacctaa

SEQ ID NO: 62050 - DNA, 1239 bp, Paenibacillus durus ATCC 35681
atgagtgaaattagtcaaaatattgagaaatatctaaaacaactggtagatgcaattatagaaaagatgtctactggatactgggacaagatgcgtgaaatactacggaaagagccgtatctaaagaagacattccctcatctacttctgaaccctgaaaaactagtaatttatattgggaagaagcattgggcaattgagtatattggtgcaacttatcaagaaaattttgatgttgataacgatgaattaagtattagattatttgactattctcgaacttcagaggatttttttgaggcgatcttgggttttaattttgatggaagttctatcagaataccacttcctgaaggtacaaaccaagacttatatattccaacaaattcggcagatgacattctgtacgaaaatggttggaactatgcagcgcagtcaatgatgttaagttataatatagctgggattgatttgacggaaaaagagcactatagactaataaactgttttttctatggaacaaattcgcacggcctgattacaagacatatcaaatggatggagatattcccatatgaagtagtgccacatgacataggtatgagcaagtctaagatatctttttttcgtgattttaagaatcaggcattgcgagatgtcgaatccgagtttccaattcctcccgacctccaatatgataggttagttagattgaacagatttgttgagttgtttagtgccgcatatttatcggaattagagatcacatcatttttggcggaacctgaaaatcagtttatactgaagatggctttctttgctaaagaagttcattcagaactggagtgtcattgggcagaatcgaaaaataaagctattcgcccagatttctttattacaaatccaaatggatattcagatattgtagagtttaaaatgccgtatttaaagaattcaactgtagtaggaacagaaaatcgtgaaacttttagtgctgaaattaattcgtatatatctcaaaccagagtttatgccaagtattttgatgacccacggaatagggaacatgtttttaataaatacggcattaaagtattatatccaaagagatggcttgtagttgggcgaagatggatgttcgacaatgataattggagggaaatagaaaacgaattcagggattttgcaatcagaacttatgatgatttgattgatggtgttgtaagtcaattgtattga

SEQ ID NO: 62051 - DNA, 1062 bp, Tsukamurella pulmonis
ttgaccatcgaggggtaccgcgcagggctgcacgcgtggattagggatacgagttcggagcagttctgtctcgcgcgagacggcatggagctgaaggagaaggggaccaccttcaaggccgtcggaatcgccaagtatggacgcgatgcggacgatccgagcaacatcgttctggaattcaaggagtctaagcgccttcccgagaaccagggctacgactttgacaacccggactcgaaattcacactgaagaatgaggagatagatgcattacgtctgtttctgagtgagcggttcggcgaatttgatgctgacgcgtactacgtccgagtcggcagtcctcagatggctgatctgctgaaaaccaagatgtcgacaatcggtggggagcaactcgccggactgctgtctgccgtcgacagccaggaggatttagccgcagctgtagaggcggcggggcacggtgacttcttggcgtcgtatgtgatgtatcgcaagaactccgctgccttggatgagttggaagccgccatcgcagacccaacgagcacagagagtgtgttccagaagattctggagcgcaatccgtggctgttcggaggccagtacgtggatgttcacgaccggagggagttggcggtgggagaccagcacgacatccctttgctcgcgctcgacggctcgcttcatctcgttgagctcaagcgcgccgcgatagaacgactggtcaagccgcaccgaaaccatctcatgatgggaaacgacgtgcacgaggctgtttcgcagactcagaattacttgcggactcttgacgaggaagcgcacaccatcaagtcaaagttcggtgttgaagctcatcgcgtcttctctaccgtcgtgatcggctctgcgcagcacaacaaggcgactgtctcaccagacgatctcgctcgcacgatgcgcgtctacaacagtcacctcacgcggatccaggtcatcacgtatgaccagctcctagccaatgcgcggagcgcaattgagcgtcaccgtgaggcgtctacgcccacccccgcagtggagtga

SEQ ID NO: 62052 - DNA, 1536 bp, Lactobacillus rhamnosus
ttgaaaaaatcggacttttttcaaatcgaaaattttctttgctttcgtcaagatgtttctacttctagagcgggtttagtgaaagattcatatgcgggcagattaagagcagtgatttcagcaaacattgactggtctaatataaatctaagtgatctttcagatcaaagaaccttaaaaactgctatttttggtgttgctgaacctgaaatagcttttgctcgacagaaagggctttttgaatacgatgagattttgaaactctggtttcgcatgaacatagatcaaaaaaagaaacttgcgtcatataatgatgtggatgttgatatgacacctgaagagtttatttctaagcttcccgagcgtagcttcctcgaatccctagattttgatgatgattggtttttccctgttgcttataagatagaagacgcgtccaaagatgaatattggcgtttcgacacaattccgttaatggcggagggcgatgcttgtggatttttatttgttagcactagggaattgactacgcatgtcttgacaaatatttttgaacggaaaaacgcatattcgcgtatgacaacagtttggcaagatttatataagattttgaggcgttctgctgatatctcagggatatttattggcggtaagcatcagccaactctgtcggttgatagtttgagcattctacgaaaccgattagtcggtcaatctgaagtggctcactatatcgaagtccaaaatggtcgatctttggaagagcttggacagccggtagatatagatacgactcgtgcacaatctctcatggcaaaacaacaatctgcgaggagtagtacaattcacattgctacggagcaaaacatcacagcaattagtcaggttaatcagcggctcaaggttttccacagtgaattggaacaacgactgagtgagggaaattctgcgcgagataaatgggatgagaaatcatttcaaagtttattatttaagatatttcccttcattttccctcagtatacccactttattagagaataccgatttaagattaatggtaatttattgaaaaaagaggaaattccagattttatcgcgttgagtgcatctttaagtgtagatgtaattgaaattaagactccttattttcctctctttagaaggagtctctatcggaaaaattgggtttttggatctgaagtacagggcttaatttcacagagccagaagtacatctataatttgactagaaattcagcgagagaagagcctaaccttcagcggcgctttataaaggatggaggtctaattctttcggacgactcgtcgggggtacatattagatctccgaaagctattattattgttgggcggtgtccaagttatatgattgatgatcctggagtggcgcatcagcgagaacaagactttgacatctacaaacgtcgttacgaggatatactttcgtttttaacgtttgatgacgttcttgatttaacgaggaggatgatttcacgtcagactaagatttga

SEQ ID NO: 62053 - DNA, 1536 bp, Lactobacillus rhamnosus; identical to SEQ ID NO: 62052

SEQ ID NO: 62054 - DNA, 1065 bp, Spiroplasma kunkelii CR2-3x
atggaaaataatgaaaaaaattcgaacgaaatttgaaaaaacgaaatagaagttggtcaaacattaacgcaaaaagaacaagacggcaaaataaaggcaatttatcaatatctcagcaaaactaataagggggattacttacaagcaaaattaactaaacacattgattttccagataaaataagattaaaacttggtagatatagtaaaaataatcctaatgattttaaaacgtgaaaaagaaatggaaataattttgatgataaatatgaatgtggtgtgcaattaaaaagtgaagaactgaaaaatttaataaattttttaaaagaaagtaaaaataatacttttttatttcatcccgaagaaaggactatatataaaaaaattaatagcgaagatattgaaatcttaaaattaataaaacaaaaacctacaatattaaaagaattagatataaataacttagaatacgcaaaaaatgaatatgatatacgttctttgaaaattgaagaatttgaaaatatgattgcaaatgaaaaattaacagaagacgattgacaaacttttttaaatgaaaatattcatattttacaaatttgtataccatcgttttttaaatatataggcgaaaaagtttatgctgggggtaaaacaattaatggtaaagatggtgtttatcctgattatgcttttactgattctttaaatagcattgcttttattgaaatcaaaaaaccccaaacaaacttaatgaaagaaaacacatatagaaataatgcttttgcacctagcgaagaattaagcggtggaatttctcaggtattatcacaacgtcatatttattattccaaagaatctgataaaacagaaaataaccctttttataattctccgtgctatcttataataggtaatctatctaaattaaataaaaaacaaaaccaaagtttttctttatttaggaattcttttatgaatattaatatagtagcatttgatgaaattcttgaaagattaaaaatctttattgaaacaataaaaaaaacaactctaaatacgatttag

SEQ ID NO: 62055 - DNA, 1422 bp, Pseudomonas amygdali pv. tabaci str. 6605
atggaagggcctaagcaaacctcgcaggacgtgtggaatggggaggacgtgcttgagcccagcttcatcaccattcgccggccgttggaaagcggcttttgcgttgacctgtatcttcaggtcttcgaaaaagtctccatggacaaatggcggtcactgcccgaagacagatggcatcacctagcaacgatcgagcctggctggattacgatgtatcccatctacacgaacccacacactcagcgctatcggagccctaagaacggaaacgtgggttgcatcctgtacagccatcagtcgacgcgcgactttccagacactccggatgatgccgtgctctatatcgacgtcagcctccctcgcaaactgtttgattcctgtgatgaagggctgggacttgtgaaacagctcaccccgctctggcgaggcttgcgattcgctcctggtttaaaaaccctagtcatatcggatgatagtgacacctcgatcacagacgacattgtctttgtgagtgaggcgagggtggatgaatgccgtagaacatgcatgcggattacccgggcccgaaaaaagagtgagacgtcagcccagttgcactgggtgatgagccaggtgtttccgacgctgatgcccaatgtggtattcgaaggcagccgccctgtactggtgagcgatacgaatgctcgtaaggtcggcaatacaattgcacaagctgctgtgcgagcccggcgtcaccagcttagggagatgaaggtcggtgttgagatgctggcgaaggaagctcctcgcgaacttttcgaactgcgcgctgagatcgagagggttaccttggctgtgatgatcgaaaagttcgagaccatgcttggccagaacctcagcgaggggcactggcagcagttcttcgaggccaatctgttcatcctagggatggtgttcgcgcgcccggtggcgcttctgcatactcagttccatgcccggggatccatggtcaatggcgctggcgcccacatcggcgacctgcttttcgcgcagggatgcgagctggccatcgtggagatcaagaagccttccaccccactcatgcagagcagggcgtatcgcaatcgcgatgttttcggcccacatctgcagctcagtggagcgattactcaggtactgcatcagcaaggcctgatgcgctccaactggctgtcacacctgcaagacccgacgatgcgagacttgcaaccagacacagcgaggtgcgtcgtcattgcaggtaccaagccaaccgaagaggggcgccggcgcagcttcgagatctttcgcaacgcctgtaaggacgtcgaggtcgtcacctttgacgagttgcttggtaagctgcggatgctggctcagcacctggcacccgtagatccagtcgacatcccagacattttctga

SEQ ID NO: 62056 - DNA, 1632 bp, Pseudomonas amygdali pv. eriobotryae
atggacgtgaaagaccccaactccgaaaccctccctaacgttaacaaagagaaaggaatatcaaatgaagagagagagggaagatctctactgaacaaattgcgacaagaaatgatgttggagatcacctttggcgaaaaacgagtaggaactagcaaagaaatttccgagtggatattaaaaaaataccaggagagcgcctactctggggatatctgccaggcagttttatatttaaaagaagattatgtatctccctcaaatgaattaccaacaattaaagctgcctttgaacagctctacgcattagaacactatccgattcccgaattttttttcgtgtcaaccgattacgaaagtgaacatgtaggtttcttatttcaaagagaagctctcgaaggaggtgggagagtctattctgtgacaggctttaatctgtgtggtggttatgaaaaagtttctagatcggagtttcgcataaaagaaacagaccctgagccctttgtttctttaatgcaaaacgatggttgggctcacaccagcaaaaaaacgctcagtgcaaataattatatcgaattaatttttaaatgcctagctgcctacagcaattacagacacccgagaatcgataacaaagcggtagttgacactcgatctataaaaccaaaagataacgaatatctggttcaacttatttgcaaagcaattcaaggaaaagttacttgcacacgtattagcgtgccaatcaaccgtattaaaccgcgcgatatagattatgcactaaatattcctgaggctgacatacaggatttcatgcgcagaatcgcagagtggggcgcaccacttgccgaaatcctgctgtacgagaaagatggtcaacttataatggatgacgattatctgacctactgtgcatatagagctctgaaaatcgattcagttaaagcggtggtgataggaaattttgatgaatcagacattaaaattctgaagagggggcgtggggagcttattccaccggtaatcgttgatagagcaccaaaaaaactgccgcaagatagtttatctaaggatcatatgttagacaagagattgtcttcgttgatgccaacgcctaattcacgcgcgcagatgaaaaggaaatttacaaatttttgccgtcttttagggcgtgattcgactcttgaaaaagatctacaaaatttcatcaagcataatcccgagatatttgactctcattttgggcgaatgcacatggaagtccctataggaaacttcagggcagatatggttttgcagtatgagcagtcacataggcgagttttattagtggagttggaaaggcatgtagatcagattttcacaaaagataaccgcttgcgcagcaaagtgaaccacgcaagccaacaagttgaggattggataggcgaaattagatctggaaaaaataacattccagactggcttaagcgagaatatgtggtcgaaggcgcagtagtgattggccgttcaaaaaacttaaccgtcagtcaaaaagatacgttacgcgtaatcaacaccaatcgtatcgtcaaaatcatgacttacgatgacctgctagaacagatgatgagattaatatcaatcttgtaa

SEQ ID NO: 62057 - DNA, 1422 bp, Pseudomonas amygdali pv. lachrymans
atggaagggcctaagcaaacctcgcaggacgtgtggaatggggaggacgtgcttgagcccagcttcatcaccattcgccggccgttggaaagcggcttttgcgttgacctgtatcttcaggtcttcgaaaaagtctccatggacaaatggcggtcactgcccgaagacagatggcatcacctagcaacgatcgagcctggctggattacgatgtatcccatctacacgaacccacacactcagcgctatcggagccctaagaacggaaacgtgggttgcatcctgtacagccatcagtcgacgcgcgactttccagacactccggatgatgccgtgctctatatcgacgtcagcctccctcgcaaactgtttgattcctgtgatgaagggctgggacttgtgaaacagctcaccccgctctggcgaggcttgcgattcgctcctggtttaaaaaccctagtcatatcggatgatagtgacacctcgatcacagacgacattgtctttgtgagtgaggcgagggtggatgaatgccgtagaacatgcatgcggattacccgggcccgaaaaaagagtgagacgtcagcccagttgcactgggtgatgagccaggtgtttccgacgctgatgcccaatgtggtattcgaaggcagccgccctgtactggtgagcgatacgaatgctcgtaaggtcggcaatacaattgcacaagctgctgtgcgagcccggcgtcaccagcttagggagatgaaggtcggtgttgagatgctggcgaaggaagctcctcgcgaactttccgaactgcgcgctgagatcgagagggttaccttggctgtgatgatcgaaaagttcgagaccatgcttggccagaacctcagcgaggggcactggcagcagttcttcgaggccaatctgttcatcctagggatggtgttcgcgcgcccggtggcgcttctgcatactcagttccatgcccggggatccatggtcaatggcgctggcgcccacatcggcgacctgcttttcgcgcagggatgcgagctggccatcgtggagatcaagaagccttccaccccactcatgcagagcagggcgtatcgcaatcgcgatgttttcggcccacatctgcagctcagtggagcgattactcaggtactgcatcagcaaggcctgatgcgctccaactggctgtcacacctgcaagacccgacgatgcgagacttgcaacaagacacagcgaggtgcgtcgtcattgcaggtaccaagccaaccgaagaggggcgccggcgcagcttcgagatctttcgcaacgcctgtaaggacgtcgaggtcgtcacctttgacgagttgcttggtaagctgcggatgctggctcagcacctggcacccgtagatccagtcgacatcccagacattttctga

SEQ ID NO: 62058 - DNA, 1419 bp, Pseudomonas amygdali pv. mori
ttgagatatccggcgcttggtgccgtgatgatgcttagtcagccttccaggctaagggagcggcgcgtgaaagatggcagtgatgagtcttcccaaacgaagaagcaacagcgagaacgggcgaagagcttgccagagcctagtatccgaaaaggggtcgtgaatcgagctttttacgtcgagctatcagtgccatcttcgacggccggcgaacaccctacaaatagctcatcgggcgcagactcgcatgtgcttgcgaggatttttgcagaccgaatcgagacgtggccaacagtcatcaacccccgcttcatctcagaatatacgcggcagaggaagccttaccctcgcatcgtatatcggcttccaaaaccctttgctgggcaactgccaagcgaaactagctcggtggtgtctcacatcgaacgcgtattcgactccgggattttcaatacctgcgccaaggggctagggttcaaggcatccttcaacgcggtacttagcgcgcttcagatcgacaagagtgtcgataccattgaaatacatttcgaaggcgacctgttcagacgcgagaacgtggtgtgcgtttcggaagccaccctcaatgatctcaggacggcgttcaacactggcgatgatttttggaatcgtcaaaaagaggggtcacgcaggtcatacatttacgaagaaattgtggaaaagctagctcctgttctcaaacattctggtgaccgtgggggtcattatctcagcgggtttagtgaagccgagcgagattatctagcgacactgcaagcatacattcgggacttgcctctggggatgccagaagacttcaaggcaatgcgggaatcgatggatcggggcgagctataccgcatgatccaccattatcaaataatgctggcgcaaaacctcagcgcaaccgagtggcaatcgttcctgagccataacatcgatttggtcgtcaaatgcttgcagcatccggactgcggcgcgctggatccgccgctgggtgcgcaacccaaatccgctgtcgggagcccaatcatttacgggcatgaagcgttggtgctgactgtgaggtcgcctcatgcgacgctcatgatacgtgacagctcaggtcgtattggtgattctgacctacaaggttctggggagccgccaggaaggttgataccccatcccgagttggcatctgcgatagaggaaggtcgaaagctgcggcctgatattccgggacagatccaaaaaccgcggtgcgtcgtggttgccgggctcatgccggcgaacgtggatgaagcggctgcctacataggttaccgagaagcggctaggcaatacaacgggatccatttggtggacttcggcacgctgctgaacgggtttcgcttgctggcctcggcaatagagacttga

SEQ ID NO: 62059 - DNA, 1548 bp, Pseudomonas amygdali pv. mori
atgcgagcctggtgcgcgccgtttgattcaagaaggggcaatagggggatatctgtggtcgaccccgcgcgtacttccaagaccgagcgatcaataatttcaacaacatttggcatggagagcactatggaagggactcagcagaccttgcaggacacatggaacggggaggacgtgttggagcctagtttcagcatcatccggcggccagtggaagcgggcttttgcattgacttgtaccttcaggtttttgacaaaatctcctcagataaatggcagtcattgcccgaagacagatggcatcggctagccacgatcgagccgggttggatcacgatgtatcccatctacaccaacccccatactcagcgctatcggagcccgaagaacggaaacgtgggctgcatcttgtacagccatcagccgacgcgcgatcttccagacactccagaggacgccgtgctctacatcgacgtcagcctccctcgaaaactgtttgatccctgtgaggaaggattggggctggttaaacagcttacgccgctctggcgagggctgcgattcgctcccagcctgaaaaccctagtcatatcggatgatggtgacacctcgatcacagacgacgtcgtctttgtcagcgaggcacgggtggatgaatgccgtagaacatgcatgcggatcactcgggctcgaaaaaagagtgagacgtcagcccagatgcattgggtgctgagccaagtgtttccgacgctgatgcccaatgtggtctttgaaggcagccgtccagtgctggcgagcgatacgacccctcgcagagtcagtaatcaagttgcgcaggcggctgtgcgggcgcggcgtcatcagctcagagaagtgaaggtcggcgctgagatgttggcgaaggaagcgcctcgcgaactattcgaattgcacgcggagatcgagagggtcaccttggccgtaatgatcgaaaagttcgagagcatgctgagccagaacctcagcgagggccactggcagcattttttcgaggccaacctgttcatcctagcgatggtgttctcgcgccctgttgcgcttctgcatacccagttccatgcccaaggctccacgatcaatggggctggcgctcatattggcgatctgcttttctcacaaggacgcgaactggccatcgtggaaatcaagaaaccttccacccctttgatgcaaagccgaccgtatcgcaaccaggatgtcttcggcccgaatttgcagctcagtggagcaattacgcaggtgctatatcagcaaggcctgatgcgctccaactggctgtcgcaccttcgagatccaacgatgcgagacttgaatccagacacagcgaggtgcgttgtcattgccggtaccaagccaacagaggaaggccgccggcgcagcttcgagatattccgcaacgcctgcaaagatgtcgaggtcgttacctttgatgagctgctaggcaagctgcggatgctggcccagcacctgacgcccgcagctccggccgacctcccagatattttctga

SEQ ID NO: 62060 - DNA, 1422 bp, Pseudomonas amygdali pv. tabaci
atggaagggcctaagcaaacctcgcaggacgtgtggaatggggaggacgtgcttgagcccagcttcatcaccattcgccggccgttggaaagcggcttttgcgttgacctgtatcttcaggtcttcgaaaaagtctccatggacaaatggcggtcactgcccgaagacagatggcatcacctagcaacgatcgagcctggctggattacgatgtatcccatctacacgaacccacacactcagcgctatcggagccctaagaacggaaacgtgggttgcatcctgtacagccatcagtcgacgcgcgactttccagacactccggatgatgccgtgctctatatcgacgtcagcctccctcgcaaactgtttgattcctgtgatgaagggctgggacttgtgaaacagctcaccccgctctggcgaggcttgcgattcgctcctggtttaaaaaccctagtcatatcggatgatagtgacacctcgatcacagacgacattgtctttgtgagtgaggcgagggtggatgaatgccgtagaacatgcatgcggattacccgggcccgaaaaaagagtgagacgtcagcccagttgcactgggtgatgagccaggtgtttccgacgctgatgcccaatgtggtattcgaaggcagccgccctgtactggtgagcgatacgaatgctcgtaaggtcggcaatacaattgcacaagctgctgtgcgagcccggcgtcaccagcttagggagatgaaggtcggtgttgagatgctggcgaaggaagctcctcgcgaacttttcgaactgcgcgctgagatcgagagggttaccttggctgtgatgatcgaaaagttcgagaccatgcttggccagaacctcagcgaggggcactggcagcagttcttcgaggccaatctgttcatcctagggatggtgttcgcgcgcccggtggcgcttctgcatactcagttccatgcccggggatccatggtcaatggcgctggcgcccacatcggcgacctgcttttcgcgcagggatgcgagctggccatcgtggagatcaagaagccttccaccccactcatgcagagcagggcgtatcgcaatcgcgatgttttcggcccacatctgcagctcagtggagcgattactcaggtactgcatcagcaaggcctgatgcgctccaactggctgtcacacctgcaagacccgacgatgcgagacttgcaacaagacacagcgaggtgcgtcgtcattgcaggtaccaagccaaccgaagaggggcgccggcgcagcttcgagatctttcgcaacgcctgtaaggacgtcgaggtcgtcacctttgacgagttgcttggtaagctgcggatgctggctcagcacctggcacccgtagatccagtcgacatcccagacattttctga

SEQ ID NO: 62061 - DNA, 1632 bp, Pseudomonas amygdali pv. eriobotryae; identical to SEQ ID NO: 62056

SEQ ID NO: 62062 - DNA, 1122 bp, Syntrophobotulus glycolicus DSM 8271
atgggacgtttagacgataattggaaggaaggtaaaagatttttaccaattctatcaggtgaagatgagggctttaaaaaactatttgatgaaaaaactaatagaattaatagagataactatgaaggacatggttttgcatgggaaataatgaataattgtcaagaaatagtattaggttatgaagaaaaagttggatactgcttaaatcttgttttaagaagtattgatatgaagacctttgaaataattgtcgaggctgcactacaaatgcaatgtggagaagatattaataaagttagggatattattggaattgctatgataaaagatgtcccagtatttggagatactattgagcttcatgagaatttaaaggatattcagagtagcataatcaaagaaggttttacttctttttttgatggggaagaaaaaagagttaagataacgagatttaacgactttgatttaaataatagtaaggaaatcttgaaaaacctatcatgttctcatctaataacgcccggtgaaataagaatagtgaatgagaaaatatcaagcgattttcgtcaatatgcaaatgctgcaaaattcatagactctttgcatttagttattaaagaattctccgaacttcttaaatctaaaacgagaaacgaaaaccaattacaagaatatattacaagaaacccaatactgtttggtactgagtataagtctattaaacctaagcattgtctaggtagtgaatatgaaatggactatgcattacagagatttgacggtatttttgatttggttgagctagaatcaagtagtttagggttgtatacgaaagatggaaatcctagagctgagttaactcatgccgaacagcagatcctggattggcaagagtggctagaagaaaaaaatttttatgctagggaatatttgaaggatattcggagtccaaagggttttgttgttcttggtagaagtgagagtttgaatgatgatctaaagaaaaaactagcaagaagaaatcttacattcgggaataagcttcaggtactaacatatgatgatttgttaaataaggtagaaacgtttcttgaaataataaaaaaaagcaattaa

SEQ ID NO: 62063 - DNA, 1155 bp, Acinetobacter venetianus
atggatgattatcaaaatccgaaagaaggtaagacctacattagtccaaggttagatgcctttggtaactctgacaggaaggtgcgaattgcttctaaggtaattgaatcacccgactcatatgcttttgcgaaaatcaaagatgaagtagtactgaggcataaagagggtgctaagtcacatatcaccgcaaaatttcttgaagacaatcgaggaatatttgttcttagcattcaaagctatactatcgctacagagaagccacataatgccagcttctcctttattggagaggaaattggtaagctcctagaatttatacgaaatatccaatcggttaatttagataatccatctagagtcaatattagtgatgaagaattaaaccgaattatactgaatgacaagcaggtcaaaagcttgttccacgaaaaccaagaactatttgctgaggtcctaaaatctgaaattactacggaagatttgattgcagtcggctaccgaaaaacgcaactagatgtctacgagaaacttctttctaatcaaagctacttcgaatcaattaagtccaagaaaaatacaactaatgaaggtctatggcaaaagtactttgaaaagaatccgtgggtatttggatatgggctgggatacatattcttatccacccttgacgacaagaaattggagcaagttgtgcaaggacatagtgtagactcgcacggaaaaagagttgatgcgttaatgaaaacgaaggggataatttctaacctttgttttgttgaaattaaaactcatgttactgagctgcttgaatctaaaccatatagggcgggctgctgggcaccatcaaaggagttggctggtgcgatagcccaagttcaaggtactgtttcatctgctgtcgagagtctatctagcaaaattaatcccagtgatagtcaaggcaatccaactggtgaagaaatctttaactatcagccgaaatcgtacctagtaattggtagtatgagcgagtttgtttcagaaaatggagtaaataaagacaagataaggtcatttgagctattgcgtaaaaacactacaaacccagagattataacctttgacgaattatatgaacgtgcaaaatttatcgtacatcataatcaaagctaa

SEQ ID NO: 62064 - DNA, 675 bp, Pseudomonas coronafaciens pv. atropurpurea
gtgaaggtcggtgttgagatgctggctaaggaagttcctcgcgaactcttcgagctgcgcgccgagatcgagagggtcaccttggctgtgatgatcgaaaagttcgagaccatgcttggccagaacctcagcgaggggtactggcagcagttcttcgaggccaacctgttcatcctagggattgtgttcgcgcgaccggtggcacttctgcacacccagttccatgcccatggatccatggtcaatggcgctggcgcccacatcggcgatctgctattcgcgcagggccgcgagctggcgatcgtggagatcaagaagccttccactccactcatgcagagcaggccgtatcgcaatcgcgatgtattcggccctcatctgcagctcagtggagcgattactcaggtactacaccagcaaggcctgatgcgctccaactggctgtcgcatctgcaagatccaacgatgcgagacttgcaacctgacacggcgaggtgcgttgtcattgccggtaccaagccgacagaagatggtcggcggcggagcttcgagatatttcgcaacgcctgcaaggacgtcgaggtcgtcacctttgacgagctgctaggcaagctgcgtatgctagctcagcacttggcaccagccgatccggcagacattccagatgtgttctga

SEQ ID NO: 62065 - DNA, 1065 bp, Xanthomonas axonopodis pv. phaseoli
atgcaagacgcgagcaaggtgcagaggattgtcaggaaggcagccagcagcgggaagctagactatgcgcctcccgttgtcttgaacgagacaacaaagagcaagcttcaggcgcttgcttggttcattccgcatactgatcgcaccgagttctctctcaagctggaaggcttcgttaagtcgaaaaatcagccatgggtcgaggacaaggcgaagacgctcacattgacggaggcctcttctctacagcttctgaaataccttcaaacccacctcccggttgcagcacaatcgggaacgggtgagttcattctcatcaaggtatccaacggcgaagccaacgtctctgagcacaagccggaggagttggtaggggcgctgaccaaggtgctttctcaaccggagctagtccagcatctatcgactgcggaacttacgcacgagttaagcgccgcgcttcgtggttcaattcgtttgagtgagatgcgttcggctgtggcagagctacgctctaacctgaggcgtgaagtcggcgagcaggtgtatcaagcttggtgcgaaaagcactgctgggcgttcggcaatgcctatgtcctgcgcgatgaggtgcggaacatttcatcgggcgacagcctcgacttgctgttgcccaacgtcatcgccggctacagagacattgttgagctgaagcggccagacaaagacgtgttggtctatgactcggcgcatcggaactactacttttctgctgatgtttccaaagccattgggcagtgccatcgatacttagacatcttgcacgagcaggcgaagcatggcttgctggatcacaaggaggtcgtcgcttatcacccacgagcgaccatcgttattgggcgttcgcacgattggagtgccgagcagcagcgctcgctgcatggcttgaatcgccgcttgcacggcatatcggtgatgacctacgaccatcttttggcccaaggcgagcgactgctggagatgatgtcgccactagatccaagtctggtggatcccagtagcgatgaagacgacgatattccttggtag

SEQ ID NO: 62066 - DNA, 1065 bp, Xanthomonas axonopodis pv. phaseoli
atgcaagacgcgagcaaggtgcagaggattgtcaggaaggcagccagcagcgggaagctagactatgcgcctcccgttgtcttgaacgagacaacaaagagcaagcttcaggcgcttgcttggttcattccgcatactgatcgcaccgagttctctctcaagctggaaggcttcgttaagtcgaaaaatcagccatgggtcgaggacaaggcgaagacgctcacattgacggaggcctcttctctacagcttctgaaataccttcaaacccacctcccggttgcagcacaatcgggaacgggtgagttcattctcatcaaggtatccaacggcgaagccaacgtctctgagcacaagccggaggagttggtaggggcgctgaccaaggtgctttctcaaccggagctagtccagcatctatcgactgcggaacttacgcacgagttaagcgccgcgcttcgtggttcaattcgtttgagtgagatgcgttcggctgtggcagagctacgctctaacctggggcgtgaagtcggcgagcaggtgtatcaagcttggtgcgaaaagcactgctgggcgttcggcaatgcctatgtcctgcgcgatgaggtgcggaacatttcatcgggcgacagcctcgacttgctgttgcccaacgtcatcgccggctacagagacattgttgagctgaagcggccagacaaagacgtgttggtctatgactcggcgcatcggaactactacttttctgctgatgtttccaaagccattgggcagtgccatcgatacttagacatcttgcacgagcaggcgaagcatggcttgctggatcacaaggaggtcgtcgcttatcacccacgagcgaccatcgttattgggcgttcgcacgattggagtgccgagcagcagcgctcgctgcatggcttgaatcgccgcttgcacggcatatcggtgatgacctacgaccatcttttggcccaaggcgagcgactgctggagatgatgtcgccactagatccaagtctggtggatcccagtagcgatgaagacgacgatattccttggtag

SEQ ID NO: 62067 - DNA, 1065 bp, Xanthomonas axonopodis pv. phaseoli; identical to SEQ ID NO: 62065

SEQ ID NO: 62068 - DNA, 1065 bp, Xanthomonas axonopodis pv. phaseoli; identical to SEQ ID NO: 62065

SEQ ID NO: 62069 - DNA, 1293 bp, Xanthomonas axonopodis pv. dieffenbachiae
gtgcttctggcacacgtcagttccactgagatcctcatgttcccgacggtgtcggccgcttaccgctccacgttcctcgagcaaaaatatgaccagatcgccaggatccgcataccgggcgattggaatgtcccgcaggacatctacgagttcaatgaattgcttgacgatcttccggtgggcttctcgcggcgtgcgtcgcggggcctcgggctcaagtgggaaaatcgtttgatcatcgaggccatcgaacgcgcgactgcggcgaccgaactccagttggtcgacggcgacgaggcctcgctttcgggtgagaccttctcgctcggacggcggttgttcgacagtgtccgcaaggggatggcgcagatcggccgaaaatcgcaattccgggcgctacaggacaggcggttccttgcgcacaacgagatagtgcatccgatcgacggggagctttatccgaagcaggtgcgcgaagccagacccggcgagttctttgcgttggcgcaactgagcactcgcgaccagcagcgcagcgcgggagatcgcgctgccgccacggatctcgtcaggcgagacgtttcacagatcgcgcgggacaaccctcgcgcgctgcttgagttgcgttcggaaatcgagcgggtaacgctcggagagttgatcgatcgctttgacgcgctgcttcagcggaatccggacgaacgggtctggcagacgttcttcgagacacatccgttcgtcctgagtatcgcttttccgcacccagtgctgctgatacggggacaggcgtacgtaggaggagcgacgatcgacgggaagggcgagaccattgccgattttcttttccggaaccgacttacgggctcggttgccatcgtggagatcaagacggcgcgcactcacctgcttcagaaaaagaccttccgcgggaccatgcacgccgcgcattccgacctgtgcgccgcaatctcacaagctctggatcagcgcgcggaactcaccaagaatttccatgcgcgtggccaacatcccgacatggagggaacgcacgtgtggcatgtccattgtcttgtggtggctgggaagactcccgaaacgcgcgacaagcgcgggtccctggaccttttccgcagcgcgacgaaggatgtggccgtgatcacgttcgacgagttgcttgagaaactgcgggccatccattacgcgatgtcggctggcagcataggcgctcccgggtccgttacccaaaacgcggggccatctccaacatcgggcgggcccgacacggaccgctga

SEQ ID NO: 62070 - DNA, 1248 bp, endosymbiont of Riftia pachyptila (vent Ph05)
atgatagagatagattgtcaggatgaccgcctcctcctcatctatacgccagaaagatttagttctgactgggtcgataataagctgagtaaaaacggttcggtaacatttcgtcggacttttacttttagtactgatgctcttgtcgaagaagatgaatcaggtctttggacagaggatgaacgtgtttttcttcttgccattggcgatggtgattttttcaatgtcaataaagatatcctcggccttaaatacgacctgcttctctccaaggatatggcaatcagtattaaaacttttgttgcctacagagatatatctgtctttcggcgaatagatgagctggtcgatgaatctattgtaataggagggaatgccgagggagcaatccctgttgccgatttcgaggaattattgcgcaatttcccgacctcaacagaattgacacattacgcgcgcgcaaggattaccagggtattaaaggactatatgggaacgatgtcagatgctcaagtcaagttggacaactatctcgaccaaaagaagaccatccggaatcggtcaaaaatagattttatcaaggactacgaaccgaaaaaatttgaatatgttcgggatgagatttcggcaatgctgcgagaggttgatgccaggccggatgcctttaaggagaaagactggcaacgccagcttgtggagtttttgttgcttatttttcccaggtatgtggcggttcttgaaaacgttcatatcaaggatttctactctacgttagggaaagggacagaccgctacatagatttactgctggtcgatgcaaatggcagcgtggatgtcatcgaagtaaagcgaccacggccacatcaactcctttccagaaaacctggatctcgcggcaactacacaccatccagcgagttgtccgaggctgttatgcaggttgagaagtatcttttccatttgactaaatgggggttagtcggtgagcgctccattcaggaaaagtgcaaggctgaattgccttctgacttcgtaatcaaaattacaaatccaaaagcaatgctcattcttgggcgggataataattttaataataagcaaaagctcgattttgaaattatcaagcgaaaatacgccaatattatcgacattatgacgtatgacgatctgttgcgccggttggacaacatcatcgccatgattcattataacttttcaaagttgggaataaagggagggcaagcatga

SEQ ID NO: 62071 - DNA, 1224 bp, Sphingobium chungbukense
gtgaaggcaatcaaggaagctgccccagaactgcgcgaccgcatcaatcgtcagaagcaggacatctatgcggaggtcgatgtcgtcctgctgcatctgagaaccttggtccgcacgggcgaaaaagcggatgcggatcgcctaatggcggtcatcgtcgatcagtatcgtgaggcgaatgagctgctgaagcacgcgctcgatactaagctcgtcgcccccctcaaggaccagaagaccgaaggctggcccgactgggcggtcgaaacgcgcgccgacgtgctggcgatggccggagagagcggtccctacgagcccctgtgggaaggcgatctcagtgacgattgcaccgccgagcttcacggctacatgcttcgcgcggaaaagatggacgaccggcagtggtggtgggccctctatggtccggatggcaacatatcgagtaacgaaaagccgggtaactataccaccggaggccaggcgcgtcgcgcggccgccaacgaatttcgccgcgcggtcggggctccgcgcggagagccgcaaggcgccagcgacatggtcgctctcggcctcgtcgacggcgcgctgcgtttgttcgcctttgcagatgacgagatctaccgcttcgccgacggcaacaacaatcctcatcagattctcagtcgcatcgcccatttcgggcgcttccttagcggtgcgatcaacgagttcgaggagctgatcaacagtccgctggcaaaggagcgcgatcttcaacgcttcttcgaaacctatcccgatttcctgatccgcgacgagtacaaggctgctcatccccatatggtgctcagcacaccaggtcatggcgatctgatacccgacttcgtgctcgaaccccacgaccagggaggtttttgcgacctgctcgagttgaagcggccgcagcacaagatcacatcctacatgaagaatcggccggatttcaccgcgaccgtccatcgcgccaaggcacagctgcgcacctacgaggcttatttcgaagaagagggcaatcgcacgaggattgcgcagcgctatggccttaatctctatcgtccgcggatgattctcgttatcggtcaaaaacagcacatcgatccgcggatctccgcgctcgaataccggcgcatggagatggaaacgccgcagctcgtcatccgcacctatgaccaactgctggatcgaatgcgctctaggaaccgctag

SEQ ID NO: 62072 - DNA, 928 bp, Xanthomonas arboricola pv. pruni str. MAFF 311562
aaacaagttggaatctcaatggagtgcctggcgctcgctagatgccccggaggtggtcgaagacaagtatcctcaagtcagggtatggatagaatctttaggcgacgagcgtattaaaagagatgcaaaaaaactgattggggcagtggagcgtttggccttggcggaatcggaaaaggttgaagttttaaagcattcaatcttcgtttttgaacgaatgaaattgaaagggaggactgcggagctggctgaggccgtttcccttagcgatgctgcgttgattaaactctttgcggaccaagatgcacttgaggcgggtgtttaccgggacatcgttaaaggtcggcttggtgagattcgcctgcttaaagacgcggtggataaaaacgagaaagaaaaggttcttcaacagttacttttcgatcgtttatggcttttggatccgtcttgggagcgcgccactggaagtccacaaattgaacaacaatttaagaagctttttccaagctcatctgatgaaaaagatgaggaggcctcgaaaggccgttttgacattacttataggactgcggctggcaagcacataattgtagagttgaagcgggctaaccgcagcgtaaccttggcggagttatctgagcagggcatgaagtatgttgatgagttgaataggcttcttgtaaagcatggggcgatcaaagaggggttccagccggatatcgaggtgatctttgtgctcggcaaccgcgtgcctgaacaacagaataatgttcagcgatataagaaccaaatggatgccatttcggttggttcgcgcgtcaagacttatgaggaacttgtttcacaggcgctggatgcatataaggattatcttgagaagacgaaggacctaggctccctctcagacctgattgaaagcattggttga

SEQ ID NO: 62073 - DNA, 1062 bp, Xanthomonas vesicatoria
atgcaggactcgagcaaggtgcagaggattgtcaggaaggcagccagcagcgggaagctggactatgcgcctcccgtcgtcttgaacgagacaacgaagagcaagcttcaggcgcttgcgtggttcattccgcatagcgaccgcaccgagttctcactcaagcttgagggcttcgttaagtcgaaaaatcagccatgggtcgaggacaaggcgaagacgctcacattgacggaggcctcttctctacagcttctgaaataccttcaaacccatctcccggttgtagcacaatcgggaacaggggagttcatcctcatcaaggtctccaacggcgaggccaatctctccgatcacaagccggaggagttggtgggggcgctgaccaaggtgctttctcaaccggagctcgtccaacatctttcgactgccgaacttacacacgagttgagcgccgcgcttcgtggttcgattcgtttaagtgagatgcgttcggctgtcgcagaactacgatcgaacctgggacgtgaagtgggcgaacaggtgtatcaggcttggtgcgaaaagcattgctgggcgttcgggaatgcctacgtcatccgggatgaggtgcgaaacatttcatcgggcgacagcctcgacttgctattgcccaacgtcatcgccggctacagagacatcgttgagctgaagcggcccgacaaagacgtgttggtctatgactcggcgcatcggaactactacttctctgctgatgtttccaaggccattgggcagtgccatcgctacttggacatcctgcatgagcaggcgaagcacggcttgctggatcacaaggaggtcgtcgcttatcacccgcgagcgaccatcgttattgggcgctcgaatgaatgggatgaggagcagcagcggtcactgcatggtttgaatcgccgtctgcatggtatttcggtaatgacctacgaccatttgctggcccaaggcgagcggctgatcgagatgatgtcaccctcggtaagtgaagcgcttgttccggcagcgattgacgacggcatcccttggtag

SEQ ID NO: 62074 - DNA, 1062 bp, Xanthomonas vesicatoria; identical to SEQ ID NO: 62073

SEQ ID NO: 62075 - DNA, 1407 bp, Rhizobium gallicum bv. gallicum R602
atgagcggtagttcgatcgtaaagttccagactgtggtggctgaaagccaggatggactgagcatcgacttgatgacgaccgatcacggcctagaacagctacatctgatcatttcaccgaaggctctcgacaaactcatcaaagacaacccaggcttcaagcatccaggaaatccggtcgtcttggcccaatacgatgccgatagcgaaaaattgacggtgttcccgctccgaacactcctgacgtcacggttccttgaacccaaatacacgaaaattcgatctatcgttgtcgatggaatatcctctctcgagcatcaggattacagcgagaatgtgggcataggaaatatgccggcaggtcttgtgcgagcccctctgtttggtttcggcgtcctgaacgacttgcgtaccatcgtgcaagccgttgagagggtgcccgatgtaacggagctgtatgtttcgaaagccagaggcgtgtcgcaaaacggtgggactttgcgaatttcacgctcaatcttcgatggattccgcaaaactgtcggcaggcttcatagaaagacattagcgttcgtgaacgagcgcaagctggaagtcatcgagactaagatatccgacttgctccaggcgaaagactcggtcgactatcacgacgatgtaaattcggctctcgcggaccgacttgcagaagcgctcgttggcaagataaaatccgggacgatatcccggaaagccgcgctccaaaccgtgagggcttccgtggcgaatatagccaaaactgagcccactgaaatcctttccctccagcgtgaaatcgaaaccgttaccctcgaggatctgatagagaggatggaaaagaggatcgctcaaaagggactgactgagcacgactggcagtcgttcctttctgcgaacgcattcattttaagagctttcggtgtccccgcgcttgtcttcgaagagcagcttgcggtgggtgggacacgtttcgatggcggaggtggaaagctcgcggattacgcgattagagctgggcttttgggcaatctcgcaattatcgagattaaacgctcttcgacagatttggtcgaacgcaaggcctaccgcggtgacctgcatgctccgtcaacggaactttccggcgccgtgagccaagtgctggatcaacgctatcgccttcagatggacatcaaatcgaagaaaatcgattccggcatttttgacgtctacacttacgccgttcaatgcatcgtaatcgcgggattgacaccggaaagcgagccgatgagaaaatcgttcgaactataccggaacagcctgaaggaggttctgattctgacattcgacgagctgcttgctaagttgcgtgcgctcctatcattcctaaaaggcgagcaaacgagctga

SEQ ID NO: 62076 - DNA, 1524 bp, Rhizobium gallicum bv. gallicum R602
ttggattgctttgcaatgagtggcgacgcacatttttcggtgaatacgcggttaacccggctcttgggcgagacttaccgctccagtgaggccgcacttaaggaactggtcgacaacgcctgggatgctgacgcaagaaacgtctggatcatattgccgttgccgatgaccagcgaagcgatcgttgtcagggacgacggctcaggcatgacttctctcgaaatgcagaacgagtacttgaacatcgcgagtgacaagcgcgctcgcactggggagcggacgccttcgatgaagcggagggtcaagggccgcaagggcattggaaagtttgcgggcctgtcgcttgccaatcggatggatgttaccgccgtggcgcgtggacgcaggtgcagcctgaccattgacaagatcgctctgaccgaaaacgagaacgatctcgagtccgtgccgcttcctttcatcgaagaggaagctgccagcggtgaaattgggacaacgatcgtattgtcggatctcgacaaccgcctgaactttccgacagccgatcgtttccgggaagtgctggttcacgagtacggacgcgaagagagtttcaaagtgttcgtcaacgatgttcagttgtcagtcgaggatgtcccgggtgtttccaagcaggttgaagaggtgcttggcgagagcggggctgtccgactgcattttacgatcgcagacgggaaaaaagctccggaatcccctggtattgtcctaaaggtcgccggaaaggtggtcggaaggcccatgctcttcgggttggacgatgacgaggaaattccactcaagctgtcgaagcgcgtctacggcgaagtcgaactcgagggcaatgatcacttcgtcactgcggattggggcggagtgatcgaaaacagcaaggcatttcaggaaatccaagcctacgttcggtcgatagtgaagcaggaactgcaggagactcacgcccgcgatatgagcttacaactagctcgattgaagcggcagatcgatttgcggcttcagcagcttccggagcaccgtcggcggtatgcggaggaggcgttgagccgcatactccgacgcttctacggcgaaagcgaggatcggatttcgacgatcgccgaagtcgcattggatgcgatcgagcacgatgcctattgggctgtgctcgagcggatcaatacaaccagccgaggtgacgtcggctcgttcgctgaagcgctcgaacagtttgggcttgtcgaactttctgcaatggcggcccaggcgaagagaaggttggagtttctcgacttcctggatgaactcatccagaacgatgcgacgctcgaacaaaacgtccataaagctctcgaaacgaatctttgggtgttcggccggcagttcgccaccatggcatcgaacgcaacgctcaagagcatcatcgccagctatggcatacgaaattcacaggcgatcgtgcgtcgaagcgcccagatctcctgctgtagcaggatattggcgacagctacctga

SEQ ID NO: 62077 - DNA, 1071 bp, Citrobacter braakii
ttgaaaacattagatttagttcacgattttggcaataaccgaacttccggagtcggtgggatttgcagagtcagatgttacataaacaaaaaagatattattgtgcttttaaccgatctgggttcattaaacgatggtcagtcggtaaccaatgcagtagaaaagataataagttcaatctatgaacatgggatagttacacaagctgccgttttcatagagcactatgaaagaaactcacataagcttgatacgtttgatatagtgaacataagcccaaaaacagaatggttctcaatatcaagagaaaaagtattagatttactcggttgtgatgaagatgagctttctgaacgcagcataaataataggaaggtttatgagaaagccgataaaataagatacgctcgagatccttttatagattcaacttatataccatcaccagagttcatttctcgtaagtgcgaaatattaaactctatggttctgaagtcttcaattgctcagctaattgagtcaggtgcaaaggaacaagatattcagcaagttataaaaaacgatttatctttaattgccgaggcttacgtcggtaataatgaatacatttgtttttccgaatatccgttagctgatggattagtggattttgtaattttcacaggcagatcacgtatggatatcatcctaattgaagtgaaaggagctaactttaacttagttaatgcgaataactacggttcatttaaccataaagttagagatgccgccgagcagatccaaaaaaggcttggtctggtctataggaattatgaatcgtttcggaaagatgctcatgaaaaacgaattaaagttttgtcaggtgatttaatccataatgcattcgtcggacctgaatcttgtaagcaagtagatccaaataaagatgtaaacgttcgctctattgtcattgggggacgaacattaaatgatttagaagaaagtaaaaaacgccatgactatgaaattcattcaactccacctatccgtattgaatcttgggatacttggcttaggagattaacacgatag

SEQ ID NO: 62078 - DNA, 1182 bp, Streptomyces canus
ctgaaactgcaactgaagcatgtcgccgggcatgccgtcgattccagggtcaaggacgcacttgcagcggtcgtcaaacacatgaccagcggcagaagctcctacaggggaggccgcgcgctcatcaccttgctgaaggacgtgcgctcaaccgcagcagcggtagacgaatggcaagtcgtgcgactgatagaagactccttggactacgcggaaggacgaatcctccggccagacttcgaagagcgataccggctctttcaacggtcgacagaaccgctgagctcgcatcaggactatctggcacgaacgctctctgcgagtctggcctacttcatgcaactcggcgaccagtacctccagcaacatcctggcgcaagcccgagcgagctgctcacccatgtggaagccattgcccgggacgcacgttacatgcagcagtcgcaggagcggcctggccgctatcggatccttcgcggcagcgccgaggtggccgcgtggcttgagcaggtcttccatgagcgggtggacgtggaagatccggaagacactgcccgccgcatcgtgatgtcccccgactctctcgcagtcttggcagcggacagagagggacaactgcttctgagagccgccgaggttcagcgccgtcggcggggcctcgaagtactgcgtatggcagtagaagaccccgaagcgaacgagagagatctacagcgtgcgctggacggtcagtactggatcttcggcggacaattcgcaagccaggcaatcaggcgtagattggtccccggagacgaaatcgacatcccgctgatacgtggggacggcgcactacacatcgttgagttgaagcgctctatgagcctccacggctcgctggtcaagagacacagagggtgttgggtgccgacggcggaggtgcacgacgctatgagccaagcggtgaactacttggtcggcttggacgaacatcgaatccggattcgagacgaactcggtatcgagactcgccgagcaagcgctctagttctgatcggacacccatcggtgcaaccggatgtggccgaggaagacatcaatgaagccttgcgcatgctcaacacgcacatgagccgggtagaggccgtcacctacaaggaattggtagataacgcagagcgtgcactgagcggctggcgatag

SEQ ID NO: 62079 - DNA, 741 bp, Pantoea dispersa EGD-AAK13
atgaggctgcttgaacatgctgataacacctcattggttttagctctccaaaatgtaatcactaatcgccttacaaatgacgacatcaatactatcttgggtagaaaggatagcttgaaaaaatatcaaaccatgcttgataatgcggctcattataatgagccgcaatggcaggctttttttgaaaagaatgagtggttatttggttatgggcttagatataagtatctcaaaattattcagcgtgaggcccatatatcacatactgatcttaatggttcgaatgatgtaataactgatttccttgtgtctgattctcgcttcactaaaattgttgaattaaagactcccgaaacaagtctttttgtcaacaggaaaaatagggctgattcatggcggctttcaagtgagttaacagatgcagtcagccaaatacttgctcaaaaagctaactgggaaattgaaagtcaaagagaaaactacaattcagatggagagcgtatctatgaaaaaacatatgatgctgaatgcatattaataattggttcgttagattcaatagatggaagtgaacgcgaaaaagaaataaaaaagaaaacctttgagctttatcgtagaaatcttaaaagtatagatattatatgctatgatgaactactcgagcgcgctaagtttatagttaaaagtgctgagataattgaaagtgcaattggtagtgttttggaagatgatctaatttga

SEQ ID NO: 62080 - DNA, 1239 bp, Paraburkholderia glathei
atgttggatttccgtaccacgaagaccggcgtcgatttcgactaccagccggagtttggcactcaacatcagtgggtctgggaggaaatgaagagcgggaagtccacggaggtatctcgcgtattctcctttcaaaaagcggacctcaagaatccgcccaccaacaaaacggactttactgagtacgtctatacatttcgctttggcacgtttgaagacgagtacttgcgaatccccggcagtgtcttttctatcgagcgagatgtgctcgtaagccgcgagcttcggctaaaacgttcggtctttgtcgccgaacgaaatgtctcaattatgaagcgactctccgatcttctcgataacgacgagcctattgttatcgggggcggccgcgccgggaacattccgctgcccgtctatcaggaattgctcaggaaattcccgaccacacacgagcttaatcgctacgctgctgcacgcgttcacaccatcctctcgcagtatgtggacggcatgaaggatgcacgggggctttatgagtcctacctcgataagaggtcagcgctgaacggagccttatctgctgaaaatccgccggaactcaaagcgttgaaggaacaggaggtccttaagtaccgccttatccatgacgaaattcaacagagtctgctgaccggcaagaacctgtccgagaaagaatggcaacagcggatggtttcattccttctactgctgtttccaaagtacatcagggtgcttcaaaacatcacaattaacgactactacagcaagtcgggtaaaacgtccaagcgatatatcgacatcggcctagtggacgcgagcggaaacctcgacgtcattgaactcaaaaaacccttcgaagacaaaattcttcgccaaggactgtaccgaggcaacaacattccgactgccgagttgaccggtagcgtcatgcaggcagagaagtatctcttccacttgtcgaaatggggtgtcgacggagagcgcgccctcacgaaggcctacgcctccgaacttcctccaggattggatatccggatatccaatccgaaggcaatcattatcgtcggccgcggccggattggcggtaagaagatgactgatggccagcaactcgattttgaaatcatcaagcgcaagtacgcgaacatgatagacatcatcacttacgatgacttgctaggccgcctccaaaacaccatctacgcgctcgaacactga

SEQ ID NO: 62081 - DNA, 1239 bp, Paraburkholderia glathei; identical to SEQ ID NO: 62080

SEQ ID NO: 62082 - DNA, 1263 bp, Burkholderia vietnamiensis
atgcccgataaagactggccgctgctggcaaccatccttccgaacagaatcatcacgcggccgatccatgtgaatccgcacgcgcagcgctacctgacgcccaagaacgggcgcttcactacggtcatctacgttgatgagggtggcgataaattgctggatgacgccgaagctgcagcgttgcgcattgaatcacgcttagcctggggcctgtttgaccctcccggcaatggcctcggtctgaacagggatcttgaccctctgtggcaaggcctatcgcggattcagcacgccgatgtcctcgtgatcagcgagcacccggagatgcacgccgtagacggcgtggtttcgattagcacccaagaagtcgacaggctgcgccgcgcgtttaatcgggtcacgacgaatggccgtaagctcattcgtcaaacaaagcaaggcattgtgcacgacgacgtactcacaaggattgatcccgaacgatttcgacgagtcgtgcaggtgaacccgcccttggtcgaggttcgacgcgagggaacgaagcaggctgcagcgcgggagcgtgccgagcgtcgctccaacgtgcaggccgtgcgcaagcagctcggtgagctagtgacagaggctccccgggagctgatgatgctgcatgccgagattgagcgggtgacgctcgcaaagatgattgaggcattcaaggcgaagctcgccagtaagctcaccgaatcgcactggcagacgttctttgagcaaaacaaattcgtcctgagcatggcttttgcgcgtcccgtcgagctgactcatacgcaattccacgcaaaaggttctaccttgaccggcgcaggtgctcagatcggcgattttctgttcaaggaatatggccaagcactcgccattgttgaaatcaaaacgccggatacggcgttgctacagggcacagcctaccgcgggcaggatgtctttggcccgaactcggaactctcgggcgcggtgacccaagcgctcttccaacagagcgagcttaagcaacgctggatgactcatgtaaatgacaacccggccctgcgccagtccggcgtcgatgtcgtcaactgcgtggtcgtcgcaggccgtctgcccaccgatccaagcagactgcgcagctttgaggtgttccgaaacgcgtgcaaaaacgtggacattgtcacttttgacgaacttctagcgaagcttgagttcctggaggagcaactgactccgaagcctgaaccagtcccgttttga

SEQ ID NO: 62083 - DNA, 1017 bp, Burkholderia vietnamiensis
ttggacgatgacgacgttgatcgagcgacggcaagtcgtgaggcgatcaagaaggatgatccgaagtataaggcgctgatcgggtttgttcgctcgacgcttgaagatattggatcaaaatgggatgaatggcgaatcgcgctgggcttggatggctctgatccgcagaatgcagcagtgcttgagtggatcgatacgctcgcagacaagcgggataaaaaggctgccacgaagcttatgacgtcgatcaagaatgctgtcgtacattccgatcccgcaaaaaacgacgaggcgaagaaggttctttatcgcggtgctattatcggtttcgagaagctgagattgcggaatcagcttgacaagcttgcgcaagttactgatatattgggcgctgaattcgctgcgatatttgcgacgctagatcaggttgaagagtcttcatatgcggagataacaaggcagcgcctggagatcattaagaaattcgcggaaatttgtaacgatcctggaacattagagaaggtcgcgcataagtatctatttgagcacctttggctgttggaccctacgtgggatcgcgttactggtcgcgctgagatggagaaaactctgacggaagagctgaagaagaaacatccggactccactggtgctcgactggacatttcgtatagagcaagctcgggcaggcatgttgttgttgagctcaaaaagcctacaaagacatcgttggattatggtgatttgtttcagcaggtgagaaagtacaagcaggcggtcgaggcatattacgacgataaagagccgaataagcccgttccgccccttgatatatatttgcttgtggcgaaacgtccgaatggattttcagagtctgatcgccagtcgcttgctgctcagaatggtaggttgataacgtacgagcaactgattaacgatgcccggaatgcttatcagcaatacctcgatgttaataagatcactttgcccttagaagggatcttgaagaagctgtaa

SEQ ID NO: 62084 - DNA, 438 bp, Burkholderia vietnamiensis
atgcgtttcggtgcccaaagcgcgcgtgctgagcttctctgtgagtggcaaagcgaggagagaaaggcaataaagccagatttttttgttgtgcagtcaaacggttacgctgacatcgttgagttcaagcttcctgatattggaaaaaaaaccgtgacggggagcgaaaatcgagaggcttttgccgcatggctgaattcatacatagctcagacccgtgtatacgctacctatttcgacgatccgaacaatcggaggtggttcgaggagaaatatggtttcaaagtctacaagccgaggcggtggctgatcgtcgggcgtcgatcggatttcacgtcggagatatggagggagatcatttccgactaccgagacttggaaatactcacgtttgatgatttgatagatggcgtagtggcgcagttctataaaaaatga

SEQ ID NO: 62085 - DNA, 1263 bp, Burkholderia vietnamiensis; identical to SEQ ID NO: 62082

SEQ ID NO: 62086 - DNA, 1410 bp, Enterobacter asburiae; identical to SEQ ID NO: 61283

SEQ ID NO: 62087 - DNA, 1410 bp, Enterobacter asburiae; identical to SEQ ID NO: 61283

SEQ ID NO: 62088 - DNA, 957 bp, Shewanella baltica OS185
atggcacaaattaaagacagattagttaggataattcgtgataaacctcgtgttctgactagagctatattttggaagattccgcacaacacttcagaagatgaagtgtttttgaagcttggtagatacaataaaccaaagagttggcatgagagtgaaactctcgagctcgatagccctaaaagtgaactaacactagacagtgaagagtttcacaatttaattgattttatttcaaacaattatgaacctttcaagcaaggtactagagctttcttgccacttgataatccgtatgatctttccaatgctgagcaaattaaacagttgttgaatttgccagacaaacggggaatgcttgagttccttttggcaaatgaggtaatccctgaagatctagagttaggtttagagcatgctcgaaaagtccgagcgctagatgaattccaataccttttagagtcggactttactgaaaacgtatggcaaaactggtttgaaaaaaatagttgggttcttggtagtgactttgtcaaagttctagatgagagggctatagatacccacaatatttcagactttctgatggaaagctatgatggttttctggatattgtcgaaataaaacgccctgagggaagccttaaattttggtctacgggacttgaccacaataactattatccgcactctgacctaattaaagctatcactcaatcccagagttacattcatgaagttgaactggaagctaacagcgtcaagttcatggaaagggtaggctacgttaaaaccatcaagccaaggtgcactttaatttacgggcgctcaaatgattggaataaagagcaacaacaggcatttcgcgtactcaatagtagttaccataacctaacaattatgacgtttgatcatgtcttagaaagggcaaagcgcataattgggaaacgcggctaa

SEQ ID NO: 62089 - DNA, 999 bp, Streptomyces roseosporus NRRL 15998
gtgtccccggcgggctcgttgatcttcttcatgcacacgtcgaagtcaacggccgccggggacacgccggttacggggtgtcggaccgtactacgggatgatctggaagcgcccgtcaggcagcttgcgcagccggccccgcccggacagtttggtcaacttgccgcgcagcggctccagtcggcccttcacctcgacgtcgaggcccagctcgatgccgacgtccttgacccgggccgggccgcctgctttacgcacgatgctcatgatctgctggtagtccggcggcaacgcgtcctcgctcatgcccgcctcgcgctccgggacggccagatggtcttcagggcggcagaacttcaacgtcgggcggtcggcctggaccgcctccgcgcggtggcggaggaccggaccgcgaccgagcacgatctccaggccgcgctcgaaggacagcgctggatcttcggcggtcggttcgtgggggaagccgcacggaggcggctggtaccgggcgatgagatcgacatccccctcatccgcggcgacggcagcctgcacatcgtggagctgaagcgggccatgagcctgcgcaaaccactggtgaagcagcaccgaggcgcctgggtgcccgccgcagacgtgcacgacgcggtcggccaagagatcaactatcttgtcggactggacgagaaccgtcagaagatccggcgggagctgggcatcgagacccgccgtgcaagtgcggtcgtactgatcggccatcccgcagtccagcccgatgtccccgagcaggacatcaacgaagctctcaggacgttcaacagtcacatgagccgggtcgaggtcctgacctacaaagagctgatcgacaacgcggagcggtccctggggtcccaggaggccgggtctccggccgcctcctctcccgctgagggcagaagccgaaagccgtcgaccgaccagagactcctcctcatgcggctggaccgccggggaacctga

SEQ ID NO: 62090 - DNA, 969 bp, Streptomyces roseosporus NRRL 11379
atgcacacgtcgaagtcaacggccgccggggacacgccggttacggggtgtcggaccgtactacgggatgatctggaagcgcccgtcaggcagcttgcgcagccggccccgcccggacagtttggtcaacttgccgcgcagcggctccagtcggcccttcacctcgacgtcgaggcccagctcgatgccgacgtccttgacccgggccgggccgcctgctttacgcacgatgctcatgatctgctggtagtccggcggcaacgcgtcctcgctcatgcccgcctcgcgctccgggacggccagatggtcttcagggcggcagaacttcaacgtcgggcggtcggcctggaccgcctccgcgcggtggcggaggaccggaccgcgaccgagcacgatctccaggccgcgctcgaaggacagcgctggatcttcggcggtcggttcgtgggggaagccgcacggaggcggctggtaccgggcgatgagatcgacatccccctcatccgcggcgacggcagcctgcacatcgtggagctgaagcgggccatgagcctgcgcaaaccactggtgaagcagcaccgaggcgcctgggtgcccgccgcagacgtgcacgacgcggtcggccaagagatcaactatcttgtcggactggacgagaaccgtcagaagatccggcgggagctgggcatcgagacccgccgtgcaagtgcggtcgtactgatcggccatcccgcagtccagcccgatgtccccgagcaggacatcaacgaagctctcaggacgttcaacagtcacatgagccgggtcgaggtcctgacctacaaagagctgatcgacaacgcggagcggtccctggggtcccaggaggccgggtctccggccgcctcctctcccgctgagggcagaagccgaaagccgtcgaccgaccagagactcctcctcatgcggctggaccgccggggaacctga

SEQ ID NO: 62091 - DNA, 1035 bp, Streptomyces mutabilis
atggactgggacgagcctgcctactttgaccgccgccccgcatcgtcgggccgggtgtcgtactgcgacgcactcacgatccgagacaaccgatcggtaagcataaaggctcttccctatttcatcccacacaactcttcacgatccgagcttgccataaaattgattcgagaagacaaaaggaacggagagatctgtgaaatatcactaaaggaagaagaccttcgcacacttaagcggcacatcgcacaatgcctgtcagttgcagaggaggatgacgatgggcgatacctcgtgctgcgcacggacgacctcagcagtcagccggatgtcagcgaagatgccgcacgcgccctgggcggcgcactggacagtaggcagttcgcaagaatggtggcgcgcagcgtcgatccagtgacgctcgccaaaacattttcagcaagcgtgcgaataggcgagctacgtgctgcggtaacggaactcaagcagaacttgaacgacggaaacaccagagaggccatctatcaggattggtgcgagcgtcactcctgggcattcgggaatgcttatgtcgctcgtgacaatcaacgagtaattgggattggcgaccacgtcgacgtgatgatgcagtcgacagcgaacggactgcgagacatcttcgaactcaagcgtcccgacatggacgtaatcctatacgacgagacgcataagaactggtactggtcatctgccacagctaaggcgatcggacagtgtcatcgataccttgacacactgcatcagatggcccagagcggcctctaccaagaccgtgcagatatagccgcctaccacccgcgcgcggtggttgtaattggccgctcgcgcggctggagcgacccgcagttgcgggcgctgcatggcctgaacagcagaatgcacgggatcagcgtgatgacttacgaccaactgctggcccaatgcgagaccctgttgaggcaagtgacagaccacgcagaagaccagcaagacttgcctgaagagatgtccgcttga

SEQ ID NO: 62092 - DNA, 1182 bp, Streptomyces varsoviensis
atgcaactcaagcatgtattggatgcggccgtcgatccggacgtgagggaagccctcgcggcggcgcggagatacatgaacagcggcagtagagcgcatcgcaggggagggaaggccctgatccagatgctggaagcgattcgccgaagtgcggcagacgttggcgagtggcaggtcgtccgtctggtccaagactctttggactacgccgaggggcgcattctccagccggaccttaatgaccggtatcgcctgttccaagatggtgtacgcaatacgaacttgcggaatggtgctagcgaactgctatgtcaccagttcgggcgcctcgcggaagcgagccgtgagtatgcggaagagcaccccgacgccgacgtaggcgatctgattgcgtacttcggatcgctatccgaggacgcgcggtatctggacgcgccggaggaccgcccaggccggtatcgcgttctccgtgggcgggccgagatcgcggtgtggctggagcgcgtgctgcgggaacggatcgacatcgaggacccggcggaggctgctcgccggattgtcgcctcgccggaagctgtcgctctccttgccgccgacacggagggggagatggttctcagagcgaaggagctgcaacggcgatcgtccggcctggcggctttgcgcaaggttgtggaggacgccacggcttccgaatacgcgcttcagcgtgccttggaggggcagcactggatcttcggcgggcggttcgttggagaagcaactcaacgcaggctggtgccggggaacgaggtggacattcccttgatccgtggcgacggcgcgttgcacgtggtcgaactgaagcgcgccgccagcctggccgggcatctggtgaagaaatatcgcgggtcttgggtacccacctctgaagtgcacaacgccgtcggccaagcggtgaattacttggtcggcttggacgagaaccgtcaccggctccgcgaagagcttggtatcgaaacgcgccgggccagtgcgatggtgctgatcggacacccctcggtacagccctcggtgccggaggaggcgatcaacgaggcacttcgcactctcaatacccatgtgaatcgagttgaggtgctcacctacaaggagctcgtcgacaacgccgagcgttccctgggcagggcgtcctcggcgtag

SEQ ID NO: 62093 - DNA, 1200 bp, Streptomyces regensis; identical to SEQ ID NO: 61856

SEQ ID NO: 62094 - DNA, 1470 bp, Aquamicrobium defluvii
gtggccggttcggagaaggaagatacctataccagtgcgcctatcgacgccggcacccatgccgaagacggttccttcctcgtccttgagaccattcccgatggaaagacccagtatctaagctaccatctcagcgagaaggcctatgacagggcgaaagcggctggagcagatatgaagcttttggatgacgcgtccgagcctcacctgctggcggaatacagcttcgagacgaaagtcctgaccacctatccgatatggctccgctcgaaccaaacaaatttcctcaagcggaagtatgggaccatcgccaggatatcgttcgaggacgagcgtgagatggccgtcgataagcacataggcttgttttttgacttgccgacaggatttcaccgcaagccgttcgaggggtttggcgtcgatccccgcatcaagtacctcatcgacgccttccgcaacctgccgggcatcgtaggcatcacgatatgcgaggacgaccaaatctcggtcaacggcgaggacgtgcggcttcccgtccacatcttcgacgacgctcgcctgaacatcaaccgcgcccacgatgccgctcgcgatttcgccaacggcgagaagatggcttacctcaagaacctcttcttgccttacgtggttccgggatacgaacccgatgatttcgagcggcccggaatcgacctgcaggatacagtccggtcggctctggcgaagaggggcatcccgcggtcccggaacaccaacaacagcgccgctgtccggaccgtgatgcgccaagtggtggaaatcgcccaggacgatccggtgcagctcttcgaattgagcgaaaagatccagttggcctccctttccgcgttgatcgaggacatgaccaaggaaatggccaagggccaccgcgaagcgttctggcagacctatttcgaggagaacccgttcatcctaaaggtactcttcgggttgccggtggttcactataccagccaggcgacagtcggcggtatggggctgaagcggaagggtgagaagcaggccgattacttggtaaaagccgggatgctgggtaacttggctattgtcgagataaagacgactgagacgcctctgctgaccaaggacccgtatcgtccaccccatctttatggcccgcacccggaactgacaggcggcgcgaaccagctagtcgaccagaagcttcggcttatcaagagcattgcagctaagaaagaagaggaggaggaggagccgaacatccaggcatggtcggtcccgtgcattctgattattggcaggctccccgagaaaaagaacgagaagcggtccttcgagatataccgtggcagccagaaggacgtgctcatcatcacgttcgacgagttgctggcgaagctggtggccctgcacgaattcctgacgaccaagccggaggaggtcgacgaggatatttcgaagctcgtttaa

SEQ ID NO: 62095 - DNA, 1161 bp, Mesorhizobium amorphae CCNWGS0123
atgagcgacgatagcggatacgaattcttcaagctgcgcaaacacgccaagacctacataacgaaggtcttcatgcaccacgggttgaacacggagcgtcgtcgctatgtcagaatggtgaatgaaggcagcgacgaagttcaccttggcgagatcgaaggcgcgatgtgccttcgcctgaccggcaacatccgcaagacacaagtgactgcccttgtcacccaagacgacaaacaggtgaagcggctaacctttgaaaccttcaagtcccgggcaggcggctggattgaagcgatggagaaggaggaattcagtttccgctccgacgagtggagccggcttcaaagcttcctggcgcaaatcaaattcgtggacctgtccaaccaagacactttccatatcgaagacatatccacaaaggccgggccgaaggccatcatcgatgcctcagatcgtgggatccttgaccgcatcaagaatatgtcagagggacagaggaccggccttctgcacgccttgcaagggcaactgaccagcgaagaaatcaacatccttcttggccgcaggcagggactggaagaatatgaaaagcacatgcttcacaaggattggagcgagacccattggcaggacttctttgagcgcgagcagtgggttttcggttatggtctcgactaccgcgtgatgcgccagtttgatcgagaaatgacggttggcgctggcggcactgacaaccgaaacaagcctgtagtcgacttccttgggacctttacagattacacggtgctcgttgaaatcaagaagcccgacaccctgattttccgacccagccgtggcggacgtgctgggacatgggaattcagtccagaattcctgggcgccttttctcagatcattgagcagaaggcagaatggcttaccttcgcacagactggtgagcaccataacaaggcaggcgaccttctgactgcccgcacaagaaacgcgaaaagcatacttgtcattggctcgcgggacgagttctcacaggccgacaacgacagagccgcgaacgtgaagcgcgacacctttgaactgttccggcgtgagaaccgcagcatcgacatcatcacgttcgatgaactgcttgaacgcgcacggttcatcacgaagagtggatag

SEQ ID NO: 62096 - DNA, 1455 bp, Achromobacter piechaudii ATCC 43553
atggcaaatgggaaacttcaagaacaggccgagtcgtacacggatggtcaggtcatggaaccagcgttccaatttcgatctggcgtagccgatggtcaagaatacagggatctgatgatgcaaaccttcgtagaggaggaaatgcaaaatcggcgttggcagagcgagcccgagaacaaatggcatttgctagcccgagtgttctcggaccgcatcgtcacctatcccgtatttaccaatcctcatgcgcagcgctacctgtccactcgacacggccgattcgcgaccgtcgtttacgaacgacgagtggtgaacacgctgcccgacagccctgacgcactagtttcagatatcgagctggcgctgccctggcggtcatccaacccctgcacctacggattaggttttattcaggaactggatgaagtctggctaggcctctcgcgtttcccaactctcaacacccttgtggtggcgcgcgacggcgaagctcggattgacggaaatacggtacggattcctgaagaggacattgatcaaattcgccgggctttcagccgtgaagcacgcagaatacgcggttattttcgacagtccaaatcaattcacgttcgcaatgcgctgctggcgccgcttgatcctgaacggtttccgccgatagtacatgtcgcgaaaagcggtgagcttatggaggttcgcctggaccgcggaaagcagagcaaggccgccggacgcgcagcgagaaaagccacggtggaagccgtacgcacaaatgttgaaacgctagctgcagaagcccctaaggagctcttggagctgcacgccgagatcgaacgggtcacccttgagcagatgattgaaaagtacgaggacatgctgcagaagaacctgcccgaaccggtatggcagaaattcttcgaacgcaacatattcattctcacaatggttttcgcccgcccggtcaggctccttcatgcacagttccacgcccgaggtgggggcttggacggcactggcgcgcagattggcgacttcctactcgctgaaaagggtttcgcgatggccatcgtggaaatcaagagaccgagtagtccactgctacgcgaaaaggcttaccggaatagggaagtgtttgcgccggatgaagaattgagtggcgcggtatcgcaagtactctaccaacagagcaaatttcatgaaaactggctatttcatcagagccgcccagagcttcagaactcgcgtccggaggcgatcaagtgcgtggtcatcagtggagtgttgcccacaaacgagatgcaacgacagagccttgaagtgttccgcaacgcttgcaagaacgttgagatcattaccttcgacgagctgctgggcaagctacaactgttgttgaagcatctgacgccgcatgcaccgccgcagctcaccacgcccgaggatgatgtgccgttctaa

SEQ ID NO: 62097 - DNA, 1191 bp, Maricaulis maris MCS10
gtgtccaattacaccgaaaggctaagccggatgattgacgagaacgagcacaagtttttccgggcccgccaagccacgaaaacatacatttcaaaagtttttagttttgacacaaaaaatcctgagcccgtccgaaaaatccggatggtgcttgatggatcagatgaattatacttgggtgaaattgaaggcgctatgtgcctacgtctaacaggaaatattcgaaagactcagataacggcgttagttacccaagatgacaaaaaggtggagcgtctttcgttgttgacgttcaaaaatcgagctggtgattggctcgaggcaattgaagagcacgcattcacattcagagcgaatgagtttaatcggcttctagagttcctagaggcgatcaagtttgtggatttgtccaatgaagacaacttccacatagaggatatttccacgcaagccggacacaaggctattatagacggcacagatcgtgtgatcgtcgatcgtgtcaagaaaatgtctagatcagaacgcgaagaatttctcaaagagttgcgagggacgatttcgaaggacgaggttaacattcttctcggacgaaaagatgcgcttcaaacctacagtaatcatctcaaaatggacgattgggctgagtcggaatggcaagattttttcgagaaagagccgtgggtgtttggctatgggctggattaccgggtcatgcgccaatttgaccgcgaaatgactgtcgggagtgggggcactgataacaaaaacaagccggtcgtcgacttcttgatgacctttactgattacacggccttggtcgaaattaagaagccgagcaccccgatattcagaaaaggtagaggggggcgggcagggacgtgggaattcagcagggaattcacgagcgctgtctcccaggtacttgaacaaaaggctgaatggctttcatttgcgcaagtaggccaacagtacaatcacgcaggaaatgagcgcctcgccgcgcggactcgaaacgcgaagaccatcctcgttgtcgggtctctgttagaattcaatagcgaagatcgacgaagcgccgatattaaacgggatacatttgaattgtttcgccgcgaaaacaggagcctggagatcgtaacattcgacgaactgctcgaccgtgctcagttcatcgttcgagatcgctag

SEQ ID NO: 62098 - DNA, 1088 bp, Hyphomonas polymorpha PS728
tccggcaaacccggcgcggttcaatgtctaaagtcatcgacgtgcaaccgtcatttcagtttgcgactgcaaaggcacaacatacgttacgcgagactccggccggtcgccataccattaaagctacattctttgaaacggatcgtagaatcagtgtgctaacaattcaaaagttcaactcagcatccggcgccagtagagagttttctttctctttcgttggttcagaaatacgagaacttaaagaatttttggccggagtcgaaacggtcgctgtggacgatcctcgaaagcgacacatccaagacgaagagttacatgaaattgttttaaaccgtgcccagatcaatcgactggtttcaacagacgaaggcttagtcattgacattctgaaaaacgccaatctccgtcgggattttgtcgccgtgcgatacaggcaggagcaattgagtatttttgaaaagttgcttgaagacggcacgttctttgaacaaaagatggagcaacacaaggccgataaaccagaacgactatggcaaaaattctttgaactgaatacttggatatttggctacggcctttcgtatcaattcttaagcggacttgataaaaagaaacttgagcaagcagtcagcgggtatgatttgagtggtcacggcaagatcgctgacgctgttatgaagactcgaggaatcataaattcgctctgctttgttgaggtaaaaacccacaaaactgaactactaagcgctgactctaaaaggtcaggggtgtggcatccaagttcgaacctaacagcggcggtagctcagattcacgtgaccgtgcaatcggcacttgagacacttcaggatattgtgagaccaaaggagaagaacggcgatccgaccggcgaacagcttttcaatatagcgcccagttctttcttggttgttggaagcctcgctcagttccaatccgaaaatggtacaaacgtcgataaattcaaatcatttgaattataccgtcgcaacctaaatgcaccggaagtgatcacttttgacgaactgtatgaacgagcgagatttatagtaagccaaagcaagtga

SEQ ID NO: 62099 - DNA, 1143 bp, Myroides odoratimimus
atgagttctaggacctcaaaaccgaattatacggaaattattgataattataaattggaacaactttataatcataagattgaaaatggaaggttttttaaaattgtatttgctaatgatgagaaaacagagatacaacttgcttcaaaaacttttatgcaaatcaaatatttaccttcacgaaatgatattgaaggattagatattattaaaattgttaatggaaaagaaacccaaaaagtttctttctccaaattcaactttgctcaactagagctattcttaaatttcatacatgatattgatttaagtaccgttgcagaaagaagattaaaattagctgataattctttggatattttagatgaagaaacgaaaaaaaagatttctactttacttcaaggagatgaaggtgcggaagtaatccaagagctacttgataatgatattattacaagtcaagatatcgtaaacactggttaccgaaaaaatcaattaaaaatcttcgaacgtttacttaatgaaaaaaattatcttcaacaatataaactcaatgaagaagatttatctaacaatacaaaagacgagattgcttggcagcatttcttcaataaaaatccttggatatttggttatggtttggattatagatatcaaagtattttacaaaaagaattttcggcatctaatacagacgcagctggtaaaggacaagttaacgcagactttttaatcggagataattactttacaacatttgtagaactaaaaactcctgatacagatttgtttgtaaatacaggtagtggacaaaatcgttctggaagttggtgtttgtccaccaaattaatttatgctgtttctcaaattttagaacaaaaagctgttggacaaattaaattagagactgaaccttataattccttaggcgaaaaaattactcaaaaaggttatgactccaagtgtattttagttgtaggaaatttgaacaaagaagttgagaaatctcaagattctagccagataaaagaaattaaaaggaagacatttgaattatttaggagagattcaagaaatatagaaatcataacctatgatgaactctatttaagagcttatcacatttgttataagaaaatttag

SEQ ID NO: 62100 - DNA, 1224 bp, Mycobacterium canettii CIPT 140070010
atggttacgttcggatttgacgtatcggctgagcccaatgaggtgacgtacgcggctggccggttaccgactcgtacgtatgctacgcggagcttcgaagcgcagttcggccgcgacgcagggcaccctacgcgctacatctaccgcgtgttcgacgaggttccatgggatgacgaagatcaatgggaatggactagtcaagtggtttctacaacgccagctggccggaagcaattgcagttgcaaatcgctcgcgagcgaggtgccgtccggaagttgcgcattcagaaggtacctactaaccgtgatgctacgaggctggaaacgattctcgagctcgatcgcgaacaggcgacccgtctcatcgacatgctccgcgcagtcgacgcgatacccgtacagggtgaaagctcggtgtacgtcgatgaccaacttctccgcgatctcttcgccgaccccactgcggtaaccaacctctactctcgggaccccgaccgattcaggacgctcatcgagtccgatgtcgaggcggacgacgtcatcgcggtacaacggcgcaagggtgtggctgagcggatgcgccgctggcttactgaagacgatgagttcaacgcggcagcaagcgaaaccgggggaccggagcgcgcatggcaacgtcttctcgaagcgaatccctgggtgctcggtatcggcctcggtgggcagttattcacggcctgggatcaggagaagctcgaacagacggtggtcggccgtagcatcacaggtgtcggtaagagggtcgacgcgttgctgcgtacctcaggcatcattcgagctctcgcctttgcagaaatcaagcaccatcgcacagaactgatcgacggtgagtatcgcgccggatgttggtccccatcaaaggaactcgcgggtgcggttgtgcaagtccagcagtccgtacacctggcgtgccgcgacatcggcgaatacctgcaggacacgtcggctgagggtgaattgctgccgtcgggcacgttcctcctccgcccgcgatcatttgttattgcgggtactctcgcgcaactcgcgggtcaagcgggaggtgcggtcaccgataagttccggagtttcgagctgtttcgacgcaaccttcacgaaccagaggtcatcacattcgatgaactcgttgctcgcgcagaatggcacatcaaggtggccactcggccggcagagtctgagagctaa

SEQ ID NO: 62101 - DNA, 1104 bp, Bacillus clausii
atgtttccgaatattcttctattcactaaaacagaagagcatttcatatttgaattaattggggcacaggaaaaatatactggtttaaccgtaaaacagcatattgcaaaaaacacaaatgaatatttatatcagtttaaagaagaccccaagcagttcgctcaaggcaagcctatagtaacgtttacaggtagctgtcacggaatagtatcaggtaaactggctcgaagatctgatgaaaagaaatttgaagaacggttcggtaaaatcgacaaacaaggggttagattagtaattgacgacaaaaatgatggacctcttattagtttcgctgaggattttttatcgtgttatcttgtagacgtgatgctaataaacaaccaatcggaagtttatagagtcaaagatattttatcaatgatgattgtaagccataattatagcaagagaaatttaactgaagaacttgagtatttattacgattccctgtaaattacactaacgaactattcggaattaaatattgcgaaagcgaagatatagagaaattacaactcgcaagtcaatttgctaatttatttcttattccagggttgcgcgagacttcaattggagagttcatcaaattaaatggtagttttctaaaatcggcttttgaatgtagtgattttctatatgaaaaggaattcctttggttagaaggaaacccagaccctttggaaaagtctataaatccagatttattaattaaaagatctgacggactatatgatatatgtgatttaaaaacacctaagcttgataaaaaaaatctcactcaaggtgggcataaaagaagacggttccatgattatattgatgaaggattagcccagttagctaactatgacgaatatttcacattcagtaaaaatattgattgggcatataaagaatataaagttcggatggataacccgttattatatctcatcgtagggaattacgaaaacttaaacagtgaacatattagggaggcatcaaggcatttaaaagatcgttacagaataatcgatttcgatacactgtattcaatgtatataaataaatctttaaataaatag

SEQ ID NO: 62102 - DNA, 996 bp, Herbaspirillum rubrisubalbicans M1
atgaaagtaagtgacttcgtacaccgttacccgacgtttgttggaaggcgcagggatggaatatgccgagtgagagtttttgtaacagagccctcctcggtcatcgcgctgctgactgatattggagatctgaactccggagcttcagtgacgaattctgtagagaacatctgtctgtcattgaccaggggagggcttgtccctgctgactgccggttcgtcgagcattaccccgaaaactcatttcgaggcgatacatttgacctggtcactttaggcaagggcaattcgcctggttggaaagcaattacccaagcagaggcagaatcgcttctgcagtgtggtgcggaggaattgaaatcaagaattgaggacagccagcagctgttgaatgcggcggatcgcattcggtttgagattgatccgcacatcgactcgccctggcctgaaaatcatgagaagacatggcgtcggaatcaaatcgaagcgggcatgatttccaagaaggaattggcggatctggtggaaagcaacgcaagtgagcaagcgctgcaaaaactattgaagcaagatctttcgatattcggtgaaatctacgcagacccgaaggaggaatacatctgtttctcggaattcgcgctggatgcgggtcgggtggactttgtagtcttctctggcagatccagaatggacgttaccttcattgaggtaaagggcgctgattttcacctgctcaatcaaggtcactacaataagttttccagcaaaattgaagaagcaactgaccagatcagagcacgcctcaggcatgtcattgaagacatcaaaggcttcagacgtagcgcacatcaacttcgaattcaaatcgagaatggcggctcagtgttcaactcactgctggggccagagggacgactgctcgtagacccggataaggatatcaatatcagatatgtcgttatcggcggaagaacaaaagacgacctcgaggagtga

SEQ ID NO: 62103 - DNA, 1071 bp, Obesumbacterium proteus
ttgaaaattttagatttagttcacgattttggcaataaccgtacttcaggagttggtggaatttgcagagtcagatgttatataaacaaaaaagatattattgtgcttttaaccgacttaggtgcattaaacgatggacagtcagtaaccaatgcagtagaaaaaataataagttcagtctatgaacatggggtagttacacaaccagccattttcatagagcactacgaaagaaactcacataagcttgatacgtttgatatagtgaacataaacccaaaaacagagtggttctcaatatcaagagaaaaagtgttagacttacttggttgtgatgaagatgagctttctgaacgcagcataaataatgggaggatatatgagaaagccgataaaataaggtacgctcgagatccttttatagattcaaattatataccttcaccagaattcatttctcgtaagtgcgaaatattaaactctatgattcccaagtcttcaattactcagctaattgagtcaggtgcaaaggaacaagaaattcagcgagttataaaaagtgatttgtctttaattgccgaggcttacgtcggtggtaatgaatatatttgcttttccgaatatccattagctgacggatcagtagattttgtaattttcacaggcaggtcgcgtatggatatcatcctaattgaagtgaaaggggctaactttaacttagttaatgcgaataactacggttcatttaaccataaagttagagatgccgcagagcagatccaaaaaaggcttggtctagtctatagggattatgaatcgtttcggaaagatgctcatgaaaaacgaatgaaagttttatcaggtgatttaatccataatgcattcgtcgggcccaaatcttgtaaacaagtagatccaaataaagatgtatacgttcgttctattgtcattggggggcgaacagtaaacgatttagaagaaagtaaaaaacgccatgactatgaaattcattcaactccgcctatccgtattgaatcttgggatacttggcttaggagattaacacgatag

SEQ ID NO: 62104 - DNA, 1218 bp, Serratia plymuthica A30
atggaaattgaaaaattcgctataacatgtaaaagagcactagaccgacattttaaaaaagttaaatacgcttatgataatgggtatttggtttcacaagacggaagtagtgcggattttttttacccaaccactattttatgcgcaaaaactgaagaggtattttcagttgaattgattggaatatcaaaaaaaataaagccattaaaaataaagaagtactctaatttaagctttgataaactaataagttattgtgataaggttgaaaattctaacgctcagtttgtattttcaggtagtatcattagtctaaaacatatgcttttaacaaacgatattgaatatctagatgaaaaacaagaaagattcccaatagtaagtaaatttccaacaaaaatagttggtgatgaaaatgcacaaaatttatttgcatttgacgctaatttattaacagcaagcttcaaagatgtggtggtggttacatgtaaaaacaataccttcagagcacgatacatatatgaaatgttaatatttaaaaataaaatagaagaagaggaactgcagcaactactgcttgaacacttagacttctcaaaaaaagggagctcagtttttggtgctcaaaaaataaagacaacctctgatattaaggaggtgcaagtatcatatctacacaacatgatactaaggaatgaaatacatgaaactacaattggtgattatcttaacgaaaatatagacattatattaagcactcttggttataccgatgcaatatatgaaccaactttatattggatagaaaaaacaccagacaacacggatatatcaattaatccagactttcttctacaaagaaaagatggtttttacgacatatgtgatttaaaaaaaggattagtcaacagaaagaatctaacaaaaggagagcgtcgtagaagaaggtttattgacgcagtgaacgaaggaatagcccaactagataattatgccgaatattttacttttgaaaaaaatgcagagcatgcttcagaaaaatatgaagtaaaaaccagaaacccatttaaaatactgatagtcgggaacttagaaaatactgtagatgaagaagtgaaacaagcattgcgcggtagatccgacctcttagtcatagattacgactcaataatatacatgtttttagcgagaattaccaacgaagccatatcaaattaa

SEQ ID NO: 62105 - DNA, 950 bp, Mastigocladus laminosus UU774
atgaccaccgcccagccacttcgcgaacgcatcgagcaattcatagaaggtggagcacggctcgatgtgctctatgcgctcctccgagagtccgtagatgcaggtacgctcgacgcgttgttcggcgttcagcgtctttttgaggatatgtatggcggaatgacgttcaacatggagctgaaagctcctgccgcgtcgattttggtcgtctggggcgaaattggattacgaagtctagtggaagctgctcgccgcagcccaactcataaaaacttaggaattgctatcgaaatgctagcgtcggtggctgccgggtatcctccgcctgtactcggcgctctccacgacacggatttggccgaggcagtccagcgatcgatcctaacaacgccaggtcttcaactcgcagctcgggcgcttttggccgactttatcctctccatcaccgatgaagcggaagccataggacatgtcgcaagcgcgatgtgggccggaagttggacggacaatagattgccagtccaacgtgagctttttgctgcaatctcgaagagactattggccgtgagcgcaccggtgcttgacgcattcgatgcgcttattcgaaacgagcccgagaatgaaccggcgttccaaaacttcctgacgaagcacccacaaattttagatcctttagccattcgggtatggccccagcccgacctcttcggatttagaagccccgactacattttgcagcgagctgatggcacttatctcgttatcgagattgaatgccccgcgaagaaattgattacgagcggagggcaacttacgtcggaggtcacacatgctgagcagcaggtcgccgactatcggaggtatctaatccagcgattttcggagatcgaaaagtatttacccaattttcaggagcctgactgtctcgtcgtggttgggctggcgcgaac

SEQ ID NO: 62106 - DNA, 1380 bp, Leclercia adecarboxylata ATCC 23216 = NBRC 102595
atggccaagctattacctgaatatttcagttctgaagatttcaatattgagatagaggaaatattccctaactgcacggaagtcttctatattcctagagttagtgagcttgaagaagcaggaattaactcggctgagcctagtaagtataaaagaaagattgctttatttagcggtcaggatggatttatctcgattttccctatatataccttgacctcccatcctaactacttaaaccagaagtatgcccaaataaatgaaattgatattgaagttaaccttgactctgcaccctacaccaaaagcgaggtatctgaatgcttacaacttttgccagcaggttttatcaaagacatacgctatggcctaggattgaaaaaagagtatcgcacgataatttcagctattgaagagcacacagaatctcaatgtcttcttattaataaggaaaaaactggcgatactgattatgaatgttttaatctaaatttttatgattatgatgaaatgcgccgtgcttgtaaccgcattacagaaagaacaaggaaagttgcccgtattacaaaaaccacagctgcttacaactatattgcccatcgtttgggaaacgaacaaaaaccattgcctacagataatgacgccattagcaagatgcttcggataaagataacggattgtgataaacaagcggctatgaatatggtcgcggaagacaaatcagttgtaaaacaaaccgactcacttaccttggccaagttaaaaaatgatatcgagttggtctcattagagcgtttgattagttcttatgaagacttactaagcaaaaaaactaaagaagacacttggcagaaactattcaatcagaacccatttatcttgagtcttgccttcggctacccggcaataaaaatatcagaccaagcgagtgttggtggcaaacgtttgactggtgatggcgaaaaaataacggactatctaattaaaaatggtataacgaacaacttagctctcattgaaatcaaaaagcccttttccgacttactgaacaaaaaaccctacagaggagcagtttattgcgcctccacagaacttaccggctctgtaacacaagtactcgatcagtgttatcggctacagcaaaacatcgccacgataaagaacaacaatcgaatttatgacattgaatcatatgctgttcactgtattttagtgattggtactatgccaagtgatgaagacgagaagaagtcttttgagatgtaccgacggaattcgaagaacgtgcaaatcattacatttgatgagctcttactcaagttaaagcaactgcacgagtttctcgacaatagcgatgaaaaagaggaggttgcaccgtga

SEQ ID NO: 62107 - DNA, 1050 bp, Gordonia polyisoprenivorans NBRC 16320 = JCM 10675
gtgagtatcgaagagtacaaggccggccttcgccgctgggttcgcaattcagcacgcccgggaatcattcgtcatgagggcatggaactcaagacacgcggcaggtcgttcaagtccgtcactatgcactacttcggcagcgaccgggaggctccgtcgggtcggaagcttgagttccaagaggtcccagcgaaggagatggatttcggatacgacttcaataatccgacgaagaccttttccctcgctaacgatgaggttgatgtccttcgaaagttcttgaacggcatgttcgccgacgagggctactacgtccggacagacagtaaggacttggcgaaggtgctggctgagcgtcttcagccaggcgacgagggtgagtccgctctcgccgatctactggaatccatcggaggggacgaggatctcgtacgggccgtggcgaagtcgaaccaggcgggccacttggccggcctgatcgaccaggaacgccggcgggccgcactcgaagaactcgaacagcttgcccgcaccccgtggacgagcgagggcgagttccagaagctgatccaagacaatccatggatcttcggcgggcggtacgtcggggtcacgcagcgtcgcagcctaacggtcctggaccagttggatgtgcccctgatcaacaccgacggttcgatccacatagtggaactcaaaacagcttgtctaccaaggctattcaggatgcataggaatcactggatcgtcggcaacgatgtgcacgaggccgtatcgcaggcagagaattaccttcaccagctcgatacccatgccgcgaacatcaagatgacgctcaaactggaagtccagcgagccttcgcaactgtcgttgtcggccataccgagcactgcaccgccgagggcctcaccgaagaggacgcgtccctggcgctgcgtatctacaacagccatctctcacgagtacgggtcatgacatacgaccagctcatctccaacgccaagaatgcaatgacgcttggcatctcagggtcaggcgatggcgtgtga

SEQ ID NO: 62108 - DNA, 1254 bp, Desulfotalea psychrophila LSv54
atgtctcaatgcgagcaacccaaatatatgattaaatttaaggaattagataacaaaatcttactctgctactcaagcgattatcccacgcataattgggtctatcacgaattggataaatcaggcagagttacaattagtaaagtcttcaagtttagccaaaagaatcttagttctgctttcaataaagaagacgaagaggctccagttgaatttgaagttgctgttaaggatggggaatactatcgcttcccgaaggatattttatctttaaaacacgatctatatgtgcatgaagatataaaactagaacgtaggttttttgtcgcggaacgtaacatatcaatatttcccaaaatagataacatggtaaatcgtcccatttatataggtggtgacgaagaagacgcgatctcaatgccggtttattatggtttattgaaaacatttcccaatacaaatgaactaaataaatatgtttcagcaaggatcagtggcgttttatcttcatacatagaaattaatgacgactatgaggaacgttatcaacaatatttaaataaaaaaaatggtagaaagggagctaatcttcagtatgatttttcaaatctcgaactaattaaatttacaagcatttctgaaaagcttaattctatgcttgaggatgaagtttcttatactgaagctcaatggcaggaggaattgctgcaaattatactactgctatatcccaaatatatacatgcattcaaggaagctcctgtcagggatacctataacaaagcggatcgaaaaatcgactatttactaatagattccagcggaaatacagacattatcgaaataaagaagcccttcgacaagtgtatagttactacaagaacttatagagacaactacataccgctaagagaactttctggtacggtaatgcaaattgagaagtatattttctatttaaataaatggggtaaaaaaggagaggaaaaattaacagagcactacaaagacgaattgccagagaacttcaaaataaaaataacaaatccaagcggcattataattatgggtcgtaaaaagggtatgacacatgagcaggtgcaagattttgaagttattaaaagaaaatacaaaaatgtaatcgacatcattacatatgatgatttattagagcgacttaagtttacaataagtcagtggtctaaaacacacaacaaattaattcaggcaacgggaaggggtatggggcgctga

SEQ ID NO: 62109 - DNA, 1239 bp, Pseudomonas cannabina
atgaacgaagaagagaaaacagcttctccagcgaaaaaaataacaatggcctttatgcaagaggtgatgaataattatctgggcccgctttggcaatacgtacaacaaaatccgaatctcatcaaaacagcccctggtttcctattaaaacctgaggaaattgttgtatacattggccaaactcacatcgctgtagagtacataggatctgagattgctgagaagctgaattctgacgggttactgaacctgagatatcatgattactcggtgaaaaagtgcaatcttttcgaaaaaatcattggttttgaatatgactcgaccgcaagtcgtgtatcttcaatgcccttgccaccattcagtgaggacctagtcttcccgacaaataaaggttgggaaaaactcacagagttgaaatggaactttgcagctcaaaatagcattatgggttttaacgtaccaagcccagaacctatgaaagggcaatttaccagaatcgtaaacggaatgtttttcgacgctgacgactctggattgaggaccagacatataaagtggctagatttcttccctatccattttgatagtagcgatgaaaaatttgatcgcatcggcttcaatctagaggaaattagaaaacttgtagagtatgatgctcactactcttaccctatgccggatgactacaaatatattcagctaccgaaaataaatagattcatcgaagtatgggggagttccaaaagcacggagcctcatataacttctcacttatctaaagaagaaaataaatttatactaacaatgaaatttggagcaaaggatgtgttttctgaattgatttgcgaatggcagagcgaaaaaaggaatgctataagaccagatttttttgttctgcagcccaacggttacgcagacattgtcgaattcaaacttcccgaaattgacaaaggcttcattgtcggcggtcaaaacagagaaacattttcttcgtggctaaattcatatatttctcagaccagggtgtacgctacctactttgatgatccgaacaatcgaagatggtttgaagaaaagtatggatttaaagttcacaagcctcgcagatggctcgtcgtaggacgcagaagcgattttgagtctgatgtatggcgggaaatcatgtcagatcatcagggcttagagataataacttttgacgatttgatagatggagttgtagtgcagttctataaatga

SEQ ID NO: 62110 - DNA, 1212 bp, Dorea longicatena DSM 13814
atgagtattatatttgaaagaagtgaagatgaattattactgatattaactccggaacgtatcgatattcaagatattcttgaaattttgagaaaagacgaagaatggcatatttcaaggacatttacagttaatataacgcatttacgttttgaggatgatatgcttaatgaactccatttttgtgttggtaaggttttagacgaatacaccgttattgatcgtgatgtgattggtgttgatcatgatttttattttgctaatagcgttaagttaaataaacgtcattttgttgcttatcgtaatatttctgttcttgctaaaatagatcatattgtagaaaaagatgtttatataggtggaagtgatattaaagaccatatacctatagagacttttgaattattaataaaaaaatttcccaaaacagccgaattaaattattatgcaaatgctcggattgcaacaattgttaaagagtttttcccgcatacagagtcgtgtgaagagaaatttaataagtttatagagagacaagaaaaaagtctttcatccgctcttcaagatgatatacagaacgcatttaaggaaaatgcaaaaatagagctttgtcaatttcgagaggtcagagcaaatctgttagaacttttaaacagatcagatagtgtaagagaagaagtatggcaaaagcaaatacatgggttgttgagactattatatccgaagtacatagctggagtacgagaagttgtaatcaaaggagttgatcgacatgagaaaagaccagattttctcttggtagatgcaaatggatatattgatattcttgaaataaaaaagccgaatgttcaaattttaaccaagcaatcttcatatcgtaataattatgtacctgtgcgagaactggctggagctattcaacagattgaaaaatatatttattgtcttaatgtttggggaacggaaggagagaaagtacttcaaaaacaactttcagaaaaattacccaataatgtgatgccaaaggttattaatcctcaaggtattttacttctgggacgaagtgagcaatttaatcaacaacaaaagaacgattttgaattaatcaaacgacaatataaacatattgcagatattatgacgtacgatgatttgatacagcgtattgataatattttggcagcacttaatatggaaatcagagtagagtaa

SEQ ID NO: 62111 - DNA, 1392 bp, Caulobacter segnis ATCC 21756
atggcttccttgcgcccctcggtttttaattcgcgcgaacgctcagacggcggacccttcctgctcatcgagccggttgagcaggaagaaggcttcagcatcgatgtggcgtttaccgatacccccgccgaccagcgacagggcgaattcccggtcgcgagattactcaacgtctcacccgacctgctacgtatctggccgctgaacgtccggcagggccgctcagactacctgacgcccaaatacggcagcctcgaaagcattgtcgtcgccgccaaggtcgataggccttggtcgcgtcccgagaccgtcgacgacgtcatcgaacttctggaagggctccccgacgggttcgcgaaagactttcggttcggtcttggccttctctgggagtatcgctcgatctgcgaggggatcgccgaacagaagcttgcctcgatgcttattgtgcatggcggcgacgaggtgacgctgacgccgccaaccttcgtgctgggcgtcaggcgattccatgagctgcgtaggcagatcaaccggatcagcgcccggcatcagcgcgacgccaggcaagacaaggcccatctcgcctatcaagagctgctccacgcagccgaccctgcccaatttccacggcgcgccgtggcgcttcgccccgacaccctgtcggaagcgacccgaggaggccgcgacaccatggtgctgtcgcggcgggacaggagcgcggccgtcagactcgtgcgctccaacattgaggccttggccgagtcggaaacaagcgccttgctatcgctcaaaagcgagattgagcaggtgacgctaaaacagctcatcgatctgctggcaggcatgttggagaagaatctgtccgaagcccgttggcagtcattcctcgagcagaacccgttcattctgagtctggctttcccggcgcccgtacttgtcgtccaggagagggcttatgtcggtgggaagcgcctgaatgatcgtggcggacgcatagccgattttctctgcgcgtctgcgtcaaccggcaatctcgccgttgtggagatcaagaaaccgaactccgatcttgtcgccaacagcgcgtatcgcggcgacgacgtgtttggcgccgctagcgagctaagcgcggcgatcgcgcaagcgctcgatcaacgactgcagctccagttaacatggcctgccctgaaggaagccgcagagcgcgccgatatccacggttttgcgatccgctgcatcctcatcatcggcagaacaccagaagggcgtggccaacgtcgatcgttcgaactctatcgccaagcgatgagcgaagtgaccatcgtgacctttgatgagttgctctcgcgacttcgagagatctacggagcgctcgccgagaacaaatga

SEQ ID NO: 62112 - DNA, 1098 bp, Corynebacterium terpenotabidum Y-11
atgacgaccacagaggaccctcaggacgacccggtgaagcgcactcccgccaagacccacaaccatgcaccgaccggcaacgacggtgccccgaaagggggaacgaacgaggtgaatctctcgtacggcccgaaggtgctcgtcaaggctcggacttcgttctggagtggggatgcggacaacccgagaaagccgtcccttgaaatccgcaagcactcgcggtcatcagcaagatttgcatgggactggaacaatccgacctggtgcgtcactctgaacgaggagcagatcactaaactccgggcatacctgaacggggacttcatctctgaacggatcggacactacttctgggtgcaggttgatgaccaggacaccgccgaagcactccagaggatggtcgatggtgaggcagccgtggacctcgacgtggagaagatcacctctgccatgtccctgaacgatgacctgctcaccgcagttctcgacggtgaccaaggccgaaccctaatgcggctgaaggagcatgatcgcaggtcagacgtactcgatgaacttgaagatctgatcgaagatcccaagaccgttgagcaggacttccaggacttgctgcaagtcaacccctgggtcttcggtggtgaggtgtcccgatctcatgcacttcgaaacatcagcacccaggatcagatcgacatacctattgtccgtggcgacggttccatggtcattgtggagttgaaacgtgcgaaggctgcacagatcaagaagaccgaccacgagtacccggtactgtccgatggggtccacactgctgtgcagcaggcggagcgctacctgtatgtcctcgataagaaggtgaacgatctacagatcgagcagcaattcgatgcccgccgagccacagcgctggtagtcatcggagtctggccagatctcgaagactcagaaaagaagctgtttgaggaatcgttccgcatctacaattcccacctcgcgcgggtgcaggtgatcacctatgactcactgctggcgaatgcccgccgcctcctcgacctgggtgatgaaagcaccacaaccgacgacggtaagtcaacctaa

SEQ ID NO: 62113 - DNA, 1344 bp, Thioalkalimicrobium aerophilum AL3
atggctaggttattgcccgatgatttcactccagaagagttaaatattgagattgaagaggtctttcctaactgcacggaagttttttatcttcctagatcggatgaactagaggaagctggattggattcagaagatactggcaaatataaacgaaaaatcgcattctttagcggccaggatagattcattacgatctaccccatatttacattgccaacccatccagattatttaaaacaaaaatacgacaaaattaatgagattaatgttgagctagaatttggttccgcaccctattcaaaagaagaggttgttgaaagcttgcaacaattgccagcaggttttatcaaagatattcgctatggtttaggtttgacaaaagagtttcaagcgatcatttcagctgttgaggaacatactgagcatcaatgccttgtaattggcgatgagccaactgacgatacgggttatgaatgctttcatttaaacttagatgattatgatgaaatgcgccgtgcttgtaaccgtattacggatagagcaagaaaagtcgcccgtatcacgaaggctgctactacctataaccatattgcctacaggttaggtgtcgagcaaaagcccttgcctaccgataacgatgccattagcaaaatgcttagaatcaaaataagtgatactgataagcaggcggctatgagcatgatcacggaagataaaacggcggtaaaacaaactgattctattaccttaaccaagttaaaaaatgatattgagctggtttcacttgagcgtctgatttccgcctatgaagagttgcttggcaaaaagactaaagaagatacttggcaggtacttttcaaccaaaatccatttatcttgagtcttgcgtttggttatccagcaataaaaatttcggatcaagcaagtgtaggcggaaaaaagttatcaggtggtggcgataaaataaccgattacttgattaagaatggtgtcacaaacaatttggcactgatagaaataaaaaagccatcttctgccttgcttaacaaaacgccttatcgcggtgaagtttattgcgcatctaccggattaacaggctcggtgacgcaggtgttggatcaaagttatcaactacaacaaaacatagccgcaataaaaaataataatcgaatttatgatattgaaacttatgcagttcattgcattttagtgattggaacgatgccaaccgatgatgacaaaaaaaatcgtttgaaatttaccggcgtaactcaaagaatgtacagatcattacttttgatgagctgttactcaaattacagcagctacatgatttcttga

SEQ ID NO: 62114 - DNA, 1599 bp, Ochrobactrum intermedium LMG 3301
gtgcatcaagcatccatagagggaagactaatggcagaacggaaatataaagtcgataaggttgcaatccgcaccgaggacggcacaaaggtggaactgtggaccgcgcccgacggcgaccaacagctcgtcatggtcctcggcaagaaagctctcgaatttgctgagttccacaggaacggaattcctgaacccgaaggcttgcagctgccgcacgttctcgcgaagtattacgccaacgagcgaaaactcgttacttttccgtgcagtacaaaacctaacaagtatgtgtacgatccaaagtacgatttcaggagcatcactttcgaaaatcagcagccactacaactcaatgctgatacgaccatcgttcacggtctacctagtggctttgagccaaatccaatggacgggtttgggctctattatcctctacgtttcatttttaaagttttcgagcagacactgggcgttgaggacatcacgatgtgtgatgacgaacacatgtccttcaaagatggtgtcgtccgctttccgatcttcaaatatcacttcgtccgcaccgccattaatagggctcatcgtgcggcccttgatttcgcgaacgatgagaaaaagtcatatcttcgaagtgaaatattgtcagaacttatgccgggataccagatccagggttcgttccagcgtagtgcctacgatctcgaccgatctcttaaggcagcattgagcggcacaaccagattgaggcgctcaaatgaaaacgctatcgccgctgttcgtacaatacgaagcgccgcgagatccgttgtgaaagagagccccgccgagattctggagttgaatcgggaaatcgagttggtaactctggagagcctgattcaattacttgcagagaagttagatagatcgctggccgaaagctattggcagaagctgcttatgcgaaatcccttcatccttaagcttgccttcggcttgccggtggcgatctttggagagcaagtgtcggtcggaggtgcggacttcaaaggcaaaggcggaaagattgcagactttttggtggactccggattactcggaaatcttgctgttatcgaaattaaacgtccatcgacgaacctgctccaagccaatccctatcgtgagggaattttcgccccaagccgggaaattgtggggagcgtcaatcaggtgctggatcagcggtttcagctgcaacagtcaatcaatgacaagaaaatccactcaaaaacatatgacgtttttgcttttgccgtgcagtgcatcattattgccgggcgggtgccaaacgacgaagatcgacggaagtcgtttgagctattcagaagcaaccttcgagacgtgttagtcataacgttcgatgaactgcttcacaagctgaaggcgctttacgaatttctccaagccaacccagtcgaaggcgcatcgccattggatcccgatacgccagaagctgaggatgaagagacattttccgacgatgtcgattacgaggaagacaagcatttcgaggaattcatcgcgcggcatgctgatgacgatgaacaagcaagccggagcctgcagcgcaacgcctag

SEQ ID NO: 62115 - DNA, 1569 bp, Ochrobactrum intermedium M86
atggcagaacggaaatataaagtcgataaggttgcaatccgcaccgaggacggcacaaaggtggaactgtggaccgcgcccgacggcgaccaacagctcgtcatggtcctcggcaagaaagctctcgaatttgctgagttccacaggaacggaattcctgaacccgaaggcttgcagctgccgcacgttctcgcgaagtattacgccaacgagcgaaaactcgttacttttccgtgcagtacaaaacctaacaagtatgtgtacgatccaaagtacgatttcaggagcatcactttcgaaaatcagcagccactacaactcaatgctgatacgaccatcgttcacggtctacctagtggctttgagccaaatccaatggacgggtttgggctctattatcctctacgtttcatttttaaagttttcgagcagacactgggcgttgaggacatcacgatgtgtgatgacgaacacatgtccttcaaagatggtgtcgtccgctttccgatcttcaaatatcacttcgtccgcaccgccattaatagggctcatcgtgcggcccttgatttcgcgaacgatgagaaaaagtcatatcttcgaagtgaaatattgtcagaacttatgccgggataccagatccagggttcgttccagcgtagtgcctacgatctcgaccgatctcttaaggcagcattgagcggcacaaccagattgaggcgctcaaatgaaaacgctatcgccgctgttcgtacaatacgaagcgccgcgagatccgttgtgaaagagagccccgccgagattctggagttgaatcgggaaatcgagttggtaactctggagagcctgattcaattacttgcagagaagttagatagatcgctggccgaaagctattggcagaagctgcttatgcgaaatcccttcatccttaagcttgccttcggcttgccggtggcgatctttggagagcaagtgtcggtcggaggtgcggacttcaaaggcaaaggcggaaagattgcagactttttggtggactccggattactcggaaatcttgctgttatcgaaattaaacgtccatcgacgaacctgctccaagccaatccctatcgtgagggaattttcgccccaagccgggaaattgtggggagcgtcaatcaggtgctggatcagcggtttcagctgcaacagtcaatcaatgacaagaaaatccactcaaaaacatatgacgtttttgcttttgccgtgcagtgcatcattattgccgggcgggtgccaaacgacgaagatcgacggaagtcgtttgagctattcagaagcaaccttcgagacgtgttagtcataacgttcgatgaactgcttcacaagctgaaggcgctttacgaatttctccaagccaacccagtcgaaggcgcatcgccattggatcccgatacgccagaagctgaggatgaagagacattttccgacgatgtcgattacgaggaagacaagcatttcgaggaattcatcgcgcggcatgctgatgacgatgaacaagcaagccggagcctgcagcgcaacgcctag

SEQ ID NO: 62116 - DNA, 951 bp, Ochrobactrum intermedium 229E
atgccgggataccagatccagggttcgttccagcgtagtgcctacgatctcgaccgatctcttaaggcagcattgagcggcacaaccagattgaggcgctcaaatgaaaacgctatcgccgctgttcgtacaatacgaagcgccgcgagatccgttgtgaaagagagccccgccgagattctggagttgaatcgggaaatcgagttggtaactctggagagcctgattcaattacttgcagagaagttagatagatcgctggccgaaagctattggcagaagctgcttatgcgaaatcccttcatccttaagcttgccttctgcttgccggtggcgatctttggagagcaagtgtcggtcggaggtgcggacttcaaaggcaaaggcggaaagattgcagactttttggtggactccggattactcggaaatcttgctgttatcgaaattaaacgtccatcgacgaacctgctccaagccaatccctatcgtgagggaattttcgccccaagccgggaaattgtgggggggagcgtcaatcaggtgctggatcagcggtttcagctgcaacagtcaatcaatgacaagaaaatccactcaaaaacatatgacgtttttgcttttgccgtgcagtgcatcattattgccgggcgggtgccaaacgacgaagatcgacggaagtcgtttgagctattcagaagcaaccttcgagacgtgttagtcataacgttcgatgaactgcttcacaagctgaaggcgctttacgaatttctccaagccaacccagtcgaaggcgcatcgccattggatcccgatacgccagaagctgaggatgaagagacattttccgacgatgtcgattacgaggaagacaagcatttcgaggaattcatcgcgcggcatgctgatgacgatgaacaagcaagccggagcctgcagcgcaacgcctag

SEQ ID NO: 62117 - DNA, 198 bp, Flavobacterium psychrophilum
ttgaaacaacattcttacgattctaaatgtgttttgatttttggaaatttagagcaagaaatcaaacattgtaacgataccgaaatagatataatgaaaaaaacttttgaactgtatcgtagaaattctaaaaatatagacatcattacttacgatgaactatacaatagagcgttttacatttgtaataaaaagtaa

SEQ ID NO: 62118 - DNA, 858 bp, Eubacterium plexicaudatum ASF492
atgaagttagaagaaaaattgcttgaacaatattttgatgttatagagaagaacggtaatacagaaaatcagatacaggaatttcttgaggaaaatactatattcataccaatgccttttttgctaaatcattatttgcatatgaattgtgtgatttccaaatttaagttgggtaatgaatttgtgacggattttgcatatttaactaagagttctgattattgggaatttgtattagttgaattggaagatgcaaaaaagaagatttttacaaatgataaggaaaatatttattttcactcagagtttaatcatgcatatgatcagattacatcttggaaggcatatgtcaataaaaatagagaagcaattcttcatcaaatagataaattaagagttcctctaaacgagaattctgtaaggtttaaatatgtattagttattggaagaaatgctgaaaaagataattcagaaaaacgaagagcaatgtttgcagaaaagtctgataatgatattcgtgtgatgacatatgatagtcttgtttcacaatgtgaatcagtaccttataatggagaaaagataatattatctacttggaaagaacaaggattcaaaataaagaaattaccaaagcaagaaatttccactagtctgtttgcgtatttgagaccagaatatttgcaaatttcagaaagagatattgaaatcttaaaagaacaggattatcaaatagatatttggttaagtggaagggcgttaagttataatgacaagtatgatgcggcatctttggctgaaaggacaactaatccattgacaaaagctgttttacttgccgaagcaaaaaataacaaataa

SEQ ID NO: 62119 - DNA, 1206 bp, Burkholderia ubonensis
atggacgacgaagagcaaattcatcataacaagttgccaggtaaaacctacattagcccgcggatttatatcgatgcacatgaggcgttgcggatagcctcaaaggtgattgactcagacgggcttcactatgcgacggtgaaaagggaagtcgtactgcgacgcacagaaaaagggcgcaccgagatcatcgccaagtttctggaatccacaagagatttgcgtgtcctgacaattcaggccttcaatggtcagacaggcgcgccacataaaactcatttctcatttgtcggcgaagagattccgaaactacttgcattctttgagaatattgcgtccgtcgagtttgcatcgcaggacaaaatcaacatcaccgacactgaactgacacgacttgttttatcgaaggaacaagctgccagtttagttcacgataaccaagacatcttctcagaggtcatccgtcaggagattacgaaagaagatgttgtcgctctcggctatcgcaagcggcaagttgccacgtttgcgaagttactgagtgagccaatctacttcgaccaagtgaaggcggctaaaggcgtgacggggaatgaagcattatggcaagcattttttgaacggaatcgctggattttcggctatggccttagctacttcttcgtcacggggttcgacaatagaaagctggagcaagtcgtcgaagggcacgacttgatcaaccgcggaaagcgagccgacggcctgatgaaaacgaagggcatcgtcagttcgctctgtttcgtagagatcaagacacacacgacaaagctgctcgattccacgcagtaccgcccagggtgttgggctccatcgaaggaactgtccggcgcggtcgcgcaagtacaagccactgtcgcctccgctatgaggagcctgagcgaatacatccgaccgactgacgcacacggtgcccccacgggcgaagaggtgttcaacttcaaaccacgagccttcatcgttatcggctctctcaatgaattcatcaccgagcacggcgtgaacaaagatcagcttcgatcgttcgagctttaccggaactccatttcttccattgacatactgacgtttgacgaactgttcgaacggtgcagctttatcgttcgatccgaggctgagcgtacatcaggcgaaacttcgccacatggcacagaaaacggcccctga

SEQ ID NO: 62120 - DNA, 1206 bp, Burkholderia ubonensis; identical to SEQ ID NO: 62119

SEQ ID NO: 62121 - DNA, 1206 bp, Burkholderia ubonensis; identical to SEQ ID NO: 62119

SEQ ID NO: 62122 - DNA, 1206 bp, Burkholderia ubonensis
atggacgacgaagagcaaattcatcataacaagttgccaggtaaaacctacattagcccgcggatttatatcgatgcacatgaggcgttgcggatagcctcaaaggtgattgactcagacgggcttcactatgcgacggtgaaaagggaagtcgtactgcgacgcacagaaaaagggcgcaccgagatcatcgccaagttcctggaatccacaagagatttgcgcgtcctgacaattcaggccttcaatggtcagacaggcgcgccgcataaaactcatttctcatttgtcggcgaagagattccgaagctacttgcattctttgagaatattgcgtccgtcgagtttgcatcgcaggacaaaatcaacatcaccgacactgaactgagacgactttttttatcgaaggaacaagctgccagtttagttcacgataaccaagacatcttctcagaggtcattcgtcaggagattacgaaagaagatgttgtcgctctcggctatcgcaagcggcaagttgccacgtttgcgaagttactgagtgagccaatctacttcgaccaagtgaaggcggctaaaggcgtgacggggaatgaagcattatggcaagcattttttgaacggaatcgctggattttcggctatggccttagctacttcttcgtcactgggttcgataatagaaagctggagcaagtcgtcgaagggcacgacttgatcaaccgcggaaagcgggccgatggcctgatgaaaacgaagggcatcgtcaattcgctctgtttcgtagagatcaagacacacacgacaaagctgctcgattccacgcagtaccgcccagggtgttgggctccatcgaaggaactgtccggcgcggtcgcgcaagtacaagccactgtcgcctccgctatgaggagcctgagcgaatacatccgaccgactgacgcacacggtgcccccacgggcgaagaggtgttcaacttcaaaccacgagccttcatcgttatcggctctctcagtgaattcatcaccgagcacggcgtgaacaaagatcagcttcgatcgttcgagctttaccggaactccatttcttccattgacatactgacgtttgacgagctgttcgaacggtgcagctttatcgtccgatccgaggctgagcgtacatcaggcggaacttcgccacatggcacggaaaacggcccctga

SEQ ID NO: 62123 - DNA, 1206 bp, Burkholderia ubonensis; identical to SEQ ID NO: 62122

SEQ ID NO: 62124 - DNA, 1206 bp, Burkholderia ubonensis; identical to SEQ ID NO: 62122

SEQ ID NO: 62125 - DNA, 1206 bp, Burkholderia ubonensis
atggacgacgaagagcaaattcatcataacaagttgccaggtaaaacctacattagcccgcgaatttatatcgatgcacatgaggcgttgcggatagcctcaaaggtgattgactcagacgggcttcactatgcgacggtgaaaagggaagtcgtactgcgacgcacagaaaaagggcgcaccgagatcatcgccaagtttctggaatccacaagagatttgcgtgtcctgacaattcaggccttcaatggtcagacaggcgcgccacataaaactcatttctcatttgtcggcgaagagattccgaaactacttgcattcttcgagaatattgcgtccgtcgagtttgcatcgcaggacaaaatcaacatcaccgacactgaactgagacgacttgttttatcgaaggaacaagctgccagtttagttcacgataaccaagacatcttctcagaggtcatccgtcaggagattacgaaagaagatgttgtcgctctcggctatcgcaagcggcaagttgccacgtttgcgaagttactgagtgagccaatctacttcgaccaagtgaaggcggctaaaggcgtgacggggaatgaagcattatggcaagcattttttgaacggaatcgctggattttcggctatggccttagctacttcttcgtcactgggttcgacaatagaaagctggagcaagtcgtcgaagggcacgacttgatcaaccgcggaaagcgggccgacggcctgatgaaaacgaagggcatcgtcagttcgctctgtttcgtagagatcaagacacacacgacaaagctgctcgattccacgcagtaccgcccagggtgttgggctccatcgaaggaactgtccggcgcggtcgtgcaagtacaagccactgtcgcctccgctatgaggagcctgagcgaatacatccgaccgactgacgcacacggtgccccaacgggcgaagaggtgttcaacttcaaagcacgagccttcatcgttatcggctctctcagtgaattcatcaccgagcacggcgtgaacaaagatcagcttcgatcgttcgagctttaccggaactccatttcttccattgacatattgacgtttgacgagctgttcgaacggtgcagctttatcgttcgatccgaggctgagcgtacatcaggcgaaacttcgccacatggcacggaaaacggcccctga

SEQ ID NO: 62126 - DNA, 1272 bp, Leptolyngbya sp. PCC 7375
atgactcagtcgtattctttccaaaagaccgaagactgccttcttctcgtgtattgtccacgagatggcaatagttggttcttagagaaattccggaatgaaaaatccataaatctaggacagatctactcggtttcattagaagacgtctatagtgccgacttctatgccgatgcccatgaagctcctgacgggcatccatgggctaatcaaaccatccaggacgctctctcgcaatatgacgacgagatctgggaattgagtttcatcgttggtgatcgatgcggggagtactaccgcctcaaacaaaagatcttcggcacctctaacgacatttactttgcggacgacatcaatctccgccactcgcacttctctgcctaccaaaaattatccattcctcggcggatcgatgcactattacagcaagatctatacatcggtggcgcacatccagacgcaatctctttcccagaatacgagcgactagttagatcgtttccaacacgtagagagatatttcattatacaaatgctcggatcacgaacgttctgcgcgacttttttgacagagttcctgaccactttcaacgtcttgaccgatacgtcacccgtcacgttacagtacggcccgctaccactccaactgctgttgcgaaacttgaactcatcaagtatcaatcgatcttagataaacttgagtcgatgcttgcatatgaagacgcatacaccgaggcccaatggcagaatgaaatagtcgagatagtccgcctcttattccccaaatacctgtttgcattccgagaagctccgatcttcgatgatgatcgaggcacagagcgcagtgtcgacttcctgctagtggacgcacttgggaacgttgacctacttgagatcaaaaagccaagaagtcaaaccataatgagcttgtcctactatcggaacaatcatgttccactcagggaactcgccggaacggttatgcagctcgaaaaatatatatttctcctatctcgatctggccgaaaaggtgagactcgactgcaggacctctatgcgaacagactacctaatgactttatactacaaatcaagaatccccaagggttcgccctgcttggacgtcatgaaggcctttctcaagaacaaagtgacgacttcgaagtggtccgcaggcaatacaagaacttgattgatattattacctacgatgacctgatacgacgactacaagtttccatcaatgagtttgcacgattggctcagacctga

SEQ ID NO: 62127 - DNA, 1251 bp, Streptomyces ipomoeae 91-03
atggcactggagtggcagctcgaaaaggtggcggaggaagcggccggccaggcggtgaaggacgccatggccgcggtgttcgagcacatgaacggtgggcccggccgtggacgtcggggcggcaaggagctcgtacggctgctggaggaggcacggggcacggcggcgggcgcgggggagtggaacgtggtgcgcatgctccaggactcgctcgactacgcccagggcctcatcctcagaccggacttcgacgagcgctaccggctcacccgggacggcaagcgggacaggatcagcctggactacctcgcgaagacgatgtgggtgacgcaccggtggatggtcgaggagggccgggactacctggcggagcatcccgacgcgggtatggcggagttcctggagcacttcagggcccagggcgaggacgcgctgttcatggaggcccccgaggaccggcccggacggtgggtgatcccacgcggccgggcggagacggcgctgtggctggaacggatcctgagggacggccgtatcgacatcgaggaccccgccctcgcggcccgggacatcgtcacctccccggagaccctggctctgctcgccgccgacgacaagggccaactcatcatccaggcagctgagttgcgccgtcgtgccaccggactcgaagagctgcgcgcggtcgtcgaggatccgaacgccctggagcgtgacctccagcgtgcgctggaaggccagcactggatcttcggtggccgtttcgtcggcgaggccgcgcagcgcaggctcgtgccgggcgacgaggtcgacatcccgctgatacgcggtgacggcgccctgcgcatcgtcgaactcaagcgagccatgggcctcagggagcccttggtgacccggcaccgcaacgcctgggtgccggcggcccaggtccaccgggccgtcagccaggccgtcaactacctggtggggctggatgaggaccggtcccgcatccgcgacgagttcggcatcgagacgcggcgggccggcgccctcgtgctcatcggtcatcccgccctccacccggacgtaccggaggaggagatcaccgaggccctgcgcacgttcaacgcccatatgagccgggtcgaggtgctgacctacaaggagttgctggacaacgcccggcggtcgctgggtggttcgggcgaggagggggacgaagcccgccgtacggggagggtgccgtatccgctgccgccggagccgtga

SEQ ID NO: 62128 - DNA, 624 bp, Cupriavidus necator
gtgaaacgtcgcctcgacattgaggccggcatgatttctaaggcgtcggtcagtgcccttgtcgacaccccttccggtgagcgtgaacttcagcgcctcctaaagagcgatctgtccattttcggtgaagcttatgcgaagccggatgatgaatatatttgcttctctgaatatccacttgctgatggtgcgattgactttgttgtctttactggtcgttccaggatggatgtcatcctgatcgaaattaagggggctgagttcaatttggtcaactccaaccagtacggtgccttcaatcacaaggtcacggaggcggccacacaaattcaacgcaggctcggcattatctttcgagagttaagtacctttcgaacggatgcccacactcggcgtctgcgcgccgaacggggagagaagctccataacgcctttctggggccatattggaagctggaagtagatccgaagaaggacgtcaacattcggagtgtcgtaataggagggaggacagtcagtgatctggatgaaagctacaaacggcaagactatgaggctagattcactccgcccgtccgcatcgagtcctgggacacctggcttcggcgacttgtgcgttcatga

SEQ ID NO: 62129 - DNA, 1197 bp, Acinetobacter bereziniae LMG 1003 = CIP 70.12
ttgaacaggattattcgattttctacttttgagttcaattattttgaggggggattaccggtagatgagaaacttagctcaacaggaagtgtaactattaatagagttttttcctttagtaaattagataagtttaatgaggaagatcaatgcataaagtttgtttttggtaatcttaatgatgattattatacaattgatagagatattttaggaattagtcatgatttgttaatttataaggattttaattttaccaaaaaaaactttatagcttcatataatatttctatatttagaaaaattgatgatgcattgaatggtaaggaaattattattggtggtgaaaaagaagatgctatttctattgaggattttaataatttaataaaaaactttcctaatacaacagaactaaaatattattctcgtataagaatattaagagaaatcaatgattattttggagggctgtctgaagctgaaaaaagattgaagtcaaaccttgaaaatagaattgttagacgagaatctgataatagtttatatatcagagatacttttaaaggatatgaaattaaaaaatatgagtttatctatgacgaattgattgaaatgttaaatgaggctgagtcatattcagaaaatgtttggcaagataaaatattagatctattacttttgatatttccaaagtatattaaagttataaaagagttaaatgtgaaggatttttataccgattctaaaagagacataactagaaaaatagatttttcattaatagattgtaatggtaatattgatattgttgaaataaaaaaaccgtttgaaaaagcaattttgacttctagactttatagggataattatgtacccaaaaatgaattgtctggttcaattgtgcaagttgagaaatatatatttcatttgaataaatggggtgccagtggtgagcgtacaataaatgataagtataaggataaattgccaagtggattaagtattaaggtagtaaaccctaaggcaatgataattctaggtagagataataattttagtgataagcataaatttgattttgaatttattagaagaaaatactctaatgttttagatattatgacttatgatgatttattgagacgtgttaaaaatattatttcaatgcttagaagtaatcaaaataatcaatag

SEQ ID NO: 62130 - DNA, 621 bp, Methylobacterium nodulans ORS 2060
atgaggcggcttaccgctcacactatcaaccccgcaaccgcgcgtcacaacttgaatggatatcaaaccaatctcgcttccagggcaagtttgggcgagacggctgatattcaaccgtttttctacaatcggtatgatcttgcggccatgtgctcttactactttccagacattaggacggtagattcgattgctcatgagttcgttatatacggagatttcaaggccgatatgataattggtgattcagcgctggcgcgctacttgcttgttgagttcgaagatggtttgcccaacagcattttcaataagacgccaaaaacagcgccggattgggcgaagaggtttgagggtgcgttttcgcaagtaattgattggttatggaagctcgatgatatgaggagtactggcgattttcagcgcgtcttcggtacgcgtgacgcctcgtttcaagcactgattatagcggggaagggtatgaatttaagcgaccaagagaaatcaagactgcgttggcgcgtggacaaacttagagtcgactcaaaagctgtctcggtcgtatctttggacgacttggtggccgacgtggatttttggctcacgaaatattttggggtatag

SEQ ID NO: 62131 - DNA, 624 bp, Oscillatoria acuminata PCC 6304
atgaaaagttttgaagccatagaattttctcccagccaatgtgcgattcaattgggacaattcaaaaacttactccaaaagaaaaaagacctatccgaacgggatgacattttacctttttttaaaaggcgaaaggacttgtctgcattacttggcagtttacatcccaaaatatataaatatgatagactggcctttgagtataatctttttggcgattttgttgtggacttagccattggagattcaacgagaaaatcctactgttttgtcgaatttgagagcgctaaagacaatagtatatttgtttctaaaaccggaaaaacgactccggaatggtctcccacatttgaacgaggctacagccagattgtagattggttttggaagctgaacgatatggaaagaactgatgagtttgaaaaccgatttaatggcaaaaatataaaatatgtgggagtgctagttgtcggcagaaatgaatatttagaacccagagaattaaaaaggctgaagtggcgtcaggaaaatacaagagtcaattctaaagaaatctactgcctgacgttcgatgaactctatgaagatttatcggttcgcctgaatacctatctgagtatttaa

SEQ ID NO: 62132 - DNA, 1440 bp, Cupriavidus metallidurans CH34
atggagcaaggtaggctggaagttactgcaacgttcaacaacaatgaggtcttgaatccatcctttgagttgtcgcacggggtcgatcaaggcgtgcagtatcgggatctgtatctgcagacctatcagcgaggagccaatgatccgaacgtatgggtggcccaaccgagggagcagtggcactgcctcgcacgggtgtatccagaccggcttcttacttatccggtttttaccaacccccacgcccagcgatatctgagcccgaagcatggcccgctcacttccgtcatctttcaccgcaaagtagacgagccattgcctgaaacggccgacgcggcagttacggaaatcgatctgtctcttccatggaaatgcttctccgaaagtacctatggccttggcctcgttccggagcttgacgaggtgtggcgcagcctatctgggattccagcgattaccgccatcggcgtcaccaggtccggaacttcgacggttacggaaagcatcgcgtggatcacggtgagtgatctccatcgtttccggcgcaacttccagcgtttcaagcggctagcccgcgagcacgtgcatgttgctaggcgctgggatgtcagaaataatctactcgcaacgctcgatcccgaccgattccctcacatggctcctgcggctgcggctgcaccgcttgtcgagtacgtgcgtactcgagggaggcgcgccgatgtcagtgaacgcgcgcagaggcaagccgcggtacgagctgttcggcaggaacttgcaaccattgcgacggaagcaccggcagaggtcctgcagttgcacgccgaaatcgagcgggtcacccttgcaaggatgatcgaccggtacgcaaccatgctggagcagtccctgccagaaccacgatggcaacagttcttcgagaacaacctttttgttctgtcgctcgtgttttcgcggcccgttcggctgttgcacacgcaatttcacgcgcaagcatctcggttggacggtaccggggcccaaataggtgacttccttttcgcggagcaggggcaagccttggcgatcgtcgagatcaagaaaccatcgtcgtcacttgtgcaggctaccccatatcgcaatcgcgaggtattcggtccacatgcggaactaagcggcgcaataacccaggtgctctaccagcgaagtgccattcaaagcaactggctgttgcatcgggcagaagccgccctgagagattcgcagccggatgccatcaaatgcatagtgctcgcagggacgatgccaagcgacgagacgcaaaggcgaagcttcgaactctttcggaacgcctgtaaagacgttgaggtcgtgacgttcgatgagctactcggcaaactgcggctcttgcttcaacatctaactccgtcaagcggaacaaccgaagacaccgtgccgttttaa

SEQ ID NO: 62133 - DNA, 1416 bp, Pannonibacter phragmitetus
atggctcttggcttccgccagcatgaccctgtgcgagatggcacactcgaagttgatgaggttcatccgaactacgtcgaggtttacttcgtgccgccggaacacagtttgctagcggccaaactcgacccgaataaagcgaggcagtaccgcaccaaactgctggacatcaacggccagcacaagttcctgactatccatccgatcaccacgttcggtgacaagtccgatttcctgaaaccgaaatatggccaggtggagcggatcaccctcgatcgcacggacattatctttccggggttcgacggagccgtgccgacggagcccgaaggtgtgcttgatgtcctagaaaagttgccctcggccttcaccaaggactacgcctatggcctcggcctggcgaagccatatcggttcatcatcgatgctgtggaagagctatcggactgcaccgagatcgtcatcacaagcgatcaagtcacaggaccagaccagaaggacgcccaacttttttatatctcaaagaaagacttcgaagaggcgcggcgcgccatgaacagtatcgataacctcgctcagaccgccgcgcgtgccgtgaaggaatcaacggcccacaatatcctcgcagaacggcttggcgtgccgaagctggaacccaaagcgggccggcacccctatcgaaagctcttcaccgccgtagcgcagggcaaggaagagctgtccgaggaggaccagaacgccgttatcggtgccctgagcagccacgccgcaagcatcgccgaagagcagccagagaaactcgccaagctgcgtggagacatcgagcttgtaacgctcgaagcgttgatcaagcgatatgaggaaatgctcggcgagaagttcgtcgaggggcgttggcaggatttcttcaacgagaaccctttcatcctgaacatggccttcggctatcccgtcatcaaagtgcgcgaccaggcctcagttggcgggcggaaactgtcaggcgaaggggagaagatcaccgattttctggtcaagaacagcctgaccaacaacacggcgatcttcgaaatcaaaacaccgcagaccgcgatcctcaacaaaacgccgtttcgcgagggcgttttcacgccgtcgactgacctgtcagggtccatcaatcaggcgctggatcagaagtaccagtttcagaagcaggtcgcccagatcaaggacaacacccggctctatgacatcgagtcctacgccgtgcactgttgcctcgtcatcggaaagacgcccgacggcgaggaccggaagaaatctttcgaactgttccggcgaaattccaaggacgtggagatcgtgacgttcgacgagctgctcgaaaagctgaagcagttgagcgtcttcctgcgcgctgccgacgaggaggcctga

SEQ ID NO: 62134 - DNA, 1170 bp, Bradyrhizobium lupini HPC(L)
atggcgacggacgaagactatatcggcggctatcgcctagatcatatctatgccaacgagtttcgagacggaaaaggcaagttctttaacgtcgtaacgctcgatgacggtagtacagaagttgaatacatccagccatttccgcaaactcgtaaccgagtgaagctgaccgtgaccttcatccgagatcaaaacgacatcaaggaggtcacgctcaaaaagttcaagcactacaagaacgaaggatggcaggagcttccatggggttctggggagcccatgaaattttcccatttcacctttgagaaattgatggcgtttctgcagctcctgacggaactcgacctcatcaacctcaaggatcgtcggatcggtctgcaggaaggtggtagtgcggtcgaccctgaaacagtgcagaagttgaagcagcttctcagccaggatgggggaggtcaaattatcgatgaattgctcgccaacggaatggttacctcccatgacatcgtcaatctcggctaccgcaagcgtcagttggacgttttccgcggcttattgcgggaggagggataccccgatctctaccgccaggagcacgagataaaatcgcgccaggtcgaaaagatctggcaacacttcctcgctcgcaacgaatggatcttcggcttcggactcgactacaaatttctcggcattcttcaggacgaggctgatatcggctcagcggacctcgccgggcgggacgcagcgatcaccgactttttgctcggaagcactcatttcacagtcctcgtcgaagtcaaaaagccaggcacccccctattcgacagccgtcggaatcgcgcaggttcttgggcgctatcgaatgacgttatcgatgcggtatcccaggttcttgagcagaaagctgcgtggcaggtgaaggcggaggccaatgcccgcaagaatttcgatcgcggaggagcgttgatcgatcagcgaaccgtcgatccaaaatgtatcctcctcatcggcggcgatagcgccttctcaggaacgccgcaggagcgcgagcttaaattgcgcacgttcgagctgtttcgaagggattcacgaaacatcgaaattctgacctatgatgaattattcgagcgagcctccttcgtcgtcaacaatgccgtgaaaccgaaatga

SEQ ID NO: 62135 - DNA, 1200 bp, Streptomyces wadayamensis
gtgactgagacgaactggcagctggtcgctgatgggctcggccatctgtacgcaggaccggccgcagagcagtacgccattgccagcgagttggcatttcccctggcgccgggcacacccaccccggtcgctgccgccctgctccgcgctcacctagcgaaaccactgcgtctgcgggagcaccccccgatcgacgagccagaatacgactacctcgccctcgtagcatccgagacggacctgcacgtcccagtcctcgaagagataggaagccgggatcttttggacgcatggctcgaagtcgcctgggcacggcgaacggtccagcacctcgaacgcttacgccccgaagtcggcgatatcgccgtgaccgtgaggagaaggaagccggaggaggaccggtacgggcagatcagctcgatcagcctcaacggccggatgaacttccgcggtggtctcggcaggagagcgtggccccacaccgtcaagcacctcgcgaaggtcggcgacgccgaccacggtgaacttctcgcccgtgcacgcgaggaagtcgccgcagagaaccggtaccccgagcgtgtcaccaatcgagagctcgcgctgctcgacaaatggaaggtcccacgtcgctcctcgctggcggactggcgagccctccaagaggcgctggacagcgccaccgaggaacggccgatgcaggtcgttctggagaaccacccagcactccttgccaacctgatcacgggcaaccacggggtatgggtccgaccgcaggttcgtctgggcgaccagtacgtctcggacttcctcatcgccagccagacctcggcgggcatgcgctggcatctcgtcgaactcgaatgccccacagcgcggctcaccaacgtcggcaaccagcgcgaatctcccacactgcgccacgccatcgagcagatccaggactggcgcgagtggctgaagaccaatctcctggccacccgggagaagatcccaggcatcaccatcgacgcacgcgggctcatcatcatggggcgggaggacgggacggacagcgctcgtgagatccgggatcgccggtcagtcaatgaccggatcgaggtccgaacgtatgactggctcctgcgcgccgcccgccgcgcggactccatggcctggggtctgctcgatgaagaaaccggcgacctcgaacaagactggtag

SEQ ID NO: 62136 - DNA, 684 bp, Cylindrospermum stagnale PCC 7417
atgaaaggtctagattcttttaccatagaccttaaaaagtgtcgatttgaacttgatgaatttgagaagttacttctcaataatagtgaactacaagaaagtaaagatatactgcccttgtttaaggagagactacatttatcggcatttattgggtcttacgttcctgatatcgttagattcaaccaaatcaaacatgaattttctttttttggtgactttcgtgctgatttagttgttggtgattcagtaaacaatacttactgttttattgaatttgaagatgctactaaagacagtatatttgtaaataaaggaagaagtacatcagattggtcgcctagatttgaacatgggttcagtcaaatcattgattggttttggaagattgatgactttaagaatacgacttcatcccgctctatttttgaaagtgaaaatatagaattttacggcattcttattataggtagagatgcttttatctctcctcttgataaagctagattgaaatggcgtttaaataaagttttagtagactcacgcaaagtaatttgcataacatttgaccaattagctagagatattagagatagactttcactgtatccactgatttatgaagcagaatcagaggctgaacgaactatttccacagatgaaagcgatcgcacattgccttag

SEQ ID NO: 62137 - DNA, 1365 bp, Leifsonia aquatica ATCC 14665
atgaggtcgtatcccggagaactttcgtcgatcgctacctcggggttccgcactaagctcccgtgtatgccctcgaccccgtcgccccagccgcggtgggagcagattgcggacaatctggactcaatggctgctgggccaactgccgctcagatcgcgactgctgacgcccttggcattcctctaagtcgcactattcctgcgccggttgccgccgtggtcattcgggactacttggcaccagttctcttccaaggattaggtggggacgcagaacttcccgacgcgcttggagacctcgaaactgaactcggcctcacgcttagcgcgcacctgattacgggctcgcgcgatgaagtgagcgcctggttcagcgcccgctatatggtgatgacctcccgtggcttgcgcgctctgatgccagagcctggcgacgtggtggctgggcattcgggcgcgaccgagaggcgtgttatctcgagtctgagctccgatggccacatcaatttcaagggtcggcccacggcccgagcgtggccgaatcatctcgtctcggtcgcgcgggtggggagctcggaatatgcccgcgctgtgcaggaggtcgacgcgtcccttcgtaacgccgcgaactacgcgggggcaagcttcgggaacttcctgccgctcaccgagtacgcactcgatggctacacgccggcccctgaagccattcgagcccttgaagaactcctggaatcaggagaacgcctcgagcaacctttccaagatctgctcgagcgttatcccgcgcttcttgcctcggtggtgatcggcaattggaagacatacgtcattccgcaacctcgcttaggcgccgaacacgtgccagatttcttggtcctcggattcaacagcctcggcccgcactgggtcaccgtcgaaatcgaggcagctcgccacaagatagtcaaccagagcggtcggttgtccgggcccagcaaccatgccgtagcgcagattcaggattggcgtgagtggctgacgcacaacgtcgcctatgcacagaccgaacatcatctgcacggacttaccaatcgtgcgcccggtttggtcattatcggccgcgatagtccctcttcgcaaagacaggccgctcgagcccagtcagaggaggatgcgcgtattgcggtccactcatgggactggttacttcgaaacgctctagcccgcgctcaaaacccgttatttccatcacagttcgcattggcgaatctcccaaaacaagcgaactccgagtcgttgcgtccgacacctgtggaaacctctggcagcgtattcgatgacgacttcgaggggctgaatatcgacgatctgctctcgagctag

SEQ ID NO: 62138 - DNA, 1155 bp, Pseudomonas sp. MT-1
atggataattatcagtaccccaagccggggaaatcttattttagcccatcacttccggccttcggtaacaaggagaagcgagtcagaatcgcttcgaaagttcttccttctcatgatgggtatgagtacgcgaaggaaagggatgaaattgtcttgcgtcaaaagccggacgcatcgacctatataactgcaaaatttatagaggactcaagaaaggtatttgttcttactgttcaaaagttcatgtcagaaagcggtatgccttatggcagtgggttctcttttgtaggtgacgagatctcaaaattttgcgaatttcttgcgaatattcaggctgttaagcttcagcacggcggcactattaatatttcagatgaggagcttagaaggctttcactaacttcccaacaggctgagagcttggtaatcgataatgaagagttattcgccgaggttttacgtcactccataacaaaaaaagacgttgttgctattgcttaccgcagacggcagcttgggatatttagacggcttcttgatgagccggacttcttcgaggatctcaagacaaaaaagaagtgcaaggatgaggcgctttggcaacagtatttcgagaaaaacccttggatattcggctacggtctgagctatgtttattcgtccgggttggatgaaaagcgattggagcaagtcgtacgtggctatcatgtggctcaaagcggaaagcgtgtagatgctttgctcaaatccaaagcttttgcatcgacgctttgctttgttgagataaaaacccataaaactcagttgctccgcaacactgcgtaccggagtggttgttggtcgccgtcggacgagctgagtggcgcagtagcccaagtccaaggaacagtttcgtacgcgggcgaaactatatttgggaagttgccgttaacagatgcggatggcttcccgacttccgaggaggttttcaattttcatcctcgatcattcgtcgtaataggtagtctctcgcagctatgtggggaacatggcgtaaaccaagaacaattaaggtcatttgagctatatcggcgaaataccttccagccagaaattattacattcgatgaactttatgagcgtgcgctgcatattgttgaggctagtgagttctag

SEQ ID NO: 62139 - DNA, 660 bp, Burkholderia ambifaria IOP40-10
atgaaactgactccggcacgtgaagtctatgaaaagctgcgtgcgcgcgacccactcaaggactttttcagcctgtgggacgatgtgcgtccgtctgacgtagaaacactccgtcatgtactgaatacggcaacgcgcgaagaagacatccagcagttcttgcaaaagaatccttcgctcttgatccagcatttagggggtggccacggacgctggatcatcccgaaacaacgactcggtagcgagcacgtcacagacttcatgattgccgattgcgactcgatgggctttcattggactgcggtggaactcgaaagcccgctggcaaccatgttcaccaaggccggtaacccttctgcgacgctgaatcacgccatccgccaaattcgagactggcgcatatggctctcccggaaccaaaactacgcggcgcgaccgcgcagtgaagacgggctcggccttaccgatatcgacgcagaggtgcctggactgatcctgatggggcgtcgcgcaaccgaatccgaagacaccagacacatgcgtcgtcagatcagtcgtgagtcgaaaatcgaaattcacacgttcgattttctactcgatgctttgactgggcgtttggcgagcctcgacgaacgtagaaactgggatgctgctacctag

SEQ ID NO: 62140 - DNA, 894 bp, Aliiroseovarius crassostreae
ttgcagcgcttggagaagcgcatcgaccaaagggcgaagaaagccgagagcgaagtcaaggatacgacggttttcaacgcgctggccgagcaagcaggcaagcagccacgcccattcaggctcggtcgaaacgaaattcggcagctcatccagaactacgccgctgatccagacttccgagacccagaggcacagaaggcgctcgttacggagcttggccgttcagcccgcaccttcgcccagcaagcccccgaagccaccgagcagctgatttcagagctggaactgacccggctggagctggcgatccaagagttcgaagagctgatgggcaagaaccacaacgaaaataagtggcaaaaattctttgaggatgaccccttcctgctgtctttcgcgtttgggtatccgttggtttgtgtcaatgggcagtcctatgtcggcgggcggcgcatagacggaaagggcgagaagatcggagactttctgtacaagaacagcgtcaacaacaacgctgcgcttgtcgagattaaaaagcctcagtcgcctgtggtgaagaggtgccgggatggcgtctttggcccgcatgatgagctgtcaggcggcgtgacgcaggttcttgatcagcggtatcacttcacccgcaagtttccgttgcatcagtctgacaacgactggcatggggaaaacgaagtcgcggactatgagattgattgtgttctgatcgttggcacgatgcccacagacaaggatcagcgcaggtcgtttcagctatatcgaaagaactcccacggggtgcggatcgtcacgtttgatgaggttctggagatgctgaagaacctgctggtttatctgcgcgaagccaagcccagcaaacgcccggagaagtcttga

SEQ ID NO: 62141 - DNA, 1365 bp, Hahella chejuensis KCTC 2396
atggacctagatcaactaagtgactatataattaaatatatatcattatatcgatcagagtacgaaaaattcacatccaccccaccagagggtgcaggatatccacgcatttcagtatcgccctttatatctgcaaaagagtttgatgtttttttagcgaataatggggttgtgatttcggaagttaaagaggagccacaacacgcttggtttgtggctggcggaccagcaataaaagttgatactgaaccaacaagcacacccgaacatataatcgatacattaaaagaaaacaacataaaaggaaacattggaatatacagatgcgtcgccaaggattacattccaacaagaatatggagaggtaggataaaaaacatctctgaatcacgagcccttacacatgaaaaattaaatataaccctcaatttaaccttagtaaaaacagatctccgggatttggtttcttccctaactttcggcgcacttgggataattattgacaactacataatcaacaaagaactaaacctaggagagccaaccatcattcaaaagtttggttttttcccggcagaccttaatagcaggaggtttttcaattatttggaaatatataattatagcgacgaaatcgggtggagtacaagaaatattaaattgcgcatcagcaatgatttaaggagagacttcgctagagccctatctatttcagcagacgaaaaagtccatggcactttaactcttgggtctttaaataactggattgaaaactatacaaacagacttagcaagctagaaaaagcgattaatgaattcaagggaatacttctttttcagagcgatgacaaagaggaaacctttcacaagctaatagagaataacccaatactacttgacgtatatggaagttgcattagcaaaccacagctacattatcccgtcgatcacaaaagccctataggaaagaaataccttgaaccagactttatagtctgctacccagatcagtcatataaactaatcgaactagaaagagcatcaaaaagggtagcaacagttcaaggccaccctcgcgcagaagttagtcaggctgcatatcaaattgctgagtggaccgatttcataagcgagcactataacgaaataagaaacgattacccaggaataaacagcaaatgtaaaacctgcataataataagcagatctcaacaagaaaaattcagcaacatagaagatatgaatcgatacaaagggcagcttattagacagttcagagttgatgaaataattacgtatgacgacctatacgagagagtttgcaatgcatatacaacattaacaggcctctctccatcaatataa

SEQ ID NO: 62142 - DNA, 1092 bp, Enterobacter hormaechei subsp. steigerwaltii; identical to SEQ ID NO: 61627

SEQ ID NO: 62143 - DNA, 516 bp, Acidihalobacter prosperus
atgtatctattacctgggctacatgaaacaacaattggagagttcctcaagctacacccagaaataataaagagcgcatttaaaacggagcattttgaatacgaaccatatttacagtggttggaacatgatggtacttgtgaggatgttgcgataaacccagatttgttagttcggaggcccgatggatattatgatatctacgacctcaaaacggcagctttagcaaagaaaaatgttactaaaggcggtagaaagagaaggcgattcatagattatgtcgaggaaggcgtagcgcaacttgtaaattatgaagagtattttacttatcctaagaatgcgaagcatgctaaagagaaatatggtattgaggttaaagaaccaaaactggtacttgttgtaggcagctgggaaaattcatcgccagaagaagtaaagcaggcacaacgaaggtaccataatatagaaatcattgattatgatactttttgtcacctattcattggcgcaagctaa

SEQ ID NO: 62144 - DNA, 675 bp, Vibrio hepatarius
atgataaaaataagaccagcaagcgttgaatccatttttgaagattggcctgaacattggcctaaaaaagaacattatgtatcgcagcatgacgttacggaagagcagtactttgagtttgaatcattagtaaatggtaaggttagtgaaactgaagttgaaaagtattttgcccgcaatccggaagtattagctttaaccgcatttttgttttcgacaggacaccacgcaacttggatataccctaaactagagctacgcccttctgcgggtgacgcaaaaggcggaatgattccagattacgtcatttctggcgcaaatagtgatggtgtgcagtggtttattctcgagttaaaaggccctcgccaaaacgcttttgttcacaaaggtaaaagagtctatctttctgcagattctaacaagggaatctgtcaattaattagctacatcgatattgcatcaaaatctcaagcatatttgcgtgatgaactaggtcttaaaggttttcgtgagcctagaggtattattctgataggcacggaagaagagtccgaagcagaaatggttagagaatttaaagcagcttggaatcggatgcatccgaatgttcaagtaatatcttattctcgattgttgcggaagcttaaacaaaaagtgttcccaaattacggctaa

SEQ ID NO: 62145 - DNA, 1131 bp, Desulfococcus oleovorans Hxd3
atgagtttacctccagattcaactctcgatgacgtaaaggtccggatacgggaatctgtcaaaaatccaaatgtgggtaagacggagcaagccgttctcaaagaaggcccgagagcgttcaggctcgcaactctctttgagattatgaatccagaaagcggcgagatacatcactactcgctaagaattgatagtatcaatcgaaagaaagccgggtggttttataaacctgaaaaatctgtttcgctcgaagggcaaaacccgaatgaaatagaacggctgttccgatttctacgtgcacatctggaaggcaaactctctgtaaccacaggtgatttgcatattattcggtcagaggagtacgaaaaactcgaaagattaattgatttgatcccgaatctgtcttcccctgacatggttgagcttgttaagcttattattccgcgtattaaagacgctggcgattatatgccgaagtttattgaagccttcgagtgcgccgacccccaaactttggatcatgtcgcggttgctactcgttttgtaaaacataaacaggcatatgatcagctcaagcgctttgtgaaatcaggccatgcctctgaaagtgaattccaggatcttctcgcaaagaatccatggatgttcggcagtgagtatagcgaacttcttgacaggcgtacttggactcgtgatgataatttggacttcatgcttcgccgaacatcagataactatttagagatcatagagattaagaccccatttgatgaacctctttttcttcgcgacaaatcccatgacagctactacacatcgtctaagttgtcaccagtccttgggcaggtgattcgttacatctccgagattgaacgcagcagagattcaatcctaagcaaagacgaatgcgacaccctcaaaatacgtgctagaataattgctggtcgtgatggttcaccaaatcatcaagaagctttgcgcaacttcaacgctcatctacataggatagaggtaataacctttaatcagcttgtgaggattgcaggtagggtacttaatatctttgaggacgattctttttccttcgaggcctgtacagaagattcggtaaacgaagacataccattctaa

SEQ ID NO: 62146 - DNA, 1473 bp, Pseudomonas mediterranea CFBP 5447
atgccttctatgcgcccctcacagatgacttttcaatctcggactgacggagggccattcgtagaatttctactcttcgataatgaaggcattccgaccgatgatgttttggttgcagaacgcggtgaggtatacttcagcgacctcaccgaagactttgaaacgcctgaaacctggcatcaaatcctgtccgtatctcccgatgagatatgcatctatccaattcatcagcgagggagaagcgcaaactatggaactcctaagcacggtcctatagaccaaattttactcgccagacccaaggcccacccataccgcattccaaccaatcgcgacgagcttgaaggtcttcttagctcactgccagatggcttcgcgaaggattggcaaataggcttgggtctactgtgggaataccgctttatcattgagtcgatatccgatataggtgacatacacaccattgtgattcatggcgaggatggatcggatgacgcgaaaattcacggaagttcatactatcttggcattgatcgatattcggagctgaagcgcagccttgatcgcttgagccagaggcaccaacgcgagacacggtcagacaagcaattggtttgctacacggggttagcccacgccgcggacccgattcgaaatcctgagcgcacgaagaaattacctgcgaatgttctgacggaccttatcaagctaggtagagggcgctcacagctatctacggccgaccaaaagtcagcggttaacttggtaaaggataacgcaggcgcaatcgccaagaagacacccatgattttgctagacctcaaagcggatattgagcgggtaactttaggtgagttagttgagcgctataaaaacctgatgtccgccgacgcgaaggaagataagtggcagcagtttctggctgacaatccgttcatcctagacatggctttttcatatccagtcaaagtggtctgcgaacggccatacgtgggcagcaagcggctcaatgggcgaggaggaaattattcggacttcttagtggcggcaaagtcaacaggtaacgtagcgcttattgagatcaaacatccacaaaaggacctactgaaaactcccgcctataggaatgatacatacggtccctcagtcgaactgagtggttctgtcgcacagataattaatcagcgggcaagcctgcagagggaaattttccagctcaaagaggatctggaggagccagcacacgcgtatgcagttccggccattgtcgtaattggccgcacgccatccgacagacaccagcggcgctcattcgaacagtaccgaaatgctctaaaagatgtatcggtggtaacttttgatgaattgcagcgacgcttggaagatattcacaaggtactttcaccctcaccaacagcgagctccaatctcagcccgagcgctgccgccgcgcaagatgacgttccattctag

SEQ ID NO: 62147 - DNA, 192 bp, Corynebacterium atypicum
atgagcgagttgtgtagctcgcaaggaaaccgaattgacgcgaagttccgtagctttgaaagtttccgctcgaaccttaagtcaccggaggtgcttacctttgacgaacttgtcgagcgggcgcggtggaatgtggaacttgccgagaggcaagaagatgcggagtcggaagttccggactttgagttctag

SEQ ID NO: 62148 - DNA, 609 bp, Corynebacterium atypicum
ttgaaccgggaaggctcaaacaaacttatcgacctcacccgcagcctcgcctcgattcccgttaccggcgagaaaacctccagggttgacgatgacgtcctcaaccgcatcatcgccgaccaaagcgaacttcagcggctgtacaagcgagaccccaaggcgctccaggcactcgtagaaaccgagacctcggccgccgagatcaaggaactgaagaaccgtcgcgacgtcgttagcactatgcaatcgtggctcgacgaccacgaagcgtttgccgaagcgaaaaacgtggcgggtggcgctgagaaggcgtggcagaaccttctcgaagccaacccatgggtcctcggcgttggtctcggaggtaggctctgcaccacttgggacgagggaaaacttgagcaaacagttcgcggagcaaacctgcacacttccgggaaacgcgccgacgccttcttcgcgtccaacggcctgctgcgttcagtggcgctggcagagattaaacacccggacacgcctttgctgacacgggaccaataccgcagtgatgtttacgggatcagccgcgagttcttcggcgcagtagcccagaccaagaaacggttctag

SEQ ID NO: 62149 - DNA, 996 bp, Pseudomonas tremae
gtgattcaatcacgcggcattaaccatagattgtcggtgtacggtttaggttttctggccctcgaggggacgccggagcttatgggcggcgacagagctcatcaactgccattacacgcaacaaatacagaaggagcattcaagttggcagattccgatgatgaattgatagaatgttaccgtcgacttttagatgacaaacctccggctggtcgacaaaaagagcaagtcgttcaagatttcctagaactgcatacccgattcattccaacccctaatctgctaaatcaccaactgcactttgaaaccatactcacgaagttcgcactaggcaccgaccacatatccgactactgctatatcaccaggagttcggggcgttggcgaatcacgcttgttgaattggaatccccagacaagcctatcttcaataaaaatgaagagagccctgtgttttcttcaaagtttcacgaagctatatctcaagtgcagagctggaaaaactttattgaggagtcaaaatcatgcgtaactgcacgtttttatcctctcatggcgatgttagataaccctaaaagcccggtggagtttaagtatcagctagtcattgggcgctcagccaacaagaataagaattacgaacggaagcaggccctgcatcgaaaagaagtcgagaccgagattgatatatttacctatgaccagcttatcgactacttccaagttgaaagaacaaagcttgtaatgcgtcgcgccaaaaatgacaggtttgagttaaaatacatgcatttccacccgcgcaaaatttttgcttgggtggggcccgatacgctaattttgagcccagagcaaaaaaaggaattatcagaagccgggtatgagattgagaagtgggataatcacgaccttcttaaatacagtatcaaactagcagagtccacaggaagaaaagaacgactagatcttgtaagaaaagtaccgccgcttggaacgtag

SEQ ID NO: 62150 - DNA, 1239 bp, Amycolatopsis japonica
gtgattgtgaacgtgggcccgtggggtgaggacgtcgatgagacgacgtacgcgcagggcaggcttccgagtcggacctatgcgtcggcgagcttcccgatttcgtggccgaattccgcggacaacggccagccagcccggtttgtgtacaaggtgttcgatccagaggtggagacaactgcggagcttgacggagagcagtggctgatctccgagtcgccggccggccggtaccaagtcaagctgctgatcgcgcgggaagcgggcaatgtccgtgagctctgggtgcagcgggtgccgaccaaaggccaaggcaaagtcgaaacgaagctgaatctgaggcagccggaggcgggacggctggtggagttgctgcgcaccctcgagtgcatcccggctgatggcgagcagtctgtacgggttgacgactctctggtgcgggagctgttcgccaatccggagtcgttgacgagaatctatcgcgaagacccatcgcggctgcggcagttgatttccgacgatgagtccgcgcgcgatgtgatcgcgttgtcgcatcgccgcggtcagctgcagaagtttcggcgtttgctgagtgatgacgactatttcgatgctgaggtcgggcaagcacccgggaggcggcgggaggcggtgtggcaacggttcttcgaggataacccgtggatactcggagtgccgctcaccggtcagctgctcacggcctggaatgatcagaagttggagcaggtggtcgccggcgcatcggtcgtcggcgtgggcaagcgggctgacgcgttgctgcgcacctccggtcggatcaagtcgatggtgttcgccgagatcaagactcatcgcacttcactgctggccgccagcgagtaccggtcgggttgctggccgccctccgacgagctggccggcggggtggcacaggtgcagggcacggtgcatcgcgcggtgagcgagatcggtgaacgccttcaagacgtcgctcccgatggttcggacgtgccaggcgggttcacctacatgctcaagccccgggctttcttggtcctcggcacccttgatcaactcgtcgggcaggacggcgggcatcatcgcgaccggatccgctccttcgagctgtatcggcgacagctccacgaacccgaagtcgtgactttcgacgaactccttgcccgcgcggaatggcacgtcaccatggctgaagacgacgtcgaaccccgggagacttaa

SEQ ID NO: 62151 - DNA, 1119 bp, Amycolatopsis vancoresmycina DSM 44592
  modified_base (1107)..(1107): a, c, t, g, unknown or other
atgccccacactgacggatcgcgcaggaacgtccgttcggaccaagtcacgaggctgctcctcgattgcatcgaggagcacgtggccgacccggacgtccgcgccggggtcgccgacctgcgggagcacctgaccaggtcccggaatcgcggcgggaagcggatgctggagctggccgggttcgcccaccgcgaggcactggcagccggtgacacggcaacggccgatcgactggacgatctgatcgggcacgcgaccggccggcttctcaccaacgacgtgacccgcaagtaccagctctacgatgcgcgggagaccaatctccacgcggtggacctcatggcgtccaacgcgcatgcgctgggcgcctaccaagccaagaagtacctggccgaccacccggaggccacggccgccgagctcgtggaccacctcgagggactcagtgagctgtcgaccaaggtggtcgaagaccgcgaacgtggccactaccggatcctccgcctcgacaccgagagacaggtatggctggccgaagtcctgacccgaagggtgcatccggacctcgacaacgaagtcggagtcttcgacctgtcggaggtcgaattgaccagcctggtcgaggcagctcagttgcagctccgccgggagcggctgtccgtgatccgggacgtcgtcgaaaatccgaacagcaccgaagcccaccttcagcaagcgcttcgcggctcctactggctcttcgggggaagctacgtcggggaagcgtaccggcgccggttcaccaccggaaccgaggtcgacattccgctgttgcgtcccgacggctccctccacgtcgtagagctcaaacgggcgaatgtgccgctagtccggacctaccgcagcttcggcctgatcgtcgaccgacgagtccacgaagcaatgagccaagtctcgaattacctcactgctttcgacgaagatcgccatgcgatacgccacgagcacggcgtcgagtcccggcgggcgaccggcaccgtcgtgatcgggcatcccgcattccaatcgcagttcgacgagcagaaaatcacggagacgcttcgcacatacaacgctgagcatgctcgnggatcaccgtga

SEQ ID NO: 62152 - DNA, 753 bp, Clostridium bolteae ATCC BAA-613; identical to SEQ ID NO: 61828

SEQ ID NO: 62153 - DNA, 753 bp, Clostridium bolteae WAL-14578; identical to SEQ ID NO: 61828

SEQ ID NO: 62154 - DNA, 1155 bp, Pseudomonas batumici
atggacagctatcagaatcccgagccaggaaagacatacatcagtcctcaactagattctttcggcgacaaagagaggaaggtcaggatcgcgaccaagttgattgagcatcccgagacctatgctttcgccaaaatcaaaaacgagcttgtacttcgtcacaaagacggcgcgaaaagctgcataacggctaagttctttgaagatgatcgaaagatgttcgtactgaacatccaaggttacacggtagccacagacaagccccacaatgcgagtttttcatttataggggatgaaatcggaaaacttgtggaatttctgcatcacgtccaatcgatgcctcttgaggggcgcgggcctaagaaggtaacggacgagaatcttcgcgggcttgttttatccagcaaccaagcaagagccatgttacaggataaccaagaactttttgctgaggtgataaagtcagccgtaacaaaggaggacatcatcgcagttggctaccgcaaacgtcagcttgaggcgttcgagaggttgctaaacgacgaagcgtattttgaaaagattagaacgagtctcaactgtaaagacgagatgctatggcaacggtttttcgaaaaaaatccttggatctttggctatggcctaagctacatttatgcctcatcattagatgataagaagctagaacaagttgtgcaaggatattccatatccaatcatggaaagcgggcggatgggctactcaaaacgagaggtatgatttcaagtctttgctttgctgaaatcaagactcacaaaacgcctcttctccagagtaggcattatcgcgccggatgttgggctccgtccaacgaactagcaggcggggtctgtcaaactcaagtaaccgtttcatcggctgtagactcaatccaggctaagctagcgataactgacgaaagcggaaacccgacaggcgaagaagcatttaactacatgcctaaatctttccttgtcatcggtagcctgcaagagtttgttagcgagcatggtataaaccaagagaaatacaggtcatttgagatgtatcgacggaacaccagcaatccagaaatcataactttcgatgagctttatgagcgcgcccgatttatcgtaacgcagcatgaccgataa

SEQ ID NO: 62155 - DNA, 1221 bp, Methylophaga aminisulfidivorans MP
gtgataaccatactaaaggctcataaggcacttttgcttttgtatagtcctgaattacgaccactttcagaaattgaccagcaaattgaagcaggcgaatctgtcacggttggctattgctttagcttccgttctcaacacttgttggatgatcatgatgcggatcagcgtatctttcagctcggtaaactcgaagatggctattacatcatcgataaaaatattttgggcctcaagcatgaccttcgtctggctagtgacttgcctattgagaggaaaacttttgtagctcatcgaaatatttctattttcaggaaaattgataagtttattaatgagtctatcgtgattggtggaactgctgatggagctattcccgaagaggcctttaaatcactacttaagaacttcccaacatcgacagaattagatcattacagcggtgccagagtggcaggagtaatcagagattatctgggcacgatgtcagacgagcagactaaactagacaatcatctcaatcgaaaaaaaactgttgagcctgtctcacgaatagcttttcttgaagattacgaaccgagaaaatttcagtttgtgagagatgaacttgagtctatgcttaagagctcagattcctacagtgaaaatgattggcagaagctcattgcagagtttttgctacttatctttcccaagtacattgctctgcttgaaaatgttcacattaaggatttctattctaatccaaacaagtcaaccaatcgctatattgatcttgcgcttgtagatgccaatggaaccattgatgtaatagaaatcaaacgtccaaagtctaatcaagttgtctcggctaccccccgatacagacaaagtcacaccccggcgtcagagctaacgggcgcagtgatgcaggtggaaaaatatctctttcatttaaacaagtggggcagagctggtgaaaaagcgatttttagtaagcacagcagtgaattacctaataactttgagcttagaattactaaccccaaagctattgtgatactgggccgggtcaatgatttgaacgctgaccagagattcgattttgaagttattaggcgtaagtatgccaacatcatggatataatgacttacgatgatcttttaagaagactagacaatatcatctcgatgattcatcacaattattctcggtttagtaaaagaggcctcagacaataa

SEQ ID NO: 62156 - DNA, 1407 bp, Pseudomonas alkylphenolia
atgtatgacgcagaatcagttttcaatcccagtttccgccttgttcctagcctgccaaatgaagaaccaagtagagacctctacatggaaaccttcttcaatttagaagagccggacgcttggtacccgtaccctgagaatcgctggcaccgccttgcccgtattttcccagaccgtatcgtcacttatccggtattcaccaatccgcatgcacaacgctacctcacttatagacacggccgaataaagaccattgtttatgaaatgaaatatgtccaggatttacctgagtcttcggatgcagctctcacgttgatcgacatgtacttaacgtcgcggatatggaatagcagtaactttggtcttggcttgatcaaagacctggaacccatctgtgctggccttatgcgtgtgcccgacctaaataccttggtcgtgacccacgacgatcagataaagattgatcgcaattgcgcgcgcattccagaacggcagttggatgacttgaggcgcacgttcgataaggccaatcgcagactgaaggaacgtatccgcgtagccaagcagtggcatgttcgcaacgcgctgctggcaaaactagcaccctcgcaattccctgccttggtccaagtgactagcaccggtgaaatggtcgagtaccgaatggccagcaccaagccctctccagccatggagagacagcaacgacaggcatcggtgagaaccgttaggcagaatgccagacagattgccaaagacgccccgcatgagctactcaatctacacgctgaaattgagcgagtgacgctcgctaacatgatcgagctcttcgagaagaagcttcagcaacagctcaccgaagctcattggcagcgtttttttgaagacaacatgttcatcttgtcactgctgttcgcccgaccggtgaagctgcttcacactcagttccatgcgcaaatgtccggtatcgatggctccggtgctcaaatcggggactttcttttccgagagctagggcagccgctggcgattgttgagatcaaaaaaccgtccagccccctcatgcaatcaagtgcttatcgcaacgacaaagtgttcggaccgcatgcggagctcagcggcgcggttacacaggttctctaccagcaaaccgcgttgcgcagtaattggctgtttcaccaaaccagattgcaaggctcccaaccagatacgatcaaatgcatagtcatctgcggcaccacgccgactgaacccgaaccgcggcgctgcttcgatatctttcgacacgcttgcaaggatgtggaagtcgtcaccttcgatgagcttctggacaagctgaggttgctgctccaacacctcagccatgacaagactaacaatgaaggagacaccggcaagcagagttga

SEQ ID NO: 62157 - DNA, 1131 bp, Fictibacillus macauensis ZFHKF-1
atggaaattgttttaaattctacatctaaggattctgcaatggggactgacattattttaagagagaatagtttaactagattaatattcagacctcaaattgtaaataatcaaaaggatatcaatgcaccagtaaatggttgctttatctttcaaaaaaagaaaaaagctgatatgtgggaagatttcaaagattttaacctttcatctctaaaagcatatgagggaatcaaacttgagttaaagtcagaagaaatgctcaaactaatgactgaggcagatgcttactacaaaattcatagagaatatggaattgttcagggtagaagtttctttaccaaagcaaatagccaattgcaaaaagtcatagaaatgtttaaaaaagatagcaccttatttgaagctctattggatgaaaacaagcaagaattagttaagcagacatttgaatggatggctaacactaaaaattcagaagatataatctcaagattattagaagttaagggaaatgaattagacaaacttaataacctaattggaattacaaatattagaaagttattaaaggtctggcatgataattcagacaatactgatgaggagttttggcaaagggtttttactgaaaattcttgggtattaagccaaatatttgctagccctatgttactctttgcagataaagcctatgtaggtggtaaaggaattggaaataaaggtggaaaagtagtagatttcatgtttaagaatgatttatctaatgatgttgcattaattgaaattaaaacacccaacactgatttactctcaggtaagtacaggcaaaatatttactctatccacagtaatttaactggagcaattgttcaggtattagggtacaaggaaacattacaaagagaatacagtacattaagaggtagttctgataaagattttaaagttttcaaccctatgtgtgttgttattgcggggaagatggatgaccttgaagaacagaaattacagtcatttgaatggtatagaaaagaaatgaaaagtgtaactatcataacatttgatgagctgtttaaaaaagtgaatttgctacttgatttattatcaggaaaacaagaagagagcaactaa

SEQ ID NO: 62158 - DNA, 1269 bp, Vibrio crassostreae
atgaagctacaggtgaaccaattagagtttggcaaactaaggttggtcgttaaatccatacaaactgttcacgaaggatttgtaacgttcggcactttcggtttgaatcagcttgagtgcttacggcgcagtggtttagattggttggtcgagctgctcactacttcactggtcgttaactctatgttgagtttggaggtaaatttgtcagtaggctcaatcggtaaaaaacaagcaaagtctggaaatgttgggtacagtgatccagttacgatccatgaaactactcgttcaagaatagactttgttcccttctacataactaaatcccaaggtgtagagcttgctgggaaaataattacgtataagaaaaataagacaccttttggctggcttcctgtcgatgagaaatcagtctcattacaagccggatcgttgcttaagttgtatgaagccataaaatcacatgttgcagtgaaagatgaaactgagggtgactttctattaattagagttaatgatggtacagctcaactagctgaacatgatcctctatccgtagcaaacgcattgacggcggtcttatcacaaagtgaaatagttaagcatttggagaatgctgatttatcagatgagctagctaatgctttaaaaggttcaatccgcttaaaagatatgaagtcggcagtcaaccaactgcgcaatcatctaaacaaccaagaaaatgatgaaaaaatataccaaaagtggtgtgaggaatatccatgggcattcggtaatgcctatgtcgtcaatgatgatgttagggctatctctcctcacgatcacctagacctaatgctatcgaatgtaatcggtggtttccgagatattattgagttaaagcggccaaacatggaagtcttaaactacgataattctcaccggaatttttacttttcttcagaagtgtcgaaggcaatcggccaatgccatcgatacatggacgtgtttaatgatgttgcatcaaaaggactagcagatcaccctgaaattgttgcataccaccctagggcaacgattgttattggtcgttcttatgattggattcccgaaaaacacaaagcattgcatgggttaaattctaggttaactagtttatctataatgacttatgatcaccttttaaaccaaggtgaaagacttgtaaatttgctagagcctaaccaaaatcctttagctgatagcccacctgtagactgtgacgattggttagatttcgaattctag

SEQ ID NO: 62159 - DNA, 1269 bp, Vibrio crassostreae; identical to SEQ ID NO: 62158

SEQ ID NO: 62160 - DNA, 1269 bp, Vibrio crassostreae; identical to SEQ ID NO: 62158

SEQ ID NO: 62161 - DNA, 1245 bp, Pseudomonas syringae pv. maculicola
atgaccacgacggcagtagaatttgaagatgatggagagcaactcatacttgtgtaccgtccgcgcgatggaacagattgggttctgaggaggattctggaaaagggcaaggttgtgatcaaaggtaccttccatctctccgatgagcacctcgccgcgcatgatcagctgccgtttgaagatggtgccttcattgatgcaggcttgagaaatccggactattttgacgatccgtggatagcattcaagatcgggagtcgtgatggtgactatttccgtctcgatcctgcgattttgggtatcgatgtaccggttttactctcgaaagatgccccagtgacgtggcggtggttcagcactgaccgtccggtttctatatttgctgtaattgctgaactgaaacccagtcgcatcgtcattggtggaagcgaatcggatgccatccctatttccgagtatgagaagctcatcgatcaatttcccactccttacgaggttcgacgttacgttcaggcgagggtcggcacggtcgtaaggcaatactcggacgctagggtagatgcagaatccaagctcaatgcctatgtaaacaagcgggtgaaggccaaagggaaagatctgttcaaaccagtgcgccaagcggagattgccaaatatgagtttctgctagatcaactacaaaaaatgcttgatagcgaagacggctattctgaagccgcttggcaaaaaaaaattctacagatcgtctgccttctgaaccccaaatatatcgcagccttcccagaagtggagattccagatacagatagcgagaccaaacgattcctcgattttctcctggtcgatgcatctgggaacgttgatgtaatcgagatcaagcgcccgttcgctaaggggctcgtcacctcaacaacctaccgtgacaaccacatcgcttcgcgagacctttctggcactgtgatgcagattgagaaatatctccgccatctcaaccgctggggttcgaagggtgaggtggcactgcgaaagcaaatcggtgacaagctgcctccggactttaagatcaagatcacgaatccgtgtggggtgatcatcatgggtcgggagaagggccttacacacgctcaactgcgtgatctcgaagtgactcgccgtcactacaaacacattgcagacatcgtgacatatgacgaactcctgcgaaggctaaaattcatcttggaacagcttcaagcggaaagctag

SEQ ID NO: 62162 - DNA, 1299 bp, Pseudomonas syringae pv. maculicola str. M6
atgcctcaatttaatgatttgactcgagagcttacaagttttattgggggaactaagctaggcggaatcagggtttttcatgatttctcttgggcagataagtttgatagaaaaacttttaagaatggtctgcggcttgcctctttaataaagtcagactgtccgctcgcatcaattccttcactcatactgttatctgggccatcagtcaccgaaggtataatcagtgagccaccaaactatgcacttgtaataaatattgattcctacattgcaagcgctacacctgatgcagccgcggcttattttacgcttcggcgtagcgcagatacgcgattggagataaccactgttttggccagagacagtgcgcttagagatgacgtggtgataaatcacttaacatcttcttatgtgatgcgttggatcggagctaatcccacccgagctgccgaaatcaggtcacttctagatcacgctgagcgggaactaccacctgcaaatacaaacttagcggatccagctcaggcagtagaactattaaatcgtcttgaggccgttccggaaaccttagttgccgccatgctcgcggttctaactcgattagcaaacggttcagcagagcatcagaacacattacttcagctcattcttggaacaactgagggaaggaatattgcagcttttgagatgggtaaccgtatagctgaacggattcaagatattcgcgacgctcttagagcatatgaagcattaataaataattcgacaaccacggaaacagatacgcacgaatttattatagacaacccatggcttctaggctccgattatataaaaacgcgccatgagcagccgctatctcgggggcgggtagattctctgctagaaaagtatgatgggcaccatgaccttatggagcttaaatctccaaaccaccgaatcataatatcgacaagtgaaggagctacagcgtcatctccaacacagttcaagttaagtctcgaattgtctaatgcaattgctcaagtcagtagatacctctttctcttagatcgagataatcagtttcttgctagcgagtacggcattcaaaatgcaaagcacccaaaggcttttatattaataggaaaaagttcagactgctcccagtccgaactagatacacttcaacaacttaacaaaagcttgcataggatcgaggttcttccatttgatactcttattataaagtgtgatgcaatgcttgcatatcttgagcgcgctaccggtttttcggatacattagtggagctatag

SEQ ID NO: 62163 - DNA, 1305 bp, Pseudomonas syringae pv. maculicola
gtgcatatgcctcaatttaatgatttgactcgagagcttacaagttttattgggggaactaagctaggcggaatcagggtttttcatgatttctcttgggcagataagtttgatagaaaaacttttaagaatggtctgcggcttgcctctttaataaagtcagactgtccgctcgcatcaattccttcactcatactgttatctgggccatcagtcaccgaaggtataatcagtgagccaccaaactatgcacttgtaataaatattgattcctacattgcaagcgctacacctgatgcagccgcggcttattttacgcttcggcgtagcgcagatacgcgattggagataaccactgttttggccagagacagtgcgcttagagatgacgtggtgataaatcacttaacatcttcttatgtgatgcgttggatcggagctaatcccacccgagctgccgaaatcaggtcacttctagatcacgctgagcgggaactaccacctgcaaatacaaacttagcggatccagctcaggcagtagaactattaaatcgtcttgaggccgttccggaaaccttagttgccgccatgctcgcggttctaactcgattagcaaacggttcagcagagcatcagaacacattacttcagctcattcttggaacaactgagggaaggaatattgcagcttttgagatgggtaaccgtatagctgaacggattcaagatattcgcgacgctcttagagcatatgaagcattaataaataattcgacaaccacggaaacagatacgcacgaatttattatagacaacccatggcttctaggctccgattatataaaaacgcgccatgagcagccgctatctcgggggcgggtagattctctgctagaaaagtatgatgggcaccatgaccttatggagcttaaatctccaaaccaccgaatcataatatcgacaagtgaaggagctacagcgtcatctccaacacagttcaagttaagtctcgaattgtctaatgcaattgctcaagtcagtagatacctctttctcttagatcgagataatcagtttcttgctagcgagtacggcattcaaaatgcaaagcacccaaaggcttttatattaataggaaaaagttcagactgctcccagtccgaactagatacacttcaacaacttaacaaaagcttgcataggatcgaggttcttccatttgatactcttattataaagtgtgatgcaatgcttgcatatcttgagcgcgctaccggtttttcggatacattagtggagctatag

SEQ ID NO: 62164 - DNA, 1065 bp, Vibrio ezurae NBRC 102218
ttggcagtaggctcaattggtaaaaagcaagcaaagtcaggaaacgttgggtacagtgatccagtaacgatccatgagaccacgcgttcaagaatagactttgttccattctatataactaaatctcaaggcgtagagcttgctggaaagatcatcacgtacaagaaagacaaaacttcttttgggtggctccccgtagatgagaagtctgtgtcattacaagcaggatcgttgctcaaactatatgaagcaattaaatctcacgttgcggttaaagatgaaacagagggcgactttcttctaattcgtgtcaatgacggtacagctcaattagcagagcatgaccctcaatccgttgcaaatgcgttaacagcagtgttatctcaaactgaaatcgttaagcatctggaaaatacagacctatctgatgaattagcaaatgcattaaaaggctctatccgcctaaaagacatgaagtcagcagttaatcaattgcgtaaccatctatacaaccaagaaaacgatgaaaagatataccaaaaatggtgtgaggaatatccttgggcatttggtaatgcatacgttgttaacgacgatgttagagctatctcccctcatgatcatttagatttgatgttatccaatgtcattggtggttttcgggatatcatcgagttgaagcgcccaaatatggaagttttaaactacgatagttctcaccggaatttctatttttcttctgaagtctctaaggcaattggtcaatgccataggtatatggatgtctttaatgatgttgcatccaaagggttagcggatcaccccgaaattgttgcatatcatccaagagcaacaattgttattggtcgttcttacgattggtctcctgaaaaacacaaagcgctacatggcttgaattcaaggttaacgagtttatcaataatgacttacgatcaccttttgaaccaaggtgaaaggcttgtaaatctacttgaacccagtcaatgtactaaaaatgaaagcaattctatagacaatgatgattggttagatttcgagttttag

SEQ ID NO: 62165 - DNA, 1212 bp, Streptomyces sp. C
atggcgacattccgatccggcttcacgctctggcgcatggttcaggcggcacgagagctcacggagcatgcgggcgtacagcggcgcatcgacgcggtgctgagcatcatggggggcctcggcgggacgtacggcaagggcagaccgctggtggacggcttggaggatgtcgcccaagaggcgctcttgcacgaggacatcgagttcgcccgacgctttcaacgtttcgccgcctacgcccgaggcgagctgttcctcgacatcttggagaactactacgacgaggaggcgcggcagcgcagcgagaagtacatgcggcgaatggctgccatgggcgctgagcgggcggtggccgccttggacgtcctgtgcgacgagaaccccgccgcgactgccaccgatgcccgtgccctcttccacggcatcgcacggtccaccgattacctggggctcgggaccggagagggcgggatccagctgtccaccaagtacctgaagcggctacaggagtatgggcgcatggagatagtcctccggaatctgccccgacctgcctcagccgaagccgcccggatgatgggcgacgtcttggcggacgctgatgcgggactgctggcccaactgctcgaattgaaggctagacgggcgggcctcgcggccctgcgtgccgcggtggacgaccctgacagctccgaaagggccctccacgcctgcctgaagagccaggagtggatcttcggcggagcgtacgtcgccgagttgacccgccgtcagtacactccagacaccattcttgacattccgctgctgcgcggtgacggatccttgcacgtggtggaactcaagcgcgccaacatcaaggacctcgtcatacgacccagcggccacctcatgctgggctctgcggcgcaccacgcagtctcccaggcgcagaactatcttcgaaccatggacgagaaccggcagaccatccttgcgcagtacggcgtcgacacacgcagggcatcggcgacggtcgtgatcgggcacccgcggtacgtgaacgggagcatcacgtcccaggagatcgcggagacgctgcggacctacaacacgcatacggcgcgcatcgaggtgatcacgtacgagaccctgttggattctgcggcccggatgctggcgctctcgtctgccgggcagaaccccggtacgcacgaggagcccgcggcatga

SEQ ID NO: 62166 - DNA, 1383 bp, Halomonas anticariensis FP35 = DSM 16096
atgcttatggctaggttatttcctaatgatttcagtcctgaagatctcgatatcgagatcgaagagatttttccaaattgcactgaagtgttttatcttcccagccaggccgacttagaccttgcaggcagagggtctgaagcccctaggcagcttaggaaaaaaattgccgtgtttaatgggaagggtggctatatctcagtttatccaatttacacactgcctacccatccagactacctaaatcaaaaatatccgcagattgaggagattagacttcttttcgatatcgacatcgtaccctataccaaagatgacgtattgtctgccttggaaggtatgccagcagggtttgttaaagatgttcgttatgggttgggattgattaaagattttcgattcattatatcggctgttgaagagcagacaaaaagcaaagttcttgtgctttgtgatgaggaaactagagataaagatgatggtcgcttctgtctaagttggggcgattatgatgagatgcgccgtgattgcaatcgaataactgaacgcgccagaaaagccgcacggatttcaaaaagtgctgctacttacaatcgtcttgcctatcttttaggtaatgagcaaaagccattaccaatagccaacgattcgatcagtaaaatgcttagtatcaagatatcagatactgacaagcaggccgcaatgaaccttattgtaggggataagtctgctatcgaacagactgatacagtgactctttcgaggttgaaaaacgatattgagcttgtgtcattagaggttctgataaagaaatacgaagagctgttgtctaagagtgcaagggaagagacttggcagaagctgtttaatgataatccatttatcctcaatctagcctttggttaccctgccataaaaatttctggtcaagctagcgttggtggaaagcacttgtctggagatggagaaaaaattaccgattttttgttaaaaaacggtgttaccaataacttggctattgttgagataaaaaagcctagctcaatgctgttaaataaaacacagtatcgtggcgccgttttttccgcctcaaaagaactaactggatcggtaacacaagtcttagatcagtgctatcagttgcaaaaaaacatctcaactataaaagttgattcacgtatctatgatattgaatcttatgccatccactgtatcttgattattggcaccatgcctaccgatgaaaatcaaaaaaaatcgctagaaatctatcgtcggaattcaaaaaatgtacagataattacttttgacgagatgcttgttaagctaaagcagctccactgttttctttctgatgatgataactcaggggtggcgcaatga

SEQ ID NO: 62167 - DNA, 1047 bp, Rhodopirellula baltica SH 1
atgcaaattatctacattcaccctggcatcgaaaaatatgttcgcgatttggggtattccgaggatgcggtagcgaaaacgattgctgaaccgagttcgcaggagtcagtggattttacgcaggttcctgaccgataccggaggcaacaaggagaagtttgtagcctccgatacttcggaagcgaggttgtttgcgtgacctacaacattgttggcggagcttacgagatttgcgatttcttttgtctgccgcgtaaggatttgccagatggtgatatcccctgcagtctcgctcgcacggttttctacgaaaggtttgccccctcgattcttgaatggattccagttccagatttgccaagggttttggggcgtgcgagaggaaaagccctggaatatcttttggaattccgcgctgcgaaatcgaaggatgtgctgaaacttcctgtcatcaaggcgatcaaggctccgcatttagaaccaagaagccaacgcgagaagaaacgagggtatgcagacattcttgaaggatactgcgatgagttccgagacctcatcgagaagtctccgaaggaggagacgattcatcaatggctagccaaccctcagcacatgatcttcttcgggactgatgctgagatggtctggagcaaaatcaaatttggaacgtcgttcgtatctgacttcatcgtcaagagggatgagcttccgtacctgatgattgagatcgaggatacgtcgaagttgttcaataatgacgggaaacgcagcaagagatacaaagacgctattgatcaggtccaggactggatggggtggctggcaaggggaaatatcaacaccttcaaagacgaaaaccctgagatggagctcttcacctcgccacacgggctcgttgtgatggggcggcagtcgaacagcaactccaagaaggatgtgcgagatcgatgggagcaagacaaatccaaagccaatcctcaagtgctcaattacgacgaagtgatttcacgcgttcgaaagttcgcttcgcgacttcggaaaagctag

SEQ ID NO: 62168 - DNA, 1086 bp, Rhodopirellula baltica SH28
atgccacttgaatttaagctcgaacaacgcttggcgggattcaccgccacttcagcgcggaaggatgaacacgtcgccctcgtctcacgcgagcttcttgggccacaggattccgatctgtcagaccgattggacaaattgcaaggatgtcttttctcaaagattccaagtttgcccgctccacctcggatcggcgacctcatcgtaataattaatcacgacctcactggaattgcgtatgtagacgagctatcgctcattgccacaattaaagcggctcgccctatcgagaagggccaagcggtttttattaaggacattgcaaaggtggaagccgttcatcttgatactgcagttcctgatgacgctgcaattgtagtggttcgctccaacgggtggaaacgatcgctttttttcgatttcggaccactgcatgaagacaatgggaaccgtacgtacgatttggataaggcgttgggccaacaaatgacacttctgtttggtttgccagcttccaatgctgcgatttcgacgggccaagcacgccttgaggggatgaagcaatcacttgatcaactcgtagaccttctctcagaccagtgcgacgatgaagacacgtaccaggaacttctgacttccgcgccttggatgttgggtgcctcatacagtgaagtagttcgtcaccaaaaaatggatgacgcgaatatcccagacttcactgcacttcgtgcctacgatgtgtgccacgatgttgtcgagctgaagcagccattccttcgactgtttcgtagagatggatcgttcactgccgcttttaacgacgcgtggaaccaagcggagcgttacttggacttctgccaacgacaacgcacttacctcatggaccaaaaacaactccgctttgagaacccacgatgcattcttttgatcggccatgacctttccgttcctgagagcgaagccgtcagagcaaaagagtccgtaagtaggctcattactgtcatgacgtacgatcagctttaccgacatgctcgtcatttttttgacgttatagtcgctgcggaggatcggacgtacccagcgtag

SEQ ID NO: 62169 - DNA, 1227 bp, Photobacterium halotolerans
atgacatcaaaagactgcgtagatatgaagcagttagtaatgacatttttagagatgcatatgaaagagtacattagtcctatgtatcactatgtaaaagaaaatccagaattaattaagacggtacctgggttccttatgaatccaagatcgatatccgtatatcttgggcgcactcatataggtgttgagtttgatggtccagagtttattacggagttagagtcaggttcgaagattgaggttaaatacttcgattactctgtagaagaatgtaatttagtagagaaaatcattggctttgaatttgattcaacaggaccaatttcactaccgttacctccttactctgaagatattatattcccgacaaatcgtggttttgataagttgagagagttgaaatggaacttttcagcacaaaattcaatcatggggctaaatgtaccgaccccgtcggtaatgaacgatcgcttcactcgagtaataaacgcgttcttttttgatgctgatgaatctggtttgataactaggcaaattaagtggctagacttaatccctatcgagtttgacagtagcgaccctgaaatggatagttttggttttaatctaagtatctataaggatctagtgaagcctgacgctcattatgtctatcctgctccagatgaatttaagtatatacaactgccaaagatcaatagatttattgaactttggggtaacaaggattcaagcgaagtagatataacaaactttatcagtgaagaagaaaatcagtttattctatctatgaaatttggcgctacagcaattcagtctgaattgacatgtgattggcaaagtgaagaccgtaaatcgatcagacctgactttttcgtagttcaacctaatgggtatgcggatattgtcgagttcaagttacctcatatacctaaatcatttgtggtcggttcagaaaatagagaaacattttccgcatggcttaactcgtacatatctcaaacgagggcttatgtctcattttttgacgatcctaataatcgcaggtggttcgaagacaagtatggttttaaggttcataagccaaagcgttatctagtagtcggtcgtcgtcatgatttcaaatcggatgtgtggcgtgagattcaatcagactttagggacctagaaataattacctttgatgatcttatcgacggtgtaaaagcacaattttaccaatag

SEQ ID NO: 62170 - DNA, 864 bp, Nitratifractor salsuginis DSM 16511
atgaaaaaattaaaagaattaataaaaaataaatcaacggaacgagttattcaaaagtatttgaaaagcaatcttcatttaattgcagaacattatgcatcttctgaaaatgaatatataatcttttcagaatttccaatagatgaaggtaaagtagatttcgtaatatttacagatcgttcgagaatgcagattattctaatagagataaaaggagctgattttccatatttgactaaatctaataaaacatctaatgtgataagagatgcacatgagcaaatattagaaagatttgatttcataaaccataattacgagctttttagacggaaagttcatgagattagacaagaggttgaaaaaggtgaaataaaatacaactccttattgggtagcaatggttttttacatgttgatcctaataaagaaattaaatatcgtggtattgttattggtggatacacaaccgacgatattttagaaagtaaaaaaaggaatcagcttgaattagattctaatcttaagattcaatttgaatcatgggatagtttcctgagaaaagttgagaacaaaaatagaataaagatgacaaactttataagtacttgttcaaataaaagttttccaattggcacaagagtaaaaacaaaaattgcgtggccttctgtacctataggtacagaaggaattgtcgatgaacattatggtaatggaggaataatggttgcttgggatttgccaagtcaacctttgccacatgattacaaagaatttaatttagaaaaatcagtacgtgggattttaagagatggtttttctgaatctgaaactaaatatttggaaattattaaacgaaattaa

SEQ ID NO: 62171 - DNA, 939 bp, Catabacter hongkongensis
gtgactaatgcgattgaaattatagttgagcaactacaaaaacagcaaaaaataccacttcaagctaaaattatcgagcattatcctgcgtgtagttccttccctgaaacatttgatcttattagtttttcttccgagggttatccccgttggaatcccatatcctatctgacagctctagaatgtctcgaatgctccgataaggagtttgataattacagagacgataaacgtgtcctaactgaaattcaaaatgctttgctgggaattcctcaaattaaacaattcaaatatattgaaccaccggacattactgaacgcaggctagaaattgagaatggaatgcaaagcctgaaggaagtgaaaaagtttctggattcatatccgtcagagattgagttggcagactttttaaaacgagacatgtcattatttgcggaactttacgcatatcccaaggatgaatatgtttgtttcgcagaattcccggttggggatggacgggttgattttgctttgttcactgggcgctcccgaatggacgtgtaccttattgaaataaagggagcccaaaaagacttgcgcagaaaaaatcattatggagaatttcgggctaatgtgcaggagggccgggggcagttaattgaaaggaagaactggtgtgaacatcattacggagaatttcgaaaatctgtttatcgtattttaaacaccgtaaattctgacaacaaacgcccttatcacgcatttccagggccaaaatctcgacttagtgtcgattcccaaaaagatattaaaatgcactatatattgattgcaggtagaacgagcgatgatctttgtgacagccaaaaacgtcataaagaagactacgcgataagttatgatatacagaccgagacttgggatagctggataaacaagctaatccgtaaataa

SEQ ID NO: 62172 - DNA, 1047 bp, Roseivirga ehrenbergii
atgggagtattagaaaatttaacagaggatctgaagaggtatcaaacggagcttgcaaagctgcttaatgcgattccaaaagagaaaatcacagaactcattgagaacataccctcagatctatcaatgggtagcatgatcttgtgttcttgccaagatggttttttggttttcattaaaaatcaattcaatcataaatatagcattgaatatcaagatgaaatgcaaaaaatgatgactgaagttttcgatgaacgcagtaaggagatatttacattttatgatccgttgacattgtttgtttcatttggccataaagtgcaattcggtactcaaccaaaggatcagttcaaagataatgtattcgttcttctagttgaagatatacctggaagccgtctttatccagaatacagtaaaatacttcttattgggtcctgtttttatgaaaatggcgatttcaatccactcgaaatggctgaaagggactttcaaaatgctttatcaaagaaaaatttaaagtctaaaaatcgtgcactggatgtcctctcaaagttcgaagtgcttattgataatgctcagaatgaagaggatattcagaaattcttaaatgaccatccttatataattcaacctaactatgaatcagttttaatcaaacctaagatatcgaacaaatacgtggctgactatgcattttctattagaaagcatggaacactagattggactttcgttgaaattgaggcctcctcaaaaaaaatatttacagcaaagagtctttttaggacagaatttactcaggcgaaggggcagcttctggaatgggatgactacatagcgcaaaacataaaattccttaaagatgattaccctagtctacacaaaccaaattacactcttgtctttggtagaaactcagagattgatgactatcgaagaggaatcctaaggtctgaatttggaaattcgagcaataggaatttctcaacgtatgatgaccttattgagaattttaaggctctaatagaaaggttaaacttctaa

SEQ ID NO: 62173 - DNA, 813 bp, Roseivirga ehrenbergii
atgttatacgatagagatttcaacattttgacagaaaatgaaactgccctgagtgcaaaggccgaaaattataaacgaaacaatttaggtaagcttggagagttgacaccaaaagtcataagcaaatatcatgagataaaacctcaggccatgtaccattatgaatctcttttccctaataattacttacatcctgacagcctagatgacaaaaatgaactaagaaaaattgaacaagaatttaaaaatctactaaactctgatatttccgaaaggaaaattctcaattacataaatgaaaacaaacattataatctgatcgcatctctattccatgctggctatacatttggacatcatggtgcttacctatttaaagaatttgaatttccgacaacttataaagctgattatttattggttggaaagaattcaaatggatatcattttttatttattgaattggaaaacccaacaggatcaataacaacaaatgatggcgcatttgggctaaccattagaaaaggaataaagcaagttaagagttgggataaatggattgaaagtaactttcacagtttagttctaacatttgaaaagtatagaaatccacgaattgacttacctaatgaatttagagcattaaataaaacaaggataagctatgcagttattgctggtagaagggctgattttaatgataacacttacgatgagaaaagaaatttatttagaaaagaaaacatccaagtgctgcattatgacaacttaattgattcttttcatctattccaaacgaccaataattattaa

SEQ ID NO: 62174 - DNA, 1020 bp, Kosakonia radicincitans YD4
atgagcattgatcattcttacttgattggatctgatggtgtaaatgacttgcgattaaatatctcaggcttggacagagagtcgcaagatatatctaacttaaaggttagtatatttgcatactgttcaactactgctgcaccaagatttacatgtcagcttgagattgatcacttaagaagcttgtatcaacatctctcacaatatagcgttattagagagagaacctccgtgacgggtaattttgtggaggttcgcaataatcagcaagagattatgcaactactggagcatgccgaaagtacttctcttatcatggcattacagcatgtaataaataatcgccttacaaatgatgatataaacactattcttgggcgaaaagacgccctctgtgaatatcagcggatgtttgatagtactgatggtcatattgagccagaatggcaaagtttctttgaaaataatgagtggatctttggttatgggctaaggtataaatatttaagcattcttcaaagagaggctcatatatctcacacagatctaaatggttcaaatgatgttattactgattttttgatttcagactctagatttactaagattgttgaattgaaaacacctcaaacgagcctatttgttaataggcaaaatagagcggattcttggcgattgtccaacgatcttactgatgcggttagccaaatattagctcagaaagcaaactgggaaattgaaagtcaacgagataattatacggttgaaggtgatataataaatgagaaaacatatgatcctgaatgtattttaattattgggacattgaaagatatttctgggacggaaagagagaaaataataaagagaaaaacttttgaactctataggagaaacttaaaaaacatagatattatttgctatgatgaactattagagcgagcaaaattcatcgtgagaagtgcggaaattattgaagaggctattggtgaggctttaaccaataatagttatctataa

SEQ ID NO: 62175 - DNA, 861 bp, Amycolatopsis rifamycinica
gtggtcaattcctggacaccacgaccggatttctccggattcgacctccggcccggcgcgagcaggtggacgtgtgaagacaccggcatcggcgaactccaccggttcctgtcggaccgtttcggcaccccggagccgagcgccgggccggacgccccgctcgcggcggtcatccggaaggtccagacgggcgaagccgatgcgggccagttggcgcaactggcggaagcgctggcggacgccccgaacgcggccgggatcctggccgcgcacggggccgggcaggtgctgctcgacggcatccaggccgcgaagcagcgggacgtcatcgcggcgctttcggaagtcgtccgggatccggcggccaaggagaacgaattccagcggatcctcgaggaaagctggtggatgttcggcgggaggttcgtcgagaaggcgaaacgacggcagttgacggtgctgacccagctggacgttcccctgatccgggccgacggcgcgctccacgtcgtcgaactgaaacgggcctgcgtcccggatctggtcatcccgcaccggaacttcttcgtcgtcggccccgaagtgaacaaggccgtcggccagagcctcaactacctgcgcgaattcgacgaggaacgcaacacgatccagcagaaactgggcatcgaatgccggcgcgccttcgccacggtggtcatcggccacccgctgcacgtgccggacccccgggtgcgcgagcaggtccccgagacgctccggacgtacaacgcccacctcgggcgcgtcgaggtgatcacctacgccgacctcatccagggcgcggagaaggccatggaactcgcgccgtcggcggcgggttaa

SEQ ID NO: 62176 - DNA, 1179 bp, Catenulispora acidiphila DSM 44928
atgggcttccgttccggcttcaccctcgtccgattcctcacggcggcgcgcgagatgaccagcgaggacctggtccgtcaccatatcgacgctgcccttgcatacacgaacagcgataggtcgaagtaccaaagagggcggccactcgtcaaccacatcgaggccgcctcacgagcagctgcggccatggatgacaacgcattggctgagcgtctggccggttgtgcggagtacgcagcaggcacgatccacctgacgctcctcgaaaccagatgggatcccgaggccagggcttctcacgagaagtacatgcggctgaatctcgaagtcgggctggtgcggtgtgcggaaatcctcgacgagtatcttaaagaccagccccacgccagcggccacgaaatgcaccagtggctcgtccacgtgacaggagccatgggagcctggaccatcggcgaaggccgactcccgcgggtcaagcttccccgctatagcgccgaacaccttgcgtggttccgggacattcggctcgttctgaacgaacagcccgatagctcggatctgacgccggagatcgccgagcaactcgcaaacgtcccaggcgccgagcttgtggcgcgagctgtgcaatggcacaagcgaaagggcgcgcttgaccgcctacgcgccgtggtagaggaccctgcgagcagcgaaaaggaaatccacgccgaactgaagcaacaggcatggatcttcggtggacgctatgtcgacgaactcacccgccgccggctcaccacgttcgatgaactcgacatcccgctgatacgaggcgacggctccctccatgtggtcgagttgaagaaggcgaatcagcgcaagcttgtcacgtccacgcgctcgcactgcgcagtcggctctgtcgtccacgacgctgtgatgcaggcagccaactacctccgctctctggacgagaaccgggccgcgatacttgcagaccatgggatcgagtgtcgccgcgcttcagccacggtgctcatcggtcaccccgctttcgtcgaggaagcgttccgtgccaacgagatctccgcagcgcttcggacctacaacactgtgctgaaccggatcgaggtcatgacctacgcggagctcatcgacgcggccgagcgctccctcgctctcaacgacgcggaaatgtga

SEQ ID NO: 62177 - DNA, 1191 bp, Mariprofundus ferrooxydans PV-1
atgaattctaaaactgcccggattgataaatggactaaacgagattttatagagatcccgttcacgtcttcaaatcctgatttcaccaaagatgatgaaaacgtgtctaactacctcacaagggtaaaaaaacgttacaaaggtaaagaagataccgaggaaatctacaacttgttttctcaaagtgggatcataaaagctgccagggagttgatctacaacgttaaaaatggagctcctgttttccacgtaatcggatattcgtttaacgtcagcagagcaacattagagttgggtcatcttatcgatatcattatagaatcaacagacgaaaaagaaatcagcgaggaaataaaaaacaccttggcaattgcctctattgaagaggtgccagtttatcctaatatagaggaattggcagaggagctatcaagacactaccgtgatatgatgattgaaggttttgaagcccccgatgggaaagggggaaaaatgagactcaagctcacaaaatcaccagggagaaaaatagaaacaatccactatttaaatgacattttgctaaatgaaccacgacatccatcagaacttacattaattcgggcagctgttcaaaaagaacttggaaaactaaataaagcaaatcagttaattagtattcttgaattagcaattaatgaacttgatgaattgctaaaagcaaaaaagagaaatgaaaacaaacttcaatcatgcctgactaataatccaatactttttggtctagaatatcagaaaattattccaaaatatagattggggtcagaatatgaaacggattatgctctagagcgttattccgggataatagatgtactggaaattgaatcaagcaatctacaagtgtttaacaagaatggagatccttctcaatatttaacacatgcagagcaacaagttatggattggttgcaatggattgaacgaaaccatccatacgcaagggaatcactccccggcattacaagacctgtaggctttgtggttattgggagatcaaacaagctcgataaaaagcttaagcagaaactgctacatcgaaatactatgtttcgtggtaatcttgaaattcttacatttgatgatgttctgcaaaaagcaaaaacaatgttgaatattttatcaggaaccaaatctttaaaaaaggcataa

SEQ ID NO: 62178 - DNA, 1191 bp, Mariprofundus ferrooxydans; identical to SEQ ID NO: 62177

SEQ ID NO: 62179 - DNA, 1185 bp, Mariprofundus ferrooxydans
atgctgaggttcattcatgataatgagcggcttcttttggagtactcgccagaccaagacatccgctgggttgatgagaaactggctaacgatgaaagcgtttgtatagccaaaacatttatattcgactcatctcatctcgtagatgataatgaagtagaaagcaggacgtttgttttggcatctgttcaggaaggctactaccaaattcatcgtgatattcttgggcttaagcatgacctgcttatctcgacagaaataagggttgataggaagacctttattgctgtgagaggcatttcgattttcagaaaaattgatgctttgattgatgagcagattgtcattggcggaagccttgataatgctattccagaagaagagttcgagaggctgcttcaaaactttcctaccactaccgagttaaatcattatgcagatgccagaatagctggagtgctgaaagagtatttaggcactatgactgatgctcaaacgaaacttgagcatttcctgaagagaaaaaagacgattcctgttcaatcacgggtgaaagctctgcgtgaatatgaggtggaaaaatacacttatattcgggatggcgtaaaggagatgctggaagatgccaatgcctattctgaggctgagtggcagaaaaccatggcagactttttacttctgctttttccgaaatatgtggccgtccttcagaatgttcacatcaaggattattactccaacccatccagtgccactgacagatatattgatttggcgcttgtcgatgccaatgggaatattgatatcatcgagataaagaagccctttgaaaactgtctgttgtcagtcaggacatacagagataattacaccccaaagaaagagctttccggagcagtggtgcaggtggagaaatatctcttccatctcaataaatgggggcgtgaaggcgagaaacaacttaacagaaagcatgcagcatcatcgcctgacggaatggctataaaaatcaccaatccaaaagcaatgttaatacttgggcgagacaaagactttacggatgagcagaggtttgactttgaaatcattaaacgcaagtacgccaatattatggatatcatgacctatgatgacctgcttcataggttggaaaatattattgcgaagtttgaggtaacatcatga

SEQ ID NO: 62180 - DNA, 807 bp, Nostoc sp. PCC 7107
atgtctgatatagctatcgaatttcaggaactattgaaccgagatgacgtgacagagcaaaactgccaagattttctggagaaaaatactgaattattttacacaccatttcttctgaaccatcatgttcatttcagttcaattatatctaaatttcctttagacacatctttagtgactgattttgtttttttaacaaagtcttcagatttttggcatattgttttagtcgagctagaacatccaaataaaaaactcttccgagatgacaaaaataagattattcctacttcagatatgactgaagcaatgtcacaaattcattcttggcaagaatttatagataaaaataaaaatgaagttttaagaagattaaatccccttattttacccatacctcttcggtataatcctattttctttaaatacttgttagtgattggtagaagtgagcaaaaatctgtaaatcagggtatgagggatagattagctagtctttgtaataatgatattattatatgcacatacgacagcttaattagctactacaaacatagccctaaatttaaaaagaatgttcttaagcttagtaagaagtattttgaaatcaaatatctacatgaagaagaacctcttctattcgctagtctattacctgaaaatttaaagattactccagagcagaaaagcttactaattgggcgtggttacgatattgaagattgggaaaagggaaaattactttcttacaacggtaaaatgacatgtgaaaaatggaaaacatataagaaaaagcaaaaaaaataa

SEQ ID NO: 62181 - DNA, 1242 bp, Cyclobacterium amurskyense
atggatgaggaaaagaggataaaaaaaaatcacattgaaaccatccaatttttagttaataaaataggtaaaaagtattggttaccattatatctttatttaaaagaacatccaaagctattaaagacgttttccggatttttactctataacgaaaaggtggtattctaccttggaaaaacacatttagcaatagagtacttcgggaatgaacgagttgataagctaaaagaaagtttcgaaacatcatttctgctccatgattattctctcattgaaaatgatttttttgacgagattattggtttcagctatgatagcagttccgattcattcaagcctccgttaccactatttttagaagacctaatagttcctaccaaccgaggctttgacaagttagcagaactgaattggaattttgatgcccaaaatgcaatatatttttttaatagcaatggtatatcaattttaaaaggccaatttgggagaatcatcaacgggctgttttttgatgcagatgaaaaaggactaaaaactcgccatattaaatggatcgatttcattccattgcaatacgatgattcaggagaggggcatgactttttttctataaactttggatattatgataaacttgttgaacaagatgctcatttcgtatatccattaccatcattagatgatttcaaattttcaaaattacctcaagtaaaccgcttcatagaacttacaggaaattctagaacttccgaacctgaaatcacaaaatttcttgagcagaaggagaacaaatttattctaacaatgggatttcttgcaaaagaaatccatggtcaactaaaatgtgaatggcaaagcgaaaaacgagatcctattattccggatttttttgtcgttagaccgaatggatttgctgatattgttgaatttaaacttcctgacctagatgggaggccagttgttggtaaaaataaccgagaaacattatcagctaaatttaactcctatatctcgcaaacaagaaattacaagacatacttcgaagatccaaacaacagaaaatggatgttagaaaaatatggtgttaaagtacaaaaacctaagagaattcttgttatcggcagaaggtgggactttgcaacagatgaatggcgagaaataataagtgattaccgggatattgatataatgacttttgatgatctagtcgatggtgttgttgcacaattctatatgtaa

SEQ ID NO: 62182 - DNA, 1056 bp, Gordonia soli NBRC 108243
ttgaccgacgaggagacactcaaggcatcgctcagacggtggatacgaggatcgtcaaaccctagagtcctttggcgcgacggcatcggcctcaaggcgcgtgggaaatctttcaagtcagctactttgtcatattttggaaacaatcccgagagtccgtctgggcgcgaactcactctcgtcgaagtacctagagaggaatttggacccggttacgattttgagaatgccaccacgacgtttaagttgcgcgacaacgagatagaggtgctgcaaaagtttctgaacggcctgttggcagatgaagggcattacgtccgggtgggcgacaagagtgtggctgacgccttagcggacagcttcattcaatccggccagaacgaccgcacactgatgaacattttcgcggccgtttcgaagaatccagaacttgcgatgatggtttctcgccagccggaggcacttgcgctctcttccaagatcacggacgagaaccacaaggatgtcatcgaccgcctggatgaaatggctcggcgcgagagccccgctgcgtccgagaaagaattccagaagctggtcgagaaaaattcttggatctttggtggtcgcttcatcgaacctatacgtcggcggtcagtcacagttctagacgagcttgacgtgcccctgaccgcggtcgacggctccctccacattgttgaactcaagcggtctgacattaatcgactcttcgttaaacaccggaatcattggatagtaggcaaagatatccacgaagccgtctcgcaagttgaaaactacctgttcgcgctggacagcgcaggtgacaatatccgcgcgacgctgaatttagacgtgtatcgagccatcggaacggttgtggttggccacctcgatcagtgcaccacagatgtcacccgggaagaggcctacagggcgatgcggatatacaacagccatctctcacgagtccgcgtgctcacttacgaccaactgatcgcaaatgctcgaaatgccatggcgcttggagtcgtcggagccggtgacgcagtatga

SEQ ID NO: 62183 - DNA, 894 bp, Sphingobium japonicum BiD32
atgggcttgccgaaatcattatcttgcgagcttgaagccaggctcgctgaattcgatgacctgatcgcgacgcccaaagcaaatgagaatgccgtccaggcgttcttcgaggcgaacacgcggttcatgccgacgccggacatcctcaaccatcgcgttcacatgaacagcgtgatcgccaagtttcctataggcgaaaggtcaaccgactacgcctatctcaccaagtcgagcatcgagtggcgactggtgctggtggaactggaagacagcagcaagcccatcttcaagaaatccagcaagaacgaagctttcagtaccgaattcaacgatgcggtcgcacagatcgacgtgtggcgcgactatgtcagccagcacccggatcgactgcgtgacaagctgcggccgctgatggtgcctgcgccgatggcgcagcaccggctatcggtccgctatgtgctggtgatcggtcgctcggcagaattcgagcatcatgatgcacgcaaaatgcgtctcgccagctatggcgctgaacgcgatctcacggtcatgacctatgacacgatccgccgtgaggttgcggcgggatataacaagcccaaggcggtcttgcgcgcgaacagccgcggctaccgtctgcaatcggcagaagcggtgccgaccatcatgttcgcgcacatgaagcccgctgaactcgagctatcggacgtcgcagaggccgccctgcgcgccgaaggctatgacatcgatgcctggaagcggaacgagcctctggtcttcaacgataaatggacccgcgattccgaacccgcactctacgagtccatgcatcctgccgttcagaaattcatcgcgcggcagaaaaaatcaggaccgggcggcggttcagactga

SEQ ID NO: 62184 - DNA, 1188 bp, Aquitalea magnusonii
atggcctttttgcaggagttgtttaaaaactactggagtcccttgtatagctacctaaaagaaaatccagaattgattaaaacggcaccaggatttcttttagatcatgagaaaataattgtatacgttggtcgaacgcacatcgcggttgaatatactggctccgaagttgtcaacgaactaaaaaacaaaggaaagatggagcttcagtatcatgactactcaactagggaatgtaatctattcgagcaaatcattggctttaaatatgattctgctctagatttttccatgccactacctacttttagtgaagatctgctttttcctacaaatagaggctgggataaactatcagagctaggttggaattttgctgcccaaaacagtattatgggttttaatatgcctagtcctgagccaatgcctggccagttcgtaagaatagtaaatggcatgttttttgatgccgatgaatcaggcttaaagtctcgaagaattaaatggttggactttttcccaattcattttgatgggtcagatgagaacgtggacagtatatcgttcaatcttgtaatgatgaatgattttgtagagcatgatgcccattattcatacccaatgccagatgattataaattcattcagctgccaaagattaataaatttatagagatatggggaagcaaagagagtacagagacggatataacctcatatttagcaaaaaaagagaacgaatttattctgtcaatgaagtttggtgcaatgaaaattcattcagagctgacgtgcgaatggcaaagtgaggagcgaaaggatattcggcctgatttctttgtggttcagccaaatggttacgcagacatagttgagttcaaacttccatatgtcgaaaaaaatacagtagtaggaagtgggaatagagagacgtttggggcttggctaaattcatacatttcacaaactagagtttattcaacatactttgatgatccaaacaacaggagatggtttgagatgaagtatggttttaaagtgcataagccacgaagatggctagttgttgggcgacggaacgatttcgactctaatgtttggcgtgagattatgtctgactacaatgatctagaaataatgacttttgatgacttgattgatggagttgtggtgcagttttacaaatga

SEQ ID NO: 62185 - DNA, 1356 bp, Roseivirga spongicola
atggcatttaaaaagacagtccaagaaaaactacaaactaagcttaatacattagctcaatatgaggctatatctgacaacgagagtttatatcaagttggtgacgatgttttattacaagtatctgacacggaattagtgtatggaaaaacaagattttcacctacttctacttctccactgtgggaggataattattcagtgacacttgtcctaagccataagaacttaacacttgttaactctaatccaattaacccaccaaagggtgcaaagaatgtgtttgaggttttcaaaagtctgggaaatactatcgaaagaatttatataggtcatgaatcaaattctatcaatgggaatgagatttacataaccaaggcgctttatgaaacgattaatcgcatcaatcgtgaagaaggaaaagacaaaaaagtaagggtgtttaatcgagtggttccatatatgaactcagaatttggacttgacactactgaaattgaggttgaaagagattactcgcttcttcttgataagattcttgctagtggagaatttacacaagaggatataattgcatttacggatagtctagagtcaggtgaatcatctaaagttgtaattgaaaaacatatcaacaagcaaacagaatggctgatagacacaatcgaagaaatactagatattgatagactaacaaagcctaaagtaaaagagataggctcagataagttcaaatacaccaaagtcagtattacgggcccagaacatcttatggagaaagtattgagcgattacgggcaatattcaatttttggggttcctgccttattgaacactgataaatacgttattcatgaaggaagttcacgctcacaatttgatttaatccttattaatcatttaggggacattgaaatcgttgaactcaaaaggccagaccaatatcttttcgattacgggaatggaagaggcaagttttatccatctaaagaccttgcaatcgccatatcacaaactgaaagatatataacggcaattcataaggataatgacgatgaatacttgatcgtaggaaagaaaataagagagtttataaatgacgaaattggcaataccatgtttgttgagagtattcgtcctaaggcgttgatagttattggttcttggaagaaactttctaaagactatgaccaattaagtgattccgttaaagccaaagtatcaaaagaagactatgacaatgattgtcttcaagcatataaagagttacaacattcattaaagaacattaaaatactgacatattctgagctattggaaaatgcgaggacaagactagaattaaacaaagaataa

SEQ ID NO: 62186 - DNA, 756 bp, Rhodococcus qingshengii
atgtcagagatcattcccgaggacccttgcgacgaaccgaacgtcgatgacgtttcactggacgaagacgagtgggcagcgattcttcaagaccacaaagattacgaagcgcgcaaagctcgacaagcagaggcagaactatcgcttactgaattttccgtcacgtgggacaccatcacgcccgacgacgtcgacgaatttcgccgcgcgctccacgacgcgaaagacgaacgggatatgcagaaattcttgtcctcccgaccccacctgctggtgcaaccgctagccggtggccacgggagatgggtcattccagagaagaaattcggcgatcatttcagaagcgactacatgatcgcggagaacagttcactggggtttgagtggctcgcggtggagctcgaaggcccgcaacgccagatgttcaacaaggatggccgccccaacacatggcttctccatgccctccaacagatcgacgactggcgcggattcatggagagcaacctccagtatgtaagaaatcctcggcacaaggatggcctcgggctcgtcgacatccattccaatgtgcgtggccttgtgatcatcggtcgtcgccacgagacgcctccgcgtacgaacgcaacccgacggaggctcgccgccactcacaatgtcgacatccactcgtgggattggctcgtcgaacgcgctcaaatgcgctcagatgagctggagggcgggcgtaggagaagggccgaggaatcggattaa

SEQ ID NO: 62187 - DNA, 852 bp, Methylobacterium oryzae CBMB20
gtgcagctcggcggcgatgagacccggcgcctcgccgatttcctggcggcgtccgggagcggctcggtcccgtccgacaccggcggctacatcgtcatgccgaccaagggcagcccagccgacgtgatccgcgccctgcaggacctgaccgccacggaccgcatggacgcgctggcgatgctgctgcgagaggcgtccgagaagccggccatcctcggtgacctggtgtcacgcctggcggcggacgagcgcttcatcgagaaagccgcggccgccatgaacctcgccgtctaccgacaggtcctgttccgcctggagacgatgatcgatgacccgaccgtcaaggaagggcagttccaggcgcttctggaggagcagccgtggctgttcggcagcgagtattcctgcatcctcgaccgccgccgctggacccgggacgaaatcaccgacttcgtgcctcggcggacgacggacggccgcgtcgagctcatcgagatcaagaccccactgcacggcaagtcgctcttcaactgggatgcatcacacaaggtctgggctccgggcgtcgagctatctcgcgtcgtcgctcaggcggagaactacttggagaagctcgaccgaaaccgcgacggcatcctcgccaacgaccgcgaggacgtcaccaagatgcgcgcgcgcatcatcatcggaagggacagggacgatgaccagcgggacgccctgcgacgccacaacggccatctccaccgtatagagatcatcaccttcgacggcctgctggccatcgcgaagcgggtcttgaggtacttcgaggacgcgcctgcagagcagtgtgtcgtcttgggaacttga

SEQ ID NO: 62188 - DNA, 666 bp, Asticcacaulis benevestitus DSM 16100 = ATCC BAA-896
gtggcgagatttgaaataaagccggcccggtggaccgaggaagatgaacgcagggccgccgctgagtttccaggctcatgttatggtaacatcaacaatctgaacaaggaccatttccgtgacttccaaatggcgcttgaagacggaaatgaggaaagtatccatcgagcaatagaagcgaacccctatctgctccagtatgtgattcccgagtccggtcaccacggtacatgggcctatcccaagcggacgatccgcacctcttctgtggacggtcggccgggcctcatacctgacttcctggtggcgaaccgcaattccttaggtttgtattggtggatcgtcgagctgaagcggcctgacgtgcagttttcaaacgcccggggcgacggatattcgactgacggacataaagccattgcacaatgcgccggttactacgcgcatttcctgaactatatcgagacggtgcgatcaaatactgggctgacccatttagcgtcaccaaagggcatcattctcgtcatcggcaattcccagacggagaccgaggcgcaacagagatgccgcgccgaatttgagggcttgggagacaaggttcgagtggcaacctacgatcgaatacttcagggggcgactcgtgatcgcaaagattggttcgtttga

SEQ ID NO: 62189 - DNA, 693 bp, Asticcacaulis benevestitus DSM 16100 = ATCC BAA-896
atgggaaaagcccgtaaactccgttccacggattttgaacgtactgagcttttctgccgccagccagaaataatgagcctattgctgcccttcaaactcgacctccaagcagcggaggccgagctttcaagctttgaggcttggttctcgactgtcggatttgtgaacgagaaaatcgtcgtcgacgaaattaaaagtcgacctcatatgtctatcctgatcggcacgatcggaaacgtagtcgttccagacctctataagtgggagctaggtttaggtgggctgtatcgaactgattttgttgtcgggaacaacaatctgagacgtttcctgctggtcgaattcgaaggcgcgaatgaattcagcctgtttggcaaaaaaggcaccgctcaatatcgcaactggtcgcccgaactggaacatggctttgggcaaaccgtggattgggccagctaccactcgtatcacaagaccgatgctactctggaaagcaattttggcggcccgattaaatccgcgaattaccttgtcatatgtggtcgtgacaagggtattgtcggcccactcgaacaccagcggctaacatatcgtcgtgagcatgtgagagttgaaggtattcaggctcaagtgctgacctatgacgagatgctcgtatctctgaagcaaacactcgaaatgtttaaaaccgtttga

SEQ ID NO: 62190 - DNA, 1215 bp, Micavibrio aeruginosavorus EPB
ttgattaaaataagaaaaaaaaagaactcgttattattagaatatagcggcgatgaaagctcttgggtttatgaaaaaataaccaatgagagcaaagttacgatcagaaagatttttacctttaagaatcaggatcttcttgcagaaaataaacccagcgatggtagcgagcacgaaaattataacaatatatctttcgctttaggaaagatggaaggtgactactacaagatcgaggcgcgaattttaggcctgaaacacgacttgtttttggcaacagatatgcgaatagatcacaagatctttatcgcgcatcgcgatatatccatcttctcaagaattgatgagcttatctctgaaccaattgttattggcggaaatagacagggtgctattccaatagaagcatttgaaaccctcttgttgaagtttccaaactcaacagaggttacacattatgccagatctaggatttcaatgattctagaagattatttcgaaacaatgaccgatgcccaagagaagttgaaaaaacacctccagaagaagccgctgtcatattcgttagaaaggtcccttatcagtaatatttatgaatatgaaattcaaaaatacgaatacatcagagatagaatagaagaagagttaggtaggaaaagcacctactctgaagataattggcgtgacttaatgcttcactttattctgctgatatttcctaaatatgttgcagttctgcgaaatttacatctaaaagatttttattcaaaaaaagacaaaacaacaaatcgctatgcggatattgcactggtagatgtcaatggcaacatagacattatagaaatcaagcagccatttgataactgcctaatatctaacaaagcgtatcgagataatttccttcctaaaaaggaattagccggcgcaatcatgcaagccgaaaaatacatttttcatttgaacaaatggggaattgatggggaacgagagataacaaaaaagcacgcaaacattcttcctcacggcatagaattaaaaatcaccaatcccaaagcgttaataattttagggcgcaccaaaggtttgaccgcaaagcaaacgtttgatctggaattaattcgaagaaaatactctaatataatggatatcattacctacgacgatcttttgtgtcgtttaaacaatattattgaaaaactaaaaaactccccatga

SEQ ID NO: 62191 - DNA, 1434 bp, Niastella koreensis GR20-10
atggcacgtccttatccatcccgcaccgtgcaaccaaatggggaattggaatttaatgaaattaagcctggtttctttcgagcattctttactcctccaattgaggcattaccttcctacgtttccgatccgaaaaactataaaagacccatatttgacataaataacacagaaaagcgcttaattctatatccctaccaagtatggggcatgcagccaatgactaacaaatactacaatcttgtcatcattagtgtagacatggaaaaccagtatattcccaagactgtggatattgacgattttttgataggagtattaccttctgcatttcttgaagattataactatggattaggattcagaaaaagttataggcacatagcaacaattttggaaagttttgacataaaagaattatggattaccaggaaagggaaaacagatattgacattggggcaaaaaaagcgttcatcaagcgttcggatttggacgaactatgtagggctattgacaatattggccagcgagtacaaaaagtagcagcctctttaaaaagaaatgttgtagacgacttatttgcacgtttattagcagacgaaaaatctgaatctgctttaatattaaatagcgcgcaaatagctagaaagattggtatatcgactcgactaatgcctggaggagctaccaaaaaagaacaaatggaagctatggaagtacttagaatgaatggcaagaaaattgttcaagagcaaccaagtgaactcataaaacttcgcaacgatattgagttggttactttggatgagcttattgcgagatttgaagtcatgcttaataaaactttatcagaatcacattggcaaagtctatttgataaaaatccttttattcttaatatggcgtttggaatccctatagtaaaagttcaaggccaagcatttgtaggaggacgtaagatatcgggatcgggagacaaaatagccgactacctggtcaaaaatagcattagcaataacgcggcaattgttgaaataaaaacgcctacaacgaagctcatgagtacaaaagagtataggagtggtgtgtttgctccgtctatcgaaattacaggagcaatcaaccaaatacttgaccaaatatttatgtttcaaaaggagataaattcccttaaggcagccagtagggaatatgagctggaatcttattctgttgtaggaattctaatagtgggcaaatctttaacctctcctgatgaacagaaatcgttcgagctttttagagggaattcgaaaaatatacacattatcacttttgatgaattgctgacaaaattaaaggcattacacaatttccttactttagatcgctcacccaaggaaaatatgactaaccaaagcgattttatcgatccagaagatctgcctttttaa

SEQ ID NO: 62192 - DNA, 1185 bp, Leeuwenhoekiella blandensis MED217
ttggtagagatagaaaaaatagattcaaaacttgtattaaaatactattccgactatgagcctacggaatggctagataagaaattagaaacgctaattccttttaaaatcaagcatatttttaatgtaggaagtaagtctctacttaaaaagattgaaaatgaatttcaagaatctgagtacttctttgagattggcgaattaatggatggctactatggtgtttacagagaagttttgggtgtgtctaatacatttttctttcataaatctttggatattaaactcgactattttttcgtaaaatctaaatcctcacttctgttgcaaatagataaacatttgcaagaagacatttatattggtggtccaaaagaaactatattaccaatcgaagaatttgaaaaactcattaaaattttccccactactcacgaaattaccctatatcgtcaggcaaaagtcacatcagttttaaagaattattttgactatattacagataaggaagaatcttatcaaaactatctaaacaataaaacacccaactatggtagcaacttaagaaaaacgtttcgggaagccgatattgtcaaatatcaaacgcttttagagaaactaaaggaaatgctttccaatgaagtgaagtacacagaacatcaatggcaagctgaaattattgaaataatattattactatttcctaaatacatcgcggtatttgacgaagtaaagtttaaggacatctacaataacaaaaccagaagactagattacggattaatcgattttatggggaatctagacattgttgaaataaaaattccttttgataagaacatcgtatcggctaacccttacagagataatcacattccaaataaggatttatctggaacaataatgcaaatagagaaatacatattttatttaaacaaaactggggcaaacggggaaaaaagattgactgaaaaatacaaagaccaactaccagaaaaattgaaaattaagattacaaacccgaatggaatgattattatgggaagagataataacctaacagaaagtcaactttcagattttgagataattaaaaggaagtacaagaacataatagatatttttacatacgacgatttaatgcgtagaatggaaataatgttggcgcagctagaacggatataa

SEQ ID NO: 62193 - DNA, 753 bp, Roseburia inulinivorans DSM 16841; identical to SEQ ID NO: 61828

SEQ ID NO: 62194 - DNA, 1197 bp, Roseburia inulinivorans
atgtcagaaaaaacgattagggtaaagaaagaagaaaatagattactggtgtattattccccaagtattaattttgatgagattgtgaggaacattgcgtatggaacactgattaaggggacattttgggtgactcaagacaatcttgttgaggttaatgaagaagaggagtatatttgctttcggattgcaggtacagaaggtacatattacgtccttgataagaaggtatttaatattgaaaattctatatatgtagataaatgtttggatatcacagataaatggtttattacatatcctcataattcgattatgaggagactggataatttaatctcaaaaaagctttatattgttgaaagtgatgatgggatagagaatcatttgccgggcagtgcttttctgggattggtagaaatatttccgaatgcttatgaggttaacaaatatgtgaatgctcggatcgcgtacctgttatccaattatgtagagggagtgtggaaacacaaggagtcttatgaaaaataccttgagaaaaaagaaacacatttttcattagtcgataatcagtgcattaagttgatgggctacgaaatgtacagaaaagcatttgagaatcttgaaaggatgcttgcagatcctgaaccatattcagaaaaggtctggcaggaaaaaatttatgaaataatatgtgtgctttatcctaagtacatagccagtttccgagaaattgagattggaaatgatggtcgtcattcgaaaaaaccggattttatactggtagattcttctggatttgttgatcttctggaaataaaaaagcctaataaccaaaaagttgtttcgtctacggaatatagaaataattatgtggctggaagagatttagaaggggcgattgttcagatagagaagtatgtatacattttaaatcatgaaggagaggcgcgtgcaaaaaaaatacgagataaaattgcaggtggtcttccggcaggattagaaattaaagtagtgaatccacagggaattttgcttttgggaaggagcaggggattgacaaaggaacagctttttgatttcgaaataataaaaagacaacataagaatattgtagatattatgacatatgatgatctgctaaatcgattgaaaaatattttgaagcagatggaggcagattcaaattgtatatag

SEQ ID NO: 62195 - DNA, 1272 bp, Flavobacterium aquidurense
atgtcagatttcaaaggtgaaaaacttataaacgacctaaagacaaaagaggtttacgagtatgtcgatacagaaaataaaattaaacaaatttcaagagaagtatttaaaaataaggatgaaataattcattatccgagaggttttgaaggtggcgaaaaatataaaacaattagaaagtttatttttcgaggatttaatggaaaattaccggtcggtgtatttaagtctgtaacatacggttggggttttactaaacctctttatccattttccgattatattaataaatgcaattttgaagaagtaataattgaaaaaggaggaaaagtagcatttgacgtagcaaataagaagctctatttatcagaagtaagtttagaaattctattacagtcatttaatgtaatttttaagaagaataaagcagaaattgaattagtattaaatacaaatttatataatctttttccttctgtaatttcgaaaccagaacaaacctatattgcaaatgcattagcttcgtctttatcatcttgggggaattctattgatgaattttctgacgatgataaaaatgctataaaagaactatttgataaattatcaattggaactgattttttaacaaaagatgcacttgcaaaaactaaagaaatagttgataataagtatatacaagaaacattaaaaaaatataaaatactaatgggactgaaaactgatggtgacagtttagaaaagcaatggcaagaatttctaaaagataatagctggatattttcttcaatatttgcacagccagtcattttatataaaagagaagcatatgttgggggtaaaaatattgataataaaaatggtaaattcaacgatttcttgattaaaaatagtttaagcgacaatgtttcatttctagaaataaaaacacataaaacaaagctccttgatagctcaaaatataggggtgatgatgtttataatgcaaccaaagaacttacgggatgtatagttcaagtactaaatcaacgtgataatttccagaaagaattttatgcaataaaaggtaaaaataaagacaaacaaaattttgagacttttaattccaagtgtgtagttttaattggttcgactaaggatttggacgaaaatcaaagttactcatttgaactttttcgtagtaatagcagagatgtagaaatcttaacttttgatgaacttcaaaataaaattgaaagtttacaaaaagtattgaataaaaaaaataaatag

SEQ ID NO: 62196 - DNA, 858 bp, Granulibacter bethesdensis CGDNIH1
gtgcgcactgaccccgagccgctgcgagacctccgctacccgatacccgcgctcggtgatctgggccaccgcgtcacgcttgaaggcatcactgaaattcggcttccccatcatcgcctcctgtcctcaaaattaggatccaaggcgtccagaaatctaggggctcctcacaaggcgattggcgcgaccggctcgctcgacaccgaggagctgctggaggcggaactcgcgaagtatcagttgatccgtgacacgcttcgtggctggctcgcggccgccgaggtcagggtagaacgcgactggcagcagctccttatgaagttcctgctgctgatcttcccgaagtacgtcgcgatactcgagaacgtgcagatcgccgacgtgtactccacaccgggtcgagcgcgcaggcgcttcatcgacattgcgctggtggacgccgccgggaacctagacgtcatcgagatcaagcggcctcgtgggggcctgctggcgggtggcgactaccgcgagaacggctttccgagccgggagctctccgggacgatcatgcaggcggagaagtacttgttccacctgtctaagtgggggctggacggcgagcgtgtgctgacggagcggtacgccgcgaagctgcctcccgggatgtcgatacgggttacgaacccgaaggccatcgtgatcctcgggcgggatccgacgggtggggtcggtggcgagcaggcggtggatctcgaggtggtcaggcggaagtacgcgaacgtgatggacatcatgtcctatgacgaccttctgcgccgcctcgacaacgtcatcgcctcgcttcgcagccggatcgacgaagagactgacatctga

SEQ ID NO: 62197 - DNA, 858 bp, Granulibacter bethesdensis CGDNIH2; identical to SEQ ID NO: 62196

SEQ ID NO: 62198 - DNA, 1164 bp, Caulobacter sp. K31
atgagcgaccacgacgaccacgagttcttcaagctgcggaaggatgggaaaacctacctgtccaaggtcttccaatggtcgggtcagaccgcagagcggatccggcacgtccgaatggtcttcgaaggcagcgacgaacaacacctgggcgagatcgaaggcgcgttgtgccttcggttgacgggcgagacacggaagacccaggtcacagcattggtcagtcaggacgccaatgagattaagcggctcacactgcagacctttaaagcgaggccgggatttacgcagagcttcgtgaaagaggaatttaccttccgcggtgatgagtttgaacgacttctgggctttctgaatcagatcaagtttgttgacctgaccaatgaagagaacttccagattgaagatatctcgaaaaaagcaggaccgaaggccgtcattgatgcttcggatcggggcataatcgacgcgatccaaggcctctcaggaaatcagcgcgccggcctgctgcgcaatctccaaggctcgctcacctcagatgaaatcaatacgctcctgggccgcaaagagggcctcgccgagttcgaacaacagctctcttctggaaattggagcgaggcttcctggcaggatttctttgagcgcgagcagtgggtgttcggctacggccttgattatcggattatgcggcacttcgatcgtgaaatggtcgtcggaggcgcgggaacagacaatcagaataagcccaccgtggacttcctcaccacgttcacggactacaccgtgctggtcgagatcaagaaaccggccacacccatctttaaacgtcgggctggcggtagagccggaacgtgggattttagttccgaattcatgtcggcggtgtcgcagattcttgaacagaaggctgaatggctggccttctcgcagcaaggcgatcactacaacaaggacggcacagaacgcctcgaagctcgtacccgaagtcccaaagcgattctcgtcattggatcacgagcagagtttgatcccgtccacggagttcgggatgctcgtgtgaagcaggacacattcgagctgttccggcgagagacccggagcatcgacatcatcacgttcgatgagctggtggatcgcgctcgcttcatcacgaagaacacgcgttag

SEQ ID NO: 62199 - DNA, 1245 bp, Gallionella capsiferriformans ES-2
atgatcaagattacaaaacaggctggtagtctgttattggcctatgtgcccgatcggttcaacagtgtgcagtggcttgatgaaaagctcagacaggacggcgaagttaccctgcgtcggacgtttaccttcaccactggcgatctcgtttcacaggcccagcaggctgacgacgaggatggtgcagagcgcattttcaaattgggtacaacccaagatggctattacagggtcaacaaaaccattcttggactgaagcacgacctgttgcttgagaaggccatgaaacttgaacctcggatattcgttgcgaacagagatatttctatctttcgaaaaatcgatgaattgatcgatgaacagatcattgtcggcggtgaaaacgaaggtgcgattccgctgatcgattttgaactgctcgttcaaaccttcccgacatccactgagctgacccactacgccagatcacgcatttcacgggttctcaaagattactttggaacgctatcagacgcggaaagccaacttaacagttatttggcaaagaagaagcgcctggttgcaacatcaagaaacagcatcctgggaaatttcgagctacagaagttcgaatacatccacagtgagctggaaggaatgctcaaggatgtcgatggttattcagagcgggactggcaaaagaagattctggaacttctgttatttttcttcccgaagtacatcgccgtgctcgaagaagtacatattaaggacttttactcaaaacccgataaaacaacgcctcgaaaaatagatttgatgttggtggatgccaatggaaatattgacatcattgaggtcaagaggcctttcgacaatgcgctgctgtcacgtaacacataccggggaaaccatacgccgcgcatcgaacttgctggggcagtgatgcaagccgagaaatacctgtttcacttgaacaagtggggtcaggccggagaacgggaaatatacgaaaagcgtaaaagcgagcttcccgatggcatcgagctgaagatcaccaatccgaaggcattgattttgctggggcgtgataacgacttcaccggggagcagcgatttgatttcgagatcatccgcagaaagtacgccaacatgatcgacatcatgacctacgatgacctgctgagcagactaaaaaacatcattgtcatgatgaaacgaaatgtgtcagctccaaatggagacaggagagacatagatgactga

SEQ ID NO: 62200 - DNA, 1251 bp, Paracoccus halophilus
ttgatgaattttgcaaagacttcagatggttggtatttcgaatatcaaggcggcgctgacgagaatgcctgggtatggacagaactaaagaacgacggttccaccacgatttctaagatcttcaactttgtcagatcagatctgcgcgagccgcccgatgataccaccgacatggatgactatgtttatgtcttcgactttggaaagatcgagggcgaatacgttcgtattccagggcgcatgatcggcagcgaaaatgacgtcatgtttccaacgggcaccttcttcaagcggaagttatttgcagccgaacgaaacatctccatcttcggtcgtctcagcaagctgctggaccatcgcgatccaatcatagtcggaggcgctgatccgaaggcgatacccatggaagtattcgaagaactgctcaggaaattcccgaacacatacgagctaaatcggtacgccgacgcccgagtccacactatactgtctacctacctcgatggcatgaaggatgcccgggggatgtatgaggactatctgaacaagaaaatggtcgtcaagggaggcctgaaactcgagacggccgatctgaagaagctggaaatcgagaagtatgtcctcatacgcaagcttatcaacgacgctctcgaaaacaagaccgatctcgccgaggaacaatggcagatctacatgctttcgttcattcttctcctattccccaagtacatcagagttttggaaaacgttacgatcaacgactattacaccagagaagatggcaagaagaccccccggtacatcgatctggcgctgctggatgccaacggaaatctcgatgttatcgagttaaaaaagccttttgataacaagattctccgaaagggccagtaccgcggcaacaatgttcccacgtcggagctgagcggtgccattatgcaggccgagaagtatctgtttcatctgtcgaagtggggcattcagggcgaacgggaactgacgaagcgatacgccgctgatattcccgaaggcatgaaaatccgcatttcaaatccaaaagcaattatcatactcgggcgagataccacgtttggcggggacatgacggacggccaacgtctcgactttgaggtcatcaagcgcaagtacgcgaacatgatggacataatcacgtacgacgatctgattcgtcgcctcgacaacacgattgttgctcttggtggagaaaccgtcattgcaaagaagacttag

SEQ ID NO: 62201 - DNA, 1290 bp, Brevundimonas sp. BAL3
gtgacggctgacaatgccgtcatgagtttgctgacctatgacgaggccaatgaccggttagtcatccggccccatacgactttgcctggctacgattttctacagccgaaatatgacccgctcctggccatcgagctggagggatttgggctgttcgaagactggcttgacgaaagcgacgacgatccgtggaacgtcctcgaccggctgccttccggtttcatcaaggagcctgacttcgggttggggctggtcaaggaccttcgttttattcccagcgttatcgagacagcgccgggcgtcacgcggctgatcgtcagcaagcagcgaaaaactgagatcaagggttcggatttcatcatctcatggcgtgactttgatgaactgcgaaaggcgttcaatcgcgtacacaccaaggcggtcacccttgcgaaccgcgacaagggcatcctggcccataacaccttgctgaccgcagccgcccccgaactttatccggaaaagcaacgcccctacgagcccgacacggtgttcaaggtcgtgggcgcctctggcggagcgggcttgtcgaaatccgatcgaagggccgcagtggatgtcgtggctggtcaggccaaggccttggccaaggacgacgcaccggccttgatgcacctccagcgggaaatagaactggtcaccctggaaggcgtgatagagcgcttttcaacactgttggcggccaaccgcagcgaacaaagctggcaaaatctgtttgtcgagaacccgttcattctccggcttgccttcaacctgcctgtcgtcgcggtcggcgatcagatttcagtgggcggcacggcattttcaggcgcgggcggcaagatcgccgatttcctccacaagaacgggctgacggacaatctgacgcttatcgagatcaagaagccaagctcgccgctggtggggtcgcagtaccgcggcggcgtctatccgccatccatcgatctcagcggcagcgtgacccaaatcctcgaccaacgctatcagctgcagaaggccctacccggcctgaaggacgcttcgcaccgatgggatctcgagtcctacgccatcaagggggtcgtcattgccggccgcgatctggaggacaaggcgcagaagaagtcgttcgagctctatcggaacaatcttcacgacgttcaaatcatcacctttgacgagttgctggcgaaactccgccatcttctggatttcctgtccaggtcgccgaccgacgccgcgctcgaagcggtagtattgccagacctctag

SEQ ID NO: 62202 - DNA, 651 bp, Cyanothece sp. PCC 7425
gtgattacgctgtctccgtctaagcttgatatcaaccagtgtgatcaacaaattcatgagttgcaaagctttttaacagctaattcggaaattgaagagaccgggggaaatggattgcaaaagtttttctcagatcgacccaacttaattcttttattgggttcctggtcctacggattagtacctgctttctatggctctgaagtaagcttgtttaatgagttcagagccgactttgttgtagcttctgttagccacaacaagtttgtttttattgagtttgaagatgcaaaacaagatagtatttttaagctgaagtcaagaggccctgcaaatacaagttatgagtggtctaatagatatgaacatggattgagtcaagttatcgattggtactaccgcatggacgactatgaaagaactaataaattcgaagaatatttcggctactctcaaattagctacactggtttgctggtaataggaagagaccaatttattcagcagactggattgatgaaacggtttcgatggagatcgagcaaaaccattatcaatagcagacctcttcactgtatgacgtttgatcagttgcttgcagagtcaagagaaaaattgtctacgcttaaagcggatgatcaactagaataa

SEQ ID NO: 62203 - DNA, 1218 bp, Actinopolyspora erythraea
atgtccggtgtgaagattcgagctgacgcagcactggaatggcagttggaactcaccgaacaggaagccactgccccggaagtgaaacaggctgtcgctgaggtcatcgcgcacatgcgcagcggaagaggacgaaaccgcagaggcggtcaggccttgctacggctgctggagcaggctcggttacgagcgtccgaggagaacgagtgggacatcgtctgcctgcttcacgaagcacacggctacgcaaccggcaggatcctgaatccggacttcgatgaacgttaccggctcatcaaggacggtgaacgcaatgacagcctacagaacttcgtcgcaggcacgctcaacagcgcactcaagttcgtctcagaagcaggaagcgagtatctcgccgagcacccggaagccgacaccagcgacttgctccactacgtgagcacgctcggggaggacgcgcagttcctcgatgctcccgaggagactccggggcgctaccgcatcgtgcgcggaacagccgaactaacactctggttgcaacgtgctctgtccgagagaatcgacatcgaaaaccccaaagaaacagcgcaacgaatcgccatgtcctcggaaaaagtcgaagctctcgccaaggatccggacggacaagcgatcctcaaagccaccgaactcaaacaacgctcggacacccttaccgagctccgcaagctcgtcgacgacccgacgacaggagaagaagctctacaagaactcctccaccagcacccctggatcttcggcggacgcttcgtcgacgcggccacacgacgtcgcctggtcgacggcgaggaactcgacatcccactgatccgggccgacgggtccctgcacgtcgtcgaactcaaacgtgccttgaggagttccggaataatcaaacgacaccgcaacgcctgggtacccactgccgaagtgcacaacgccgtgggccaggccatcaactacctcgccagtctcgacgagcaccgacagcgcatccgcgacgaattcgggcttgaaacaaaacgcgccagcgcgaccgtggtcatcggccaccccaagctacacccggaggtcgccgagcgcgagctcaacgaagccctgcgtaccctcaacacccacaccaaccgcgtggaggtcctcacctacaccgagctcctcgacaacgccgcacgcgcgttgggcgatactcctaccccgtaa

SEQ ID NO: 62204 - DNA, 1080 bp, Chryseobacterium luteum
atgaacctcagagaaaaggctgattacatcgaaaatcacggatcttttgatgatctaaatgattttatatttgaactctattctaaaaatgacatagaagccatagatattattatacaacttgcaacatctaattatggtggtgaaacttacaaatcagaattacagtatactgccttagcagctatattacattggggagtagtaggtatacaaaaactaggaattgttgtgatgagtagtccttatttttcagtaaagaagaatacagttgtttttttagcacatatttccagcaaaagtcttgatcaatcaatattaattcaatcgagattagattgtgtaaaattcgtaaatgtctttaatgacacacacaaaagcagcgatttagttttagaatctaggaaagttatgatagaaatcataacaacacacaaaggtgatattcttcccattgaatttattacagcgctacaatcttactattgtgcagaagcacaagaacatatatttattgcattaatctcaagatggtttaaatttagccgctcaggtctctctcaattttatgatttaataaattctccagatataaataatgaagcgacattccacaattttataaaaaaaaatccatttctactcgaacctttccacgcaaaaatatggtcaaaaccccgatttggcgaggctctagttcctgattttctcgtacaaagtatggacaataactatacagtaatagaaatagaacagcctggtttctctattatgacgagggcaggagagctatctgcacagactacccatgcgaaaagacaagctttagatttcaggagttgggcaatcgataatcgcttatacgcagatcaacaatttaaaggaatatacagaccttattgtcttgttgttattggaagagaaagtgatttaaatgaattacaagctcggaggctccgccaagaaaatgaatcaacgcaaggagtacttagaatagttggttttgattggttatataatagggcaaaaactacactagaaaatatgctaatctcagggtttgagaaaaatgatgaataa

SEQ ID NO: 62205 - DNA, 1524 bp, Pseudacidovorax intermedius
atggcgagcacgccggaggaggacagcgacgacgacatcgacggcctatcggaggaggcgggcagcgggccggaacgccccgagtccgaacaagagtgcgccgtcagccttggcgtagtcgagatcggcgaccaagagctggccgaggtcttcgcgcacggcgagctcgacggcgaggccggtgtccaatccgagcggcaagtccttatcgcgcacgtgagcgccgaccagatcatcatgactcccgtagtcgccgcctcctaccgcgatgacttcctaggccccaagtaccgtcagatccgacgcatccgcatcccgggcgagtgggaggtacccaaggacgtctacggcttcgacgaattgctggagcagcttccgataggcttctcccgccacgcgcgaagagggctcgggctgcgcttcgaacatcgactgattatcgaggcgatcgaggaagccaccgacgcaacggaactgcttctggtggaaggcgacgccgcattcatctcaggagacacctttacgctcggcctgaggcggttcgagcgcgcccgaaaggcgctggatcaaatcggacggcgctcgcagcggcgcgctctcgaggaccgcaggatgctcgcgcacaacgaagtcgtgcatcctgctgacgccgagcgctttccgcagcaggagcggcagccgcagccgggcgagatctataaactcgtccagctgagcttgcgcgagccgaccagatcgcagaacgaccgcagcgcggccaccgacctggttcgtcgcgacgtgccgcagatcgcgcgagagaacccgcgggcgctgctcgagttgcgttcggagatcgagcgcgtgaccctcgcccagcttatagagcggttcgatgagaatctgcggcgcgaccccgatgaacgcatctggcaacgcttcttcgaggagcatccgttcgttctggcgatggcgttcccctaccccgtgctgttggtgcgcggccaggctcacgtcggaggcgtgactatggatgggcgcggcgagagcatcgccgactttctgttccggcagcggctcaccggcggcgtggccctcgtcgaaatcaagacgactcgcacgcgactgcgccaaacgaacccattccgcgggaacgtctacgcggcgcacacggagctctgcgccgcgatttcgcaggtactggaccagcgctcggagctgacaatgaacttccacgcccgcgcgcgcagcccaggcatggaggacgcgcacgtagggcacgtgcaatgcctggtgatcgttggccgcgacccagactccgcggacaagcgccggtctctcgacttgttccggcacgccacgaaagacgtggcggtggtcacgttcgacgaactcctcgagaagctccggggaatccatcaactgatgtctccgctcggcgcggaagctcgcggcgcgatccgtccggaatcggcggatggcaaggccggcgccgttcctccggcgccagacgctcccctagcgccgacagcgcctacggaataa

SEQ ID NO: 62206 - DNA, 888 bp, Agrobacterium sp. C13
atggaatcgctgataaaagacaagtacattgaagggttcaaggagttgctttccaaaaccggacgacaagagaacgccatccaggctttcctcgagcaacatacgacctttctgccgacccccggtttgctcaaccaccgtcttcacctgaacagcatcatttcgaaattcccgatcggcgagcgaattgctgattacgcctatctgacgaaatcgtcagacgaatggaaactcgtccttgtggaactcgaagacgccggtaagaagctctttacccaatccagtaagcatgtcggcttcaccgcggagatgaatgacgcgatcgctcaggtcgacgtctggcgggaattttggaacgaaaaccgtcgcccggttctggactcgctcgaatatctgctcgttccgcccggcatgcggcggaacgccgtatcactcgaatgtgtcctggtcatcgggcggtcagccgagaaagacaacaacgacgcgaggcgaaagcgcttggccgcgttgcgcgccgacaaacagatccaggtcatgacctacgacacgatcctgcgtgcagtaggcgccggcttcggcgaggcgcgcgcgatactgacgaaaaccggcgctggcttccgcctgcgctccgtcgaaggactacccaacaacctattcacctatctcttgccagagcatctttctgtagatccggctgccgaagctgctctgcgggctgagggatacgacatggatgcgtggtttgcgaactaccccttgatcgtcaatgagaagtggccggataggggcgcttggaagcgtgccgaggaagcagggatgcatcccaatgtcgttcggctgctcaagagctcggaagaacggcgacggacatcgggatcagccacctga

SEQ ID NO: 62207 - DNA, 735 bp, candidate division TM7 genomosp. GTL1
ttgatcaacttcttgcagggagtcaaaaatatagacataccgcaacaagtctattcccttgtacaaaccgcagacaaggcatttgtcgacagggtgttgtttagttttaacacctcagaagctcgccaactgcttattgacgccaaaaaggaggatgttaaaaatctttacgcagccgtgcggcacgccaaaaataaaaaggcgctcgatgaattgcaagaattaatcgccgcagatgccaccgaactccgattccaggaatggttcgaaggtaacacatgggcctttggtgtagaatatataaagatatataagacctcacgtataggcatacactctgatagtgactttattgcccaaagtcttgatcaatacgcagatcttattgagttaaaacgccccaacacaccgctacttattcacgataagagccacaatgattactatccgtcaggtgaactatccaaggctataggccaagcagtaaattacctacatgcaatggagggtagccgtgccgagctacaagaacaagatggcattactgtgctgaaaccacgtatcaaaattattgcagggatgattaatggcttcacgccccaacaaaagaaggcgttacgattgattaataacggtttacatggtatcgaagtcataagctatgatcaagtagtcactcgggctcaaaagctaatagccatcttctcacccatcatagagaatagcgatcagtag

SEQ ID NO: 62208 - DNA, 690 bp, candidate division TM7 genomosp. GTL1
ttgatcaacttcttgcagggagtcaaaaatatagacataccgcaacaagtctattcccttgtacaaaccgcagacaaggcatttgtcgacagggtgttgtttagttttaacacctcagaagctcgccaactgcttattgacgccaaaaaggaggatgttaaaaatctttacgcagccgtgcggcacgccaaaaataaaaaggcgctcgatgaattgcaagaattaatcgccgcagatgccaccgaactccgattccaggaatggttcgaaggtaacacatgggcctttggtgtagaatatataaagatatataagacctcacgtataggcatacactctgatagtgactttattgcccaaagtcttgatcaatacgcagatcttattgagttaaaacgccccaacacaccgctacttattcacgataagagccacaatgattactatccgtcaggtgaactatccaaggctataggccaagcagtaaattacctacatgcaatggagggtagccgtgccgagctacaagaacaagatggcattactgtgctgaaaccacgtatcaaaattattgcagggatgactaatggcttcacgccccaacaaaagaaggcgttacgattgattaataacggtttacatggtatcgaagtcataagctatgatcaagtagtggtcacctatcattag

SEQ ID NO: 62209 - DNA, 300 bp, candidate division TM7 genomosp. GTL1
atgttaaaaatctttacgcagccgtgcggcacgccaaaaataaaagcgctcgatgaattgcaagaattaatcgccgcagatgccaccgaactccgattccaggaatggttcgaaggtaacacatgggcctttggtgtagaatatataaagatatataagacctcacgtataggcatacactctgatagtgactttattgcccaaagtcttgatcaatacgcagatcttattgagttaaaacgccccaacacaccgctacttattcacgataagagcccaaagaattacgggattttatag

SEQ ID NO: 62210 - DNA, 702 bp, candidate division TM7 genomosp. GTL1
atgacattatgcgaggtcacgcttatcaagaaagacgacaagtttacaccgcggctacgcttttggaagaaaaataggcagagcggcaaacaagcgactgccaaagctgacgagacaaattataggttaatcaaggcaggtgtcgcgctcgacgattgtcacgagaatttttggttattgatcaacttcttgcagggagtcaaaaatatagacataccgcaacaagtctattcccttgtacaaaccgcagacaaggcatttgtcgacagggtgttgtttagttttaacacctcagaagctcgccaactgcttattgacgccaaaaaggaggatgttaaaaatctttacgcagccgtgcggcacgccaaaaataaaaaggcgctcgatgaattgcaagaattaatcgccgcagatgccaccgaactccgattccaggaatggttcgaaggtaacacatgggcctttggtgtagaatatataaagatatataagacctcacgtataggcatacactctgatagtgactttattgcccaaagtcttgatcaatacggtaaagagctgctgtgtagcaagctgggatttttcgctatgttttggtggggttatttcgaggaaggttgctggcgattcgcgcaggcgccagaagctcaatatccccttgagggtcgtatgggctggctcaaaaatccagcgatataa

SEQ ID NO: 62211 - DNA, 1077 bp, candidate division TM7 genomosp. GTL1
atggttgattctctatattcatacgacccgaccgaattctttgttggaaaagatgactttggcaagctaactgtccgcgatagtggcactaatggcttccactacttttactcccagcctcgcggattaattaaacagtttgtattggaggtgaagccaaaggtgatgacattatgcgaggtcacgcttatcaagaaagacgacaagtttacaccgcggctacgcttttggaagaaaaataggcagagcggcaaacaagcgactgccaaagctgacgagacaaattataggttaatcaaggcaggtgtcgcgctcgacgattgtcacgagaatttttggttattgatcaacttcttgcagggagtcaaaaatatagacataccgcaacaagtctattcccttgtacaaaccgcagacaaggcatttgtcgacagggtgttgtttagttttaacacctcagaagctcgccaactgcttattgacgccaaaaaggaggatgttaaaaatctttacgcagccgtgcggcacgccaaaaataaaaaggcgctcgatgaattgcaagaattaatcgccgcagatgccaccgaactccgattccaggaatggttcgaaggtaacacatgggcctttggtgtagaatatataaagatatataagacctcacgtataggcatacactctgatagtgactttattgcccaaagtcttgatcaatacgcagatcttattgagttaaaacgccccaacacaccgctacttattcacgataagagccacaatgattactatccgtcaggtgaactatccaaggctataggccaagcagtaaattacctacatgcaatggagggtagccgtgccgagctacaagaacaagatggcattactgtgctgaaaccacgtatcaaaattattgcagggatgactaatggcttcacgccccaacaaaagaaggcgttacgattgattaataacggtttacatggtatcgaagtcataagctatgatcaagtagtcactcgggctcaaaagctaatagccatcttctcacccatcatagagaatagcgatcagtag

SEQ ID NO: 62212 - DNA, 405 bp, candidate division TM7 genomosp. GTL1
ttgcaagaattaatcgccgcagatgccaccgaactccgattccaggaatggttcgaaggtaacacatgggcctttggtgtagaatatataaagatatataagacctcacgtataggcatacactctgatagtgactttattgcccaaagtcttgatcaatacgcagatcttattgagttaaaacgccccaacacaccgctacttattcacgataagagccacaatgattactatccgtcaggtgaactatccaaggctataggccaagcagtaaattacctacatgcaatggagggtagccgtgccgagctacaagaacaagatggcattactgtgctgaaaccacgtatcaaaattattgcagggatgactaatggcttcacgccccaactgggggaggtgtag

SEQ ID NO: 62213 - DNA, 804 bp, Ruminococcus sp. 5_1_39BFAA
atgaatttatataaacgagactatataaagagcgttcctaccaaacaggaaatgcaactgtatgagggtattttgtgtactgaaagaaaagctgtcggagacagaggatttgggaagataaatcataggcgattgtatccagcagcagttcgacactatgatagtttgttccctaacaatcatattgagttgtttgatttccagaacgaaggtaatatggaacaactaaatgaagaattttgtgccttgattcatgatgcaaatacaaacggaagaaacgttcttcgctttattaatcacagacctgcttatcatattattgctggtgtatttaagtattataattttggtcaccacgatgcatatgtcttcccggaatttgctttaggtaagtacattgccgattatttgttgataggaaaaagctctggcggatatgagtttgtatttgtcgagcttgaacaccctaatggaagaacaaccttgaaatctggacacgagggagaaacctttagaaaaggtacttatcaaatttatgattggaaagcagaaatcgaagcacacttttctgcatcgtttgtaacgatcaccaagtacagcaacaaatcctcacttccgaaggaattttcagaatatgattcaagccgcttccactacgctgtggtcgcaggcttgcgtgaggattacaacgaagctacttatcgtgatcgtcgaaacaaagtaacccagcaaaacattctgactttgcattatgataatctgtacgataaagcctgcgagttagaaacagctcaatcattttaa

SEQ ID NO: 62214 - DNA, 753 bp, Clostridiales bacterium 1_7_47FAA
atgaaatcaatacatactttcgatgtttttgctcctactgatgaacaggaagaagcaatgaataaaaaacgtggcgggcattacaggcgcggtaaaaacaaagaaatggattactttattgagtgtgctacttcgctatttccaaacaaccattattcaaggttcacacctatatatgatacgacaaaagagttttatcaactgattacttcttccgatacaacagaaagagctatactaaattggatagcttctaatcgtgcatggaattatttgtttggcttattacggcattattacagaacaggacaccatgacgataattatatctttccagagttcaaaatcgggtcggcttatgtggctgattatctgctcataggtaatagttcagacggttatcaatttgtctttgtggaattagaagctcccaacgggcggataacaaaagaaaaaggtactcgtttcggggaagtaatcaataaagggattgaacaggttagggattggcaaatgtatattgctgcaaattggaatgtaattgtagcagaattggaaaagcactcattctccaatacaaagttacccagacaattatacaaatattgcccttatcaaatctactatgctgtgatagccggactccgtaaagattttgagaatattcgtgatagaaagctccaactgcaaaatgaaaataacataacacttttgcattacgaaaatctcatagatgttgcaaacgaaaattaa

SEQ ID NO: 62215 - DNA, 1308 bp, Rhodobacteraceae bacterium KLH11
atgtgtctgggatatcaagcatttatcgcacttcatgatggagtccttatgataagctttgaggtaaaaaaacgaacagtcgttctggaatacgagccagagctcggaagtcccgcatgggtgacccgtgatctcaagcagaaggggaaagtcaccatcagccgtgttttcaagttcttaccaggagacttgctggggcggtttcctgagagctttgacaaagatgagaatgagacggtacttcgctttcgcttcgccaagaaggaaaagggctactatcgagttctgggtcgcatcctaggtatccagaatgatatattacttgctgaagatgattttgccatagagcggaaactcttcgtcgccgagcgcaatatcaacatcttcaagcacgttgccaaacttagacctagcggagaagaaatagtcgttggaggcagtcaagcgaacagcataccaggggaggtctttcggaaccttttagcgaagttccccaacactggggagatgaacagatatgcacgcgcaagggtagagactgttatcggggactatttcgatgaaatggggagtgcgcgggacagctatgaagcttatcttagtaagaaaaaatcgaccataagcaatgaaccactgccccaagacgagatactccaggcggagatcgataaatacatatatttgtgcgacacgatcagaaattggctcaaaagtgagacgcatcgttcagagattgattggcaaaagatgatcatcaagatcatccttcttattttcccgaagtacatcgctgtcctcgaaaatgtgaagattgcggactactattccaagccgagaggacaaaagactgatcggttcattgatctttgtttggtggatgccgccggaaatattgatgtcatcgagatcaagaaaccattcgataatggagtcttggggaaaaggtgttaccgggacaactatgtcccaacacgagaactctccggcagtgtcatgcagactgaaaagtacatattccacctttcaaaatgggggattgatggtgagcgccagctgaccaaagaatacaaaagagagttacctgaaggaatgtcgatccgtatcactaatcccaaggggttgattattgttgggcgtgatggttcgacgggatcacaggaaggtatggatgcaaaccaattgtttgatctggaagttatcaagcgcaaatatgctaacatgatcgacatccttacatatgatgaccttctacgtcggctagaaaacatcatcgcgtcgcttactaagcgcaaggttgacgccaattga

SEQ ID NO: 62216 - DNA, 855 bp, Candidatus Desulforudis audaxviator MP104C
atgattgtctctggtccacctcctatatcttggggcgattatagcggggccattatccgtcaatggcatgacatcctaagctctgaagacgccagtgatgaaagaattctacaagggttcctcgaggagaacccctgtctcctgccaggaccctttggttggcctgaatctggacattaccccttccccgcagcccttatttcgcaaccacctttgtcaggactagggacgaaaatccccgattttatgtggttggcaacaaacagtggatacctccatccggttttgatcgaaatcgagactcctactaagcgctggttcacagccaggggtggccaacacagcgatcttacacgtgccttggatcaattggcagaatggaaaacctggttcaacaacggtgctaaccaaaggctattcctcgaatactaccaagttccatcaacactacatcgttcaagaacattccaccccttttatgtattaatccacggcagtcgtgccgagtttgaagacagacccgaattagcaagtaaacgtgcccaatttgctcgtgatgatgagtaccacatgactttcgaccggttaacaccaaaccctaaagctcaggatctgatatgcgtaaagaaaactaaccatcactactattctgcgctggctgtaccacccaccttcatactgggcccggcactagcggaataccatttgaatattagagacttagatggcgccattaagaaaggtcgttggattaccgaagaaagaaaagactttctaataagccgtctgccttattgggctgaatatgctagaggtggatcaaaaggaataatacatacgggtgattgggaatag

SEQ ID NO: 62217 - DNA, 1158 bp, Mesorhizobium alhagi CCNWXJ12-2
gtgtctgaagacgatgccgaatactttaagttgcgcaaggaggggaaaatctatctctccaaggtgttcacacacggtgctgtcaatgaacagcgaaggaggttcgctcacgccgtttttgaggggacagagcgtgcagttctaggcgagacggagggtgcactttgccttcggcttacgggagaccagcgcaaaacgcaggtgacggcgctgattagtcaggacgacgcggggatacggcgcgtaacgctccaaacgttcaaatcacgtgctggcggctggtacgaaggctacgagaaggaggctttcactttccgctctgacgagtttgagcggctgttggagttccttcgcagattgaaattcatcgacttgtccaatgaggaacgtttccagattgaagacctctctgaagcggcgggtccgaaaatcatcactgacgctttcgaccgtgcgctaatcggcaaaatcaagaagctcgacgctaacgaacgagagcgacttttccgatccctccacgacaacctaactcaggaggaaatcaacctcttgcttggccgccgacaggctttggagcaattcgacgccacactttcgtcgggcgcatggtcggaaacagaatggcaggacttctttgaggttcaaaattgggttttcggatatggccttgactacaggatcatgcggcagtttgaccgggaaatggttgtcggcgcaggtggaacggacaatcgtgagaagccgaccgtcgatttcttgatgaacttcacggactacacggtgcttgtggaaatcaagcgccccgacacgcccatattccaaactcagaaggcggcgcgtgctggtacgtggcgcttcagcaccgacttcatggatgcaatctcccaagtcctagaacaaaaagccgagtggcttaacgcggcgcagtccggcgagcatttcaacaaagcgggcacaagccgactggaggcgcgtacccgtgacgccaagacaattcttgtcatcggaaaccgtgccgaatttggtcggtctggtaacgtgcgcgaagccaacatcaagcgcgacacgttcgagctatttcgacgcgatacccgttcgctagagatcatcacgtttgacgaacttcttgagcgggcgaacttcatcatcaaggaataa

SEQ ID NO: 62218 - DNA, 789 bp, Desulfosporosinus acididurans
atgatgattacagatgctgtgtttcaagaattaacggaagaggaattagaactatatgaggaatataaggtaaaaagctcaaaaattcatcgtgctggattaatatataattatcctgataaggtcagattttgtactgaactatttcccggtaattatctggatgagaaggtgttaaaaagaagagatgaattaaccgagatgtgcaatcagtttctttcattattgaacaatacacaaacaggtgaaagagatatcttgaactttataagagatagaagagcttatcatttgataggctcaattcagaagaagaattataattttgggcatcacggcacttgtgtttttcccgaatttcagctgggtagttcgtatcaggcagattatcttattctaggaaaaaattctgacggataccactttgtttttattgaattagaaagcccttatgggaaaatttcaattggtagtgggcatgagggagaagtcattaggaaagggattaatcaaattgatgattgggatagatggctagatggaaacttttcgtcattagcggaaatatttgaaaaaaacaaacatccacattttgatctcccaaaagaattttataaatttgacaaaactagagttgaatttgttgttattgctggaagacgtaaggattttaatgaaaatttgaggtggaaaaaaagaaaacttgcagaggataaaaagatagtcttgatgcactatgataatttgtacgattatgctattgaagcaattggtgcaaatacatattaa

SEQ ID NO: 62219 - DNA, 888 bp, Agrobacterium sp. LY4; identical to SEQ ID NO: 62206

SEQ ID NO: 62220 - DNA, 888 bp, Agrobacterium sp. TS43; identical to SEQ ID NO: 62206

SEQ ID NO: 62221 - DNA, 888 bp, Agrobacterium sp. TS45; identical to SEQ ID NO: 62206

SEQ ID NO: 62222 - DNA, 1257 bp, Modestobacter marinus
atgagcggcggcttcgacccgttcgagagtcccggagggaacgagaacattgcggtgacctcggcccagggccggatcgccgaccggacctacgcaacagcgtcgttttctgtgaaccaccctcagtcccgtgacttcggcgaaccggcgcgcttcgtctacaaggtcttcgacaccgatggagcctcagagctcacgagtgaaggtgaccagtggacagtttcggaaacgacgggtggccgtgttcagatcaagctcttagtggcccgcgaggccggtgcggtcaaagagttgtgggtccagaaggttcccgccaacgggtcaacggctgggcttaagactctactcaacctcaagcgcgaggcagcaggagttctcgtcgacttgctgaagaacctggagctcatcccggtcgaaggtgaaacgtcggttcgagtcgacgattcactggttcgtgacctcttcgccaaccccgcctccctggtcgaggtctacaagcgggatcccgaccgattccggcagttgatcactgacgacgagacggctagggacgtcattgccatctcccaccggcggcagcaggtcgaacgctttcgaaagctgctcaacgagcccggctacttccggtctgagaaggctgcactgccgggtcgaggtaccgagcacgtttggcagaacttctttgagcagaacccgtggattcttggagtgaccctcgccgggcagctcttcacgtcctgggacagcgagcgcctgcgccaggctgttacgggccgatccatcggcggcgtcggtaaggaagccgacgcgctactccgcactgcgggacgagttcgtgcgatggtcttcgctgagttcaaaaatcacgatgcatcgctacttgataaagagtatcgaagtggatgctggtctccgtcgcaggacctggccggtggggtggcccaggcccaaggaaccgttcatcgagcggttcaagaaatcggtgaccgacttgccgattcggccgaggacgggagcgacgtgccggggcgcttcacttaccttgttcgcccgcggtcctacctgatcattggacggctagacgagctgctcggcgtgtcgggcggtgaccatcaagacaagatccgttctttcgagctgtatcgccggcaccttcacgagccagaagtcatcacttacgacgagttgctggcccgagccgagtggtttgttgacaacaccgcagtcgatggctcggctcaaccagtggacttttga

SEQ ID NO: 62223 - DNA, 1182 bp, Hassallia byssoidea VB512170
atgtcagtgtttagtcagattgttgattttttaccagaaaaaactgaactgatggtgcttgttaagccatcagaagatgtagatgaagagttaaagcgtttgactgtccgagaaattaaagtgcaaccaaaaaaagctggtgtatatgttccaatttctcttgacgagcttctgaaaattaagtttagcatttcaaaagcaggaaagcttagtagggacttggaacgatgtaaatttagtacccctgttttacctaacgagcaactaaaaagtttgaaccagacttatcaggaaatttcgagactatttgaaaaaaaccgattggctcctggaggtaaagtatacgataacatttacttcaaggataaagatgattgttggaaactattggagattctgagagacagaatttatcagccttttgaagatgaatttgaaaaacagcaaagaataatcaatgagaaagatgatgtctatgtaagaccacttgtggagagcgaaaatttattttttttagaacttgaacaaaaagataaacgaattgacgtattacaatcgcaaaataaaaatttacaagagcaatcacaggaatttaagactaaatatgaaaaaagcaagctattcgcttatcaacaaaagcttgatgaatttaaaaacagattaaaaagcgattatccagagactagcggtacagattcttggcaagagtggatttataagaataattggctgtttggcattcaatatggaagctctattgcacacccacaagtaggttttagaagcattcttgactatttgtttccaactccagatggatttattgacattttagaaatcaaaaaaccatcacatgatgttatcaaagaagataaatcccaccctggagcttttaaatggtctagtgaagtaaatgaagctattggacaagtcgtaaactacttacacgaaatagagttacatcaacttgaaattgccaaaaagcttaagcaagaactttcacttgaattaagcgctataaaaccgcgtgcttttattttgataggaaggtctgatgactggaatgaaaagcataaggaagcttttagaaggctaaatcactcattacacggaatagaaattctaacttatacagacttacttcaaagaggggaaaatctgatgaaagtatatgctgattag

SEQ ID NO: 62224 - DNA, 738 bp, Burkholderia lata
gtgaaaggcttcaaacagtttagctttgataaaacgctcctccggaccgagtgtgacattttgaagaataccctcaagaagggtcaaaatctgtcgctggacgaggacgctcatctttctccgatttttaaaaaatccccgaaccttgtatcgattattgcctcggcattcggcggtgttgcggatcccaacctaattgcatcggaatattggattcttgataaacttcgatgcgacttcgctgttgcaaatttccgccacaagaaattttgcttcatagagattgaggacgccaagcagaacagtatttttgttgagcgcaagccggaccagttcaatgggctcatgggaaagtctccatacttcgactgggcacagcgattcgagcatggaacgagtcagatggtcgattggattcggattttgaaagatgaagagaagactgacaacttccgagcgcattttggttcatcgaacgacttcgaggcagaattcgttttagtgatcggtcgcgacgagttcctcgatgacaatcagagacaacgtcttgcttggagatcgaagaacgtcttaaccgccgggcataaagtgaaaagtattacgtacgacgaggtagtgtccgaggctgagtgggagctcgatacttacggccccgcggcagatgccgatgcatccattgccgacgcgtcggttgcagtagctttggatggaccactgaaggatggtgggtcggcgtga

SEQ ID NO: 62225 - DNA, 1206 bp, Burkholderia lata
atggacgacgaagagcaaattcattataacaagttaccggacaaaacctacattagtccgaggatttatatagacgcacatgaggcagttcggatcgcctcaaaagtaattgactcagacggacttcactatgcaatagtgaaaaaggaagtcgtgctccgacgcaccgaaaaagggcgtactgagatcgtcgcaaagtttctggagtctacaagagacttgcgcgtcctcacaattcaggccttcaatgggcagacaggcacgccacataaaactcatttctcatttgttggcgaagaaattccgaaactgctcgccttcttcgagaatatcgcatccgtcgagtttgcctcgcaggacaaagtcaacatcactgacactgaattgaggcgacttgtcctatcgaaagaacaagctgccagcctagttcatgaaaaccaagacattttctcagaggtgatccggctggagatcacaaaagaagatgtggttgctctcggctatcgcaaacggcaagtttccacgttttcgaggttactacgcgagccagcctacttcgatcaagtaaaggcggctaaaggcgtaaagggagatgaagcactatggcaagcatactttgaacggaatcgatggatattcggctatggccttagctacttcttcgtcacagggttcgacaatagaaagctggagcaagtcgttgaaggaaacgacttgatcaatcgcggaaagcgagccgacggcttgatgaagacgaaaggcattatcagctcgctctgtttcgtcgagatcaagacacacacgacaaaactgctcgagtcaacacagtaccgcccagggtgttgggctccatcgaaggaactgtcaggcgcggtcgcgcaagtgcaaactaccgttgtctccgcgatgaggagcctgagcgaatatatccgaccgaccgacacacacggcgaccccacaggcgaagaggtgttcaactttaaacccagagccttcatcgttatcggttctctcggtgaattcgacaccgaacacggtgtgaacaaagatcaactcagatcgttcgagctttaccgcaacagcatttcttcgattgacatactgacgtttgatgaattgtttgaaagatgcagcttcatcgttcggtccgaggccgagcgtacatctgccgagacgtcgccacatggcacggaaaatggaagttga

SEQ ID NO: 62226 - DNA, 1206 bp, Burkholderia lata; identical to SEQ ID NO: 62225

SEQ ID NO: 62227 - DNA, 798 bp, Paenibacillus sp. P22
atgtcattgtattcgcgagattatacgaaacttaccgaagaagaaagaattacatgggaagcgatgaaacaagatgaaaaaataggcacaggaagatggcggaaaagaagtcgttatagagaatatccgaaggcagcgcggcatttcatgagcttatttccaaacaattttttggatgtcgaagaactgagagaagaagatagattgaaccatctaacggaaaagttccttgttgaactagacaagccggatgccaccgaagcttcgatcatgaggtttataaaacagaaccaagcgtattttataattggttccattctcaaagaccacaacttcgggcatcatgaagcctacgttataccggaattttggttcggcaatacataccgcgttgattatctgataattgggaagagatcaggcggctacgaatttattctcgttgaattggaacaccccaaaaaagacattaccattaaagacggcgaattaggtgcggcgtttcgtaaggggattaagcaaattaacgaatggaaacgataccttgaacctaattttcccacgcttgaagaatcgtttaacaaatacaaacatccgaacatggaactaccccgcgaatttcttaaactagataaaacgcggattcattacacagttgtagcgggacgccgcgaagattttgatgaaaatacttactggattcaacgcaatatgaaggataacgataaaattagtcttcttcacttcgataatttatacgataatgttaccgagatcattggacgatcaacgtattaa

SEQ ID NO: 62228 - DNA, 1173 bp, Burkholderia contaminans LMG 23361
atggacgacgaggcggagatacatcggaaaaaaattcccggcaaaacctacatcagccccgcggttgcgacggccgagggaactctacgcattgcctccaaggtcatcgactcagaaggcctgcactacgccaaggtcaagcaggaggtggtgctgcgtcgcacagagaaggccagaacggaaatcatcgcgaagttcctggagagcgacaggaatctgcgcgttgtgacactgcaagccttcaacggcaccacaggctccccgcacaacacgcgcttctcgttcatcggcaacgagatccccacattgctgcgcttcttccaagatatcgcggcggtggaattcaatggcccgcagaaggtcaacatcacggacaccgacctgcgccggctggtactttccaaagagcaagctgcgaacctcgtgcatgacaaccaggaggtatttgccgaagtcgttcaggcagagctgacaaaggaggatgtagtcacgctaggctaccgcaagaagcagttggccatcttccagcggttgctggaggatgctggttacttcgaccaggtgaagcaggccaagcacgcacacggcgatgaagccttatggcagatgttcttcgagaagaaccaatgggtctttggctacggcctgagctattttttcgtcaccggcttcgacgaccgcaaactggaacaggtggtacaggggcacgatctgttgagccatggcaagcgtgctgatggcttgatgaagactcgcggcatcatcaatgctctgtgcttcgtggaaatcaagaagcacaacacaccactgctggatgcatcggcctatcgttctggctgctgggccccctcttccgaactggccggtgcagtggcccaggttcaaggtaccgtagcggctgcaatgcaaaggctgtacgggttgatccagcccaacgacaaggacggcaatccgaccggggagtctgtcttcaatttcaggccgcgcgccttcatcgtcgcaggctcactgagcgaattcgtctccgagcacggcgtcaacaccgacaagatgcgctccttcgagctgtatcgcaacagcatcgcaggcatcgacatcatgaccttcgacgaactctacgagcgcagcaagttcatcgtcgaggctgcagccatgccaacctcatcgagctag

SEQ ID NO: 62229 - DNA, 771 bp, Citreicella sp. SE45
gtggctgcaagccagagcgcactccctgttcggaagttcgctcgtgaccgcactccacggcgaaagagagtgcagaagatgtccgcttctgcagtcagaccgtgtcgctttcgcgtctgcggcgaaggtccggttcccgcccacacttacggtggcatgcgctgtcgcggcgcctgtgaagcttgggtagaggacggcacctggtcggagcgggagtggcaggactttttcgaccgcgagccctgggtgttcggctacgggctcgactaccggatcatgcgccccttcgaccgcgaggcgactgtctccggaggcggcaccgacaatcgcggcaagccggtggtcgacttcctgatgaacttcacggattacactgtgctcgtggagatcaagcggcccgatacgccgatcttccgcgcggcgtcgggcggcgtgggcggtcgcgcgggcacccgggcgttcagcgcggagttcaccggtgcggtgtcgcagatcctcgagcagaaggcagaatggctggcgttcgccgctggcggcgaacacttctcccgcgacggcacccgccggctggaggcgcggacgcgaaacgcgaagacgatcctcgtgatcggctcccgccgggagttcgaggcggcgggagaccttcgggcggcgcaggtgatgagagatacgttcgagctgttccgccgtgagacccagtccatcgacatcgttacattcgacgagttgctggagcgggctcggttcatcacgcgtgatggccggtcgtag

SEQ ID NO: 62230 - DNA, 1032 bp, Butyricicoccus pullicaecorum 1.2
atgcaatcttcaattattaacagaaagccagcaaaaaataatgaacaaattgaatattgcgaggagactcttttgcacaaatcatctcagtcaaaaattgcattagtaccattcttcattcgacattcagatcctaatcaagagagagatttgtccataaaggttattcactacaaaaaagcaggaccagcatataagcaagattgcgaaatcaatctaaaccctactgcagctggtatgcttaaagataagttaaacgaactgtttgctgtcaggagagtgccggaggaaggaaatttcttagtgatccgaatgggatccgggactaaagttgatctgaatgggctggattcgcacgatgtggcaaaagcggttatttcaattctcgaaaatgaagaaatcacaaaaagcatagatgctgttgatttttcagatgatttggcttttgcattcaggaattccattcgtgtgaaggggctaattaaagcaatgcaagagttggaagaggcacttgaaacagaggatagcgaacagtattatcaggagtggtgtgaagaaaatggctggatttttggcaatcaatatgtcatgaaggatgatgaacgaaaaatctctcgtaacgataccgttgatttgttggctacatcggtcatatctggatttcgtgatgtaatcgagttaaaaaagccatcttttactgtgttgaattacgattccagccatgattcctactatttctctgccgaggtttctaaagctatcggtcaatgccaccgatacctggatgtgttttctgaagatgcagcaaatggattaagagacaaccctgaaattgtagcatatcatccacgagccactatcattgtaggcaggagtaatacttgggaccaacctaagcatagggcattgtacgggcttaatagccgaatgaatggcgtaactgttctcacatacgaccatcttctcagccaaggaaaaagactaattgagatcctgcgaaatgatgagagcaaacatgactttaattattga

SEQ ID NO: 62231 - DNA, 1260 bp, Sphingobium lactosutens DS20
gtgatccggttcgacgtcaagcgacgcagcgtgattttcgaatatgagcccgagttcaccagcgccgagtggatcctgaatgagttgaagacccaccatgaagtgacactaagccgcggcttcacgttcaaagatgacgatctgattgaaggcccggtcgacgttgccgaagacgaaatcggcgaacccgtcttccgcttccgctttgccacgcgccgcagcggctatttccgtattccggggcggattctcggaatcgccaacgacgtgctgatcgacgagggcatcaccctccagcgcaagttgttcattgccgaacgcaatgtcgggattttccggcgcctcgcgaaagtgatccccgatggagccgagattgtcatcggcggagatcgcgaaggcggcatccctgaggacgtgttccgcgagctgctcgatcgctttcccaattctggggagctcgaccgctacgccagcgcgcgcgtcgagaccatcatcggagagcatttcgatggaatgaagagcgcgcgcgaccagtacgagacctacctcagcaagcgaaagtcatccgtgactgatgcgcccctcgcgcaggatcatctcctccaggccgaggtcgacaagttcgtctatgtgcgtgacaccatcattgcttggcttcgatccgctgattcctacaccgagcgcgactggcagaagatgatcatcaagatcatcctcctcatcttcccgaaatacgtagcggtgctcgagaacgtcgaaatcgccgatttctacacctcgcctgaccgcaccagacgccgctacatcgatctgtgcttgatcgacgccgcaggcaatctcgacgtcatcgaaatcaagaagccgttcgacaatgtgttgctgagcaagtcgctctatcgcgacaacagcatccccacgcgcgagctatcgggtagcgtgatgcaggccgagaaatatctgttccacctctccaagtggggagtcaatggggaacgggaactctctcgccgctttgcctccaacctcccgcgctcgatgcagatccgcattaccaaccccaaggcgatgattatcctcgggcgtgattgcggtcccgatggtcaacacgcgcttacagatcgccaactgttcgatctcgaaatcatcaagcgcaagtatgccaatatgatcgacatcctcacctacgatgacctgctgcgccgactggaaaacatcatcacttcgctcgtgaagcggaaagccggaaccgccttaggctag

SEQ ID NO: 62232 - DNA, 1122 bp, Photobacterium leiognathi lrivu.4.1
atggaacgagttagcttaacatcaacgtcttggaaaacagcagttgccgagccaatagagattcgactaaaagacactgttaggctagtgttcgttccaaccgttgttgataatcaaaaagacaaagatgcttgcgttaaggggcactttgtatatcagaaaaaaaagaaattagatagttgggaagatgttcgagaaattaacctttctcaattaaaacctgctgaaggtgtgaaacttgaacttaagtctgcagagttattattccttttaaagaaactagctgatctatatcgaattcatcgtcaagatggtattcaacggggttcgaatcaatatgtgaaacttagtggcgcactggaagggctctgcaatgctactgatgaagatttaaggcagtttgtcgagcttagctctgataatgcaatcggtacattcaaacgtattgcaaagtggttatcctcagtagagcattcagataaagttgtcgaaagtttagagtcgttgtcagcagacaatataaaacaactgaatgttgtagctggacttacagttttaaaaaaagcgttcgaagtttggataaacaatcagtattcaactgatgaagagttttggcaaagggaactaactagtaactcttttgtattgtctcagatattttcattccctgtggttgtggttaaagagaaagcatatataggtggcaagacctttacgaatcaagggggaaacatcgttgattttctttataaaaatcaaatgacgagcaatccagcattgattgaaataaagacaccttcaactcaattgatatcaagcccttaccgtcaaacatataatatgtccaaagaactaacgggttctactagtcaggttcttaattatgctaactctattattcaggattattactcagtagtggggcatgaaactagtatatttggagcatataaaccaacctgtgtggtcattatcgggaatactagtgaattagattctccagaaaagcgtaaagctttcgagttatatcgaaacaacttgaaagacgttcaaattgtcacttttgatgagctatatggcaaagtaaatagctttattaaactacttgaaaacggcaactaa

SEQ ID NO: 62233 - DNA, 960 bp, Propionibacterium acidifaciens F0233
gtgatcaccttcattgataacgaggatgaatttcttttaagatactcatcggagtattattccattgaatgggtggatcaacagcttcgcaacgatggtgaagttgttatttctcgagtgtttacagtcaggatacaggaccttcgaaaaagtgatgatgatccatttgaagaaaacagagtctttgctattggcgatataaaagatgggtatcgcagagttcgctctgctgtactcggactagaccacgatttgctaattgcagcctccatgaagttgaaacgtagctatttcatcactgaacgtaacatctcagtgtttaaggctcttgatgaagtggcgggtaggcaaataataattggaggtgctaggcctgatgcaatcgacgaagctgatttcattcatcttgtcaaagagtttccgacgtctactgagcttaaatattacacccaggccagaattgaaagagtcctccaaacttacctcgagactcgcgggcaggctgaggaacgactcattcagtacatgaatcgcaaggagaaaagaactcgtggttatcggtcgactgattttacaagactggaagccactgatgaattggagctagaaaaatttatctatactagagatagatttaacgaaatgctcaaggatgctgatgcatattccgagactgattggcgtcgtcaggttgcaaaacttttcactctcgtgttcccacgatatatttccgtgttggaagaagtgaatgtcaaagaacgatactcaacactagggggacttgccaatcgttatatcgatatgttgttagttgattcaaatggatcagtcgatattcttgaaatcaagaaaccattttctaggtgtcttgtttcaaaacgaacttatcgagataaccatgtcccagtgcgtgagttggctggagcgattgtacaatgcgaaaaatatatttttacttaa

SEQ ID NO: 62234 - DNA, 279 bp, Propionibacterium acidifaciens F0233
atgggaataaaaggtgagcacgatataaaatctcgttacaaagagacgcttcctgactccattcatatcaaaattacaaatccacgagcatatattctcgctggtagagattccaatttgtcaaatggagaaagatttgattttgagttcatccgaagaggaaacaaaaatatagctgacatcattacatacgacgatttattgcgccgattgaacaacattgtaaattcgattgagaaaaggcttgaaaaacaaggaataaaaagccttaatgaataa

SEQ ID NO: 62235 - DNA, 1062 bp, Pseudomonas chlororaphis O6
atggaattatctggggagggaaatgtgatgagtatagatgacaagttattcgaagaagtgatgcactctttaaagcttgcgcgtgacctgcgtgaagcaagaacaatagactccaatgccattagcgatgcattagcctttaagctttctcgtcactttgatcctgaaggtgatatggaggaaagtctcggagatctccttgagtcagtaaatgaacaaaataagcaagccgttcaggatgctcttgggggatctcacagctttgagttatttaaaagtgagctcgaaaaaaatccggaattcaaaaaagccataaggaatgggcagcaggccaaagaaagtatcgaaaaattaattgaatacatgaaggaaaactatctagacaatgacgcgaaagagtttgcctcactttgcgtcaatgcttttaccgatattaactccatgcttctagaacaggatgtagtgcctctgatcaagagaggtatctattccgaagatttggcttcagctattgcagtctggcaagactccgcaactgaaaaggcagacaatgaacagttctggcaaatggaactgtctgctcgaaaaggaatattggagcggctcatcggaggctatgcattatttttgcagcgcgaatttcatgttggcactacaaacgctgaaggcaaaggaagtaaacgatcggactttgcattgatagatgggctaaataacaacttgacgcttgttgagataaaaacccctaacaccaaacttctgggttctacatatcgcggcacttatccattatccagcgaagtttctgggacaatcagtcaggtcctaaaccaaagaaacgagctcatcatgaatttttactccaagagatataatagtgaaagcgtgttcgaggttttttcaccaaggtgttttgtaatcgtaggaaaccttaaaagcttgggtggagacaaggagaaactgaaagcgtttgaggttcaaagacaggctgtagctgcgcacgtgactatcgttacctttgacgagctatatcatcagttttcaaccttcaatcagatatag

SEQ ID NO: 62236 - DNA, 1245 bp, Pseudomonas chlororaphis O6
atgaacaaacctgctgttgaatttcaatccgttggtgatcagttgcacctgatctatcgtcctcgtgacgacactgtgtgggtttataacaaatttcagcgaggcgaagaactcgttatcaaaggtactttccacctgacgcgcgataaactcgtggtagatgacgcaggcccggttgacgacgaaaaagctcgtgagctagatccagagggaatgggagttctcgacgagatgtcgatggtattcagggttgctacttctcatggcgaatacttccgtttcgaccacgatgtgttacccatcggcgtgcctgtcttactatcgaaacaggcccggccaacgtggaagtggttcagcgccgagcgcaaggtttccattcttgccgtcgtcgccagtcttaaacctagccgtatcgtaattggcggcgcagaattagatgcgatcccgctggccgactatgagcggttagtcgaccaatttccgactcctcacgagcttagacgctacgttcaagcgcgggtggctgcaatagcgcgtcagcacacagatgccatagttgatgccgaagccatgcttcacgcctacgtcaacaaacgcgtccaaatgaaaggtaaggatttcatcgaaccctttcgccaagcggacattgccaagtacgagtttttgctgcaacggctagagcaaatgcttgacgccgaggaaggatactcagaggcagcttggcagcaggagatcctgcagattgtccgcttgctaaatccaaagtacatcgcggcctttacgaacgtcccagtattggattcagacagcagcacgcgacgttacctagatattctcctggtcgacgcctcgggtaacgtcgatgtcatcgagatcaagcagccgtttgataagtgcatcgtcacatctagcgtctaccgcgataaccacgtccctttacgcgatctttctggaaccgtgatgcagattgagaagtacctccgacaccttaatcgttggggaacattaggcgaggttgcgttgcggaatcattttggagataagttgccgcctggatttcagatcaagatcacaaatccctgcggcattgtcatcatggggcgagacaaggggttgtcgtcagcccagatacgcgacttcgaggtgactcgaagacactataagcacatcgccgacattgtgacctacgacgaccttctacgccgactgaagtccatactgaaccaactcaagacaggtatttaa

SEQ ID NO: 62237 - DNA, 855 bp, Pseudomonas chlororaphis subsp. aurantiaca
ttgcttgaagaaaaagttgagcagaaggtgcatgaggttttcggaggccaagtgtctaataaggagttctccaaaaaatgcagttctgacccagtttttcgaaggtttataacagctaccatccgagctcgaaaaagtctcagcgatttgattgactatatagacgatgaagagccagacctgccagctctaagccttgttggccaggtcgtggaggcgatagaggacttcaataacgtcgtagttacagacgacgttttaccactgattgaacgaggcatttacgcatccgacgttgctcgggcactcgaggtctgggcaaccagtcgagaatcgaaaaagggagacgaggggttctggcaagaggaattcgaaagccgaaagggtgtcttggagcgccttcttggtggacatgctgttttactgcaacgcgagttccatgttgcgggtacagatactgctggcgctggagggctaagggctgattttgcgtttcttaataaaacgaacaacatcagcctagtagagatcaaggctccggatactaagttgctgggctcaaaatatcgaggaacctatcctttatccaaggatgtctctggggcgatatcgcaagtgttgattcagcgcaatgagttgatgaagcactactttcaaaaacagcatcgtgcccctgtatcttttgaagtgttctctccacgttgctttttgattgccggaaatctcgatagcttggaagccgatccagttaagctgaaggcgtttgaagttcagcggcaagctgtcgcatcgcatgtaaatatagttactttcgatgagctttatcagcagtttgcaacattcaaccaaatgtag

SEQ ID NO: 62238 - DNA, 1473 bp, Pseudomonas chlororaphis
atgccttctatgcgcccctcgcagataacttttcaatctcggactgacggaggaccattcgtagaatttctactcttcgataatgaaggtattccgaccgatgatgttttggttgcagaacacggtgaggtctacttcagcgacctcaccaaagattttgaaacacctgaaacttggcatcaaatcctgtccgtatctccggatgagatatgcatacacccaattcatcagcgagggggaagcgcaaactatggaactcctaagcacggccctgtacaccaaattttactcgccagacccaaggcccacccataccgcattccaaccaatcgcgacgagcttgaaggtcttcttagctcactgccagatggcttcgcgaaggattggcaaataggcttgggcctactgtgggaataccgtttcatcattgagtcgatatccgatataggtgacatacacaccattgtgatccatggcgaggatggatcggatgacgcgaaaattcacggaagctcgtactatcttggcattgatagatattcggagctgaagcgcagccttgatcgcttgagccagaggcaccaacgcgagacgcggtcagacaagcaattggtttgttacacgggattagcccacgccgcggatccgattcgaaatcctgagcgcccgaagaaattacctgccaatgttctgacggaccttatcaagctaggcagagggcgctcacagctatctacggccgaccaaaagtcagcggtaaacttggtgaaggacaacgcagatgtaatcgccaagaagacacccatgatgttgctcgacctcaaagcggacattgagcgggtaactttaggtgagttagttgagcgctataaaaacctgatgtccgccgacgcaaagaaagacaggtggcagcagtttcttgttgacaacccgttcatcctagacatggctttttcatatccaatcaaagtggtctgcgaacgaccatatgtgggcagtaaacggttcaatgggcgaggcggaaattattcggacttcttagtggcagcaaaatcaacaggtaacgtagcgcttattgagatcaaacacccaaaaaaggatctactgaaaactcccgcctataggaataatacgtacggcccctcaatcgaactgagtggttctgttgcgcagataattaatcaacgggcaagcctgcagagggaaattctccagctcaaagaagatctggaggagccagtacatacgtacgcagttccagccatcgtcgtaattggccgcacaccttccgataaacaccagcggcgctcattcgaacagtaccgaaatgctcttagggacgtatcagtggtgacttttgatgaactgcagcggcgcttggaagacattcacaaggcactttcaccttcagcaccagcgaactccaatcttggtccgaacgctggcgccgaagaggatgacattccgttttag

SEQ ID NO: 62239 - DNA, 822 bp, Clostridium sp. ATCC BAA-442
atggtatacagattaattgttgtcaaattaagaaaggaggctgctatggataccataacaacacagagtaaagggagtaactttgttgaagttaaagacgagtttgttctcgatgagacagaaagaactagaacagtattcaaagcagcaatgcattcgggcggcatccgcagagatataatacgttataggaaaaattctgatggaacatgtgaggaacttatccccgtcaatttcaattcactccatccggatgatggtataaaaataaccttgccaaccgatgcgatacgaattctatttgaaaagctaaaggaattagaagtgatacttcaaaagcgcggaattcgttatgggacacatgatttcaccatcgcagatgcttcaacactggtgatcaacaacaaaaacaaggctaccattattcgaaaactattagaggctgatctaggggaagaggtatggaatcaacttacccagaataatcctgatatagcaactagattggctgctgccaaactccatgaagatagaatcatttcactgcgtacttttgagcagatgctgtctgatgaaaaactgacagagaatgattggcaaaacttttttgaggaaaatatatggatttttggttatggtctccgctatcagattttgcgcttgatccaggcgcaacctaattacggcggagctaccgtttccgggatggggggacaaaggggagactttctgactgctaccgaagctgaaacgaaatttacttgcctaagagtttgtttgaaaaatgcagcatacccaatcggcgggtcttttgctctctag

SEQ ID NO: 62240 - DNA, 825 bp, Anaerostipes hadrus DSM 3319
atgaaacagggagaatatatgagattacaagagagagattatttagaagggttaacagagaaagagcaagaaaaatacagggaaattttagaagaagaaaaaagacgagctggtggatttggaagagtatatatgtttagagagtatccaaaggctgtaagacattgtttaagtttatttcctaataactatttagatataaataatttgcaaaatgaggaattattaaaagagaaaaatcaggagtttagtaaaataatttctgataatgaatgtattgagagaaatattacaaagtatataaataaaaatgatgggtttcatataataggatcaatattaaagtgtggaggatataactttggtcatcatgatgcgtttttatttccagaatttcaattaggaagttctatgagaccagattatttattgatagggaagagttcaggaggatacgaatttatttttgtagaattagaaagtgtatatggaagaattacgactaaagatgggcaattgggagagtgttttcacaaaggaatatatcaagtgaaagattggtcaagatggttgcaagcaaattatgattctttgtttggaaaatttaaagagttaaaaaatagagaagaatgtttaccagaagaatttattgaatatgatgaaagtagaatgcattatgtagtcgttgcagggagaagatcagattttaatgatttgacttatcgaatagccagagaatcatttttaaaagagaatataaagttattacattatgataatttaattgatttttcaaatagtattgttggtgaattgtcatattaa

SEQ ID NO: 62241 - DNA, 1482 bp, Pseudomonas bauzanensis
atggaggatgaagtggccggttcggagaaggaagatacctataccagtgcgcctatcgacgccggcacccatgccgaagacggttccttcctcgtccttgagaccattcccgatggaaagacccagtatctaagctaccatctcagcgagaaggcctatgacagggcgaaagcggctggagcagatatgaagcttttggatgacgcgtccgagcctcacctgctggcggaatacagcttcgagacgaaagtcctgaccacctatccgatatggctccgctcgaaccaaacaaatttcctcaagcggaagtatgggaccatcgccaggatatcgttcgaggacgagcgtgagatggccgtcgataagcacataggcttgttttttgacttgccgacaggatttcaccgcaagccgttcgaggggtttggcgtcgatccccgcatcaagtacctcatcgacgccttccgcaacctgccgggcatcgtaggcatcacgatatgcgaggacgaccaaatctcggtcaacggcgaggacgtgcggcttcccgtccacatcttcgacgacgctcgcctgaacatcaaccgcgcccacgatgccgctcgcgatttcgccaacggcgagaagatggcttacctcaagaacctcttcttgccttacgtggttccgggatacgaacccgatgatttcgagcggcccggaatcgacctgcaggatacagtccggtcggctctggcgaagaggggcatcccgcggtcccggaacaccaacaacagcgccgctgtccggaccgtgatgcgccaagtggtggaaatcgcccaggacgatccggtgcagctcttcgaattgagcgaaaagatccagttggcctccctttccgcgttgatcgaggacatgaccaaggaaatggccaagggccaccgcgaagcgttctggcagacctatttcgaggagaacccgttcatcctaaaggtactcttcgggttgccggtggttcactataccagccaggcgacagtcggcggtatggggctgaagcggaagggtgagaagcaggccgattacttggtaaaagccgggatgctgggtaacttggctattgtcgagataaagacgactgagacgcctctgctgaccaaggacccgtatcgtccaccccatctttatggcccgcacccggaactgacaggcggcgcgaaccagctagtcgaccagaagcttcggcttatcaagagcattgcagctaagaaagaagaggaggaggaggagccgaacatccaggcatggtcggtcccgtgcattctgattattggcaggctccccgagaaaaagaacgagaagcggtccttcgagatataccgtggcagccagaaggacgtgctcatcatcacgttcgacgagttgctggcgaagctggtggccctgcacgaattcctgacgaccaagccggaggaggtcgacgaggatatttcgaagctcgtttaa

SEQ ID NO: 62242 - DNA, 753 bp, Lachnospiraceae bacterium 3_1_57FAA_CT1; identical to SEQ ID NO: 61828

SEQ ID NO: 62243 - DNA, 777 bp, Lachnospiraceae bacterium 7_1_58FAA
atggataccataacaacacagagtaaagggagtaactttgttgaagttaaagacgagtttgttctcgatgagacagaaagaactagaacagtattcaaagcagcaatgcattcgggcggcatccgcagagatataatacgttataggaaaaattctgatggaacatgtgaggaacttatccccgtcaatttcaattcactccatccggatgatggtataaaaataaccttgccaaccgatgcgatacgaattctatttgaaaagctaaaggaattagaagtgatacttcaaaagcgcggaattcgttatgggacacatgatttcaccatcgcagatgcttcaacactggtgatcaacaacaaaaacaaggctaccattattcgaaaactattagaggctgatctaggggaagaggtatggaatcaacttacccagaataatcctgatatagcaactagattggctgctgccaaactccatgaagatagaatcatttcactgcgtacttttgagcagatgctgtctgatgaaaaactgacagagaatgattggcaaaacttttttgaggaaaatatatggatttttggttatggtctccgctatcagattttgcgcttgatccaggcgcaacctaattacggcggagctaccgtttccgggatggggggacaaaggggagactttctgactgctaccgaagctgaaacgaaatttacttgcctaagagtttgtttgaaaaatgcagcatacccaatcggcgggtcttttgctctctag

SEQ ID NO: 62244 - DNA, 753 bp, Dorea sp. D27; identical to SEQ ID NO: 61828

SEQ ID NO: 62245 - DNA, 684 bp, Stenotrophomonas daejeonensis
atgccctatcaacgatcaccgctattccacaagcactacgagcattacaacctgcccccgtacggcaacttcgtggagcagaatgcagtcacgatcgcccaggtggagcaatacgacaggctcatcgccgagcggagcggggaaacggttctggatcactacatccgcgacaacaaggaactgctagtaaacgccctcgatttcgtctccaccggccaccagggttcatgggtgttcccgcagcagcagatcaagacggcgctccgcggggagggaaccggcctgattcccgactacctgctttgcggcaaaagttccgacggcctcgcctggtgggtggtcgagttcaagggggccgatgagcaactgttcaccacgggcaaggatggccgcgtttcattcagcgccaccgcgaacaaaagcatcctgcaattgcttgagcacatcgatttctgcaacgagcatcaatcggcactgcgggaccagctgaagctcacggatttcagggagccgcgtggaatgctcgtcatcggccacgaaaaggaattggagggcgacgaacggctccgcaagctgaaggccgcatggaaccgcctcgtcggtgggcggcttgaaatccgcacgcacgatgcgcttgtacgggcagccaggcacaaggccgaattccaccgcaatttcggctga

SEQ ID NO: 62246 - DNA, 798 bp, Paenibacillus sp. D9; identical to SEQ ID NO: 62227

SEQ ID NO: 62247 - DNA, 1644 bp, Pseudomonas sp. 2_1_26
atggataatctgaaaacacgaatcgtcaattcatacaatgacctgtcagcggacgctgactcattttcggagtcgagcggaaagtcgcgaactgtggtggagccagtgctcaggctgttgcgcaaggcgttactcttggatatttccggtggcgaaaagcgagttcctgatgctgatgaaatcaaagactgggtgctgaaactattcgcgaaaaatcccaccgttggtgacatggtgcgagcccttctattgattaaggaggatctagttgttagcgagcaccaactgccttctatcgaagaggcactgcgcgaaatcggcctattggagcagctccacttgccagacttcttcttcgtttcctcggagttggagggagagccttgtggtgtactgttcgaacgttatgaatcggacggtgaagtcctcgtgtttctggccactctcttcgataagaagaacctaatgcaaaaggttggcaggatggcgattcgtgtcagcaaagagtctcctgagcctttcttgtccatctgtaccccggacggctggcttagggtgccaaaaaatcagatcgtgccgggttcagtcagttccttcacggtccaatgcctgcttgaatataagtattacatttatcccactctgcccttgagctccattattgctcccgaattgactaggagaaaggataacattcatttagtaagcctgataaaagaggcttatctggacaaagtagtttgcacacgagtccgcgttcccctagacgtcgtgcaaccacgagacatcgactatgcactgcatacgccggatgagcagatacgagattgtatgccttatgcggcacatactgagttcctgctatacgaagaggatggagtgcttatcatggatgatgactataccccatatttagcctgccaagcgctcagggtcaaggaagtcacagcggtcatcttgggtaagtttaaccagtcgcgggccaaagttctttccattgggtacagcgagcttatgcctcccatctccgtttcacccagtgcacaccagtcgcagaagcgccttagagacaagcaagagcttcttaagaaaaaattacaatccctgaggccttccttcctcccggcggcaaaaatggagaggagtttcattgagttgtgctggttactgaacagggttaaaactcgggaaagagatctacacagattcctgaaggaaaattaccagatactggactctcacctggcggcaatcttcagcgaagtacccataggcaagtatcgggcagacctagttctgcagtatcaccagtctgacaagcgtgtggtgctggtcgaacttgagccacacgataagcaaatttttaccaaaaaaaatcgccttaggcaccaggtgactcatgctctacagcaggtagaagattggatacaggaaatacatagaggcgtacccaatataccaggctggcttcagggaagttacactgcagaaggcatgatagttattggacgctcgaaagacctgacagaagagcagagggaaactctcgcgctgaagaatgccaaatccagcatcaagatactgacctacgatgatttgctggagcgcctgtctcggcttataaaaacgcttgacaaggaatag

SEQ ID NO: 62248 - DNA, 1413 bp, Afipia sp. 1NLS2
atgaagttaagcttgagcgaagttcatccggggtgcgtggcagtcacgtgcgaggccgatcgcgaaacttaccgatctttgaacccggactactcgccatccgacccgctacccgtcaaagaaattctatggttcgacgcgaccaagtcgacgatcatcatccgccccattagcacctacccatcgaaccgatacttcgaagccaagtatgatcagatcgaggagatcgtcctggagggctttgacgtgaacctcccggaagatgaaaacggagtacacgaagcactattctatttgccgaccggctttatcaaaagcattgatggcggcctaggctttccgaaagaataccattcgatcatcgacagcgccgaggagatcgacggcgtcacgagcttggtcatcacgaaaaggggaccgacccgcatcgatgaaccctgcttctatctcgcctatcgggaatttgagaaattacgccttacgttggcgcggatcacccgcggatatcaacgtgaaggcaggattgatcgagcaattgaagcccacaacgcgctgctgacgacattagacgcgcatcggtttcctgcaagacaacgtccgctcaaaaaggacgccgtattcaaactgcttaccgaccgcgatcccgccaagtctgacctttctaagggagatcgcgcaggcatgatctctgcccttcggtctagcgcccccgcactcgcggctgaaaagccgcaggtgctctatgagcttcaacgcgacgtcgaactcgttagcctcgatgtcctcatcgtccgctttcgggagatgttagagaagaaattgcctgagagcgcatggcaagagctgttcgcttcaaacccgttcatcttgtcgatgctatttggctacccgattgtggaggtcctcggtcaggcccatgtcggaggcacagctttgacagggcgtagcggcaagatcgctgactttctaatcaagagcgagggcaccaacaacgcggccctggtcgagatcaagactccacggacgctgctgctgggaaaagagttccgaggtggggtttacccggcgtcgaacgatctcaccggctcaatcgtccaggtcctcgaccagcgctaccaattccaaaagaatatcgctcagattaaagatgcgaccgatatctccgatctcgcatcctatgccgttgattgcgtcgtcgtcgcgggaacgacgccggcaagcaaggccgagcagaaatgtctggaactattccgtcgcagcatgaaggacgtgcagatctacacgttcgatgagcttctccagaaaatggtccgcctgagggactttctggcaagcgacgaaccatcggcggaagcttcggaaccgctcggtccttcctgccttccgccgccgcccgagccgatcgaggtctga

SEQ ID NO: 62249 - DNA, 648 bp, Leptotrichia sp. oral taxon 225 str. F0581
atgaagaaaggtaaaattatgacttggaatatagaggaagtagaaagaaatttagaaaaagcttttgatgaaaattcagaacaaaaactattagatttattaaaaaagaatacatttttattttatgaattagttgaaagaaaatatacaatgcaaccaatatttcatgaagtagaatttggtaataaatatagatgtgattttttatggctttctgatagaagtgactatccacaatgggtattagttgagatagaaaaacctcaaggaaccttatttaatcaaaataaaagtgtttctaattatttaaaaaaaggaatagaacaagtagataactggagaagatattttgctcagtatcctagtgaaaaagagagaatatttaaagcaaaaaatttaaaatttagatatatattaataataggaaataaagaagaatgggaaaaaaccgaattttcaaaaaattggcgtgcatataatgacgaaaagatagaaataagaacgatggatgtatttaaaagagcaattgaaaatttaaaaaaaaatccaaaagaatttttttgttttgaagaaaatcctattacaaaaaattcaaaagaattagagaaatatatagaaaagaatagttttactagatttttaggataa

SEQ ID NO: 62250 - DNA, 1488 bp, Propionibacterium sp. oral taxon 192 str. F0372
atggctcgattcggaaacgatcagacgaacattggtcacctcgacgttcgcacagtaggtgagggtagtcgagttgtggcttttttcgttcctaccgaactaccgcatgaagaatcctcggcacgtcggcgtttggctgagggtgtgaagctcgtggagttcgacgctgagacaggtatcctgaagatacatcctattaacacgctccagggccatggtgactatctcggtccgaagtacacgcgagtgcataccctcaccttgaatgtcgcgttgttggatcactacagctctgggttatttgatagctctgagttattcgatagctctgggctattcgatagctctgggctattcgatagccaactagacgaccacgacggagactaccagttggagttggagtcaatcttcgaagcactgccgtatggattcgtgaaagacttcaattacggtttgggcctacttaaagacctcaaccggatcgttcgcttggtcgaggacaacactgcgtgcgacgaaatagtcttcgtcgatggccgaagtgccgccgtcgatcacactgagttccatcttggactcgcacgctttgccgatatctgggcggaaatacgtaggatcagtgaccgagggattcgcgcaacagctcgggtgaaggatgccttcgttcacaataatctttctgctgacctggacctcatccttgcggaaccatcgctcggaagacaccccaactcgcgcacgatagcgaaagccgccagcggcatcgaagagctgagtacagtggaacgcgaggcgctggtcgacacggttgcttccgaatcagcaagcctagcggcgcattcgccccagaagttccaacgactcaagcgcgacattgaactcgtcagtcttgatcgactcatcaagacatacgaagactccctgagtcagaacaagcctgagtcctactggcagtccttctttgatgacaacgcctttgcgttgcaacaggtcttcggagccccgatggtcagtgtccgctctagcgcgaatgtgggtggtacagggctgtcgggtagcggcgacaagatcgcagactacctgttcaagaactcgctcacgaataacgtcgctctcgttgaaatcaagaagccgaccacgcaactactcgagggccgagagtacaggcagggcgtgttcggcccatcgaaggagttaaacggcgccgtcgctcaagtgctggaccaggcgtacagcctgacgaaaaacctcactagtctgaaggagagttcgcgacagtgggacctggagtcctacgcagtttcttgcttcgtggttgctggacgcacccccttagccagcgacccagcgagacagaagtcgttcgagctgtatcgcgcgaactctcgcagcgtgacgatcgtgacctacgacgagattcttgagcgactgagactccttcgtgagttcctcacaccggcttctccatcagccgaggaggtctga

SEQ ID NO: 62251 - DNA, 1266 bp, Pedobacter ginsenosidimutans
atgatggcaaaaacaaatgctctagtggcagcggaatatgaaagagcgacaactacaaccaaaaaagtatattattttaaggatgaggaatataagatagaccaaatttcaaaagaggtttatttaaatgaggatacagagatccactatccaacgccctttcgcggggatgataagtacaaaaccataaagaaatttgtttttaaaggttttaagaagaaattgccaacaggggtgtacaaagtttcaacattcggttatggctttaccaagccgctgtcgcctgttgttgcctatcttcatgcgaaccatgacttcacagaagtagttatcgatgctgatggaaatgaccaaatggatgtcaaaggtaagcgtctgtttatttcaggtgcaagtcttcaaaaattgtacgctactttttctgccattaacggcaaacataaagaagaaaaggaaagggctgctgtgcaggaactcaatcagctatttcctaccgttgttcctgctcctgtaaaaaggtatgtagcaggtaccctttctgagtggggaagttcgatagcagagtttaatgatgccgataagaatgcaattaaggatctgttcgataaactgacactgcttcccaactttttctccgaaaccaatcttatcaagaccaaggagataattgacaataaatttatccagtcagctttggtagggtttgatgcgctgttaaaggcaacaagcgatacccctacattggaaaagaaattccagaccttcttaaaggaaaatagctggatattttcaacgctctttgcccagcccgttatactccatcaggacgaagcttatgtaggcggaaagaattacaaaaacaaaaatggcaaatacagtgattttttgatcaagaatggcctgagtgacaatgtttcctttgttgagatcaagacccatttaaccgaattggtggataaaaagccgtacaggggcgatgatgtttttgcgctttcgaaggaacttatgggctgcatttctcaagtgctcaatcagcgtgaccactttcaaaaggagttttatgcccacgcttacaaaacaaaagatgtagaaacattcaattcaaaagcgctgatcattattggtaggctatcagttctttctgacaagcagctgcatgccttcgagatgttccggaataactgcaaggatgtggagattatcacctttgacgagttatataggaaaatagaaagtttgttgaagataatgacaggcaaagtttaa

SEQ ID NO: 62252 - DNA, 1116 bp, Aggregatibacter sp. oral taxon 458 str. W10330
atgaagatattagattttgtttttgattttggtaaaccatcatttaatggaactggaggcttatgtcgagtacgtacatacgtagcgaaagacagtaaacccgttacttttttaactgagttggataaaaatgatggtcaatctgtaacaaatgctgttgaatttattatcgataaactaattttagatagaggatttaatgagcatgtttttatagaacattatgaacgaaataacgatatattgtttcatgatacttttgatatggtatttattgaaaataagaaacctaagtggaatcagttgagtaaaattgaagttgaaaaccttattggtaaggatgattttactgacttaaaaaatgatagatcatcaaaaaatgaaagaatattagagcaagctgatagcattagattcaaaagaaatccgtggattgattcgccatatcaaaagagtaattcttttattcaaagaaagttatcaattgaaaaacaaatgaaatctaaaaatgatcttatcaaattaattgaaagtaaatgtatagagcaagatcttctggcctttctaaagcaagatttatcattttttggagaggtatattctaatcctgaagatgaatatattgtattttccgagtttccaattgaaaatggttcaaaagataaaaatggttctatagattttgttgtatttacaggtcggagccgaatggatgtaatattaattgaaataaaaggagcgaattttaatttatttaatcaaaatggatattgccaacctcacgcagatatttcgaaggcttcccagcaaatacgagacagattacacgcggtctattatgagaatatgcctagctttaaaaaacagtgtcacatttttagagatgaggctgaaaatggcaaatccacatttaaaaattacttagtaggagcagaaggaaagctattagtagatccaaataaagaaattaaaattcgaactgtaattattggaggtagaacacaagatgaccaaaaagaaagtttggaaaggcataagttcgaaagatcacagactatacctattactttagaatcttgggatacgtggattagaaaattgaaacgagaaaactaa

SEQ ID NO: 62253 - DNA, 576 bp, Leptotrichia sp. oral taxon 215 str. W9775
atgttaagagataaattagatgagaaagaagaagagatacataattatcttaaaaaaaatgaagaaatattaaagaaaggatttggaaaatggacacacaataaagtaatttctaaattaactttaggttctgactacgaagtcgattttattgtaataagttatcaatcagctactttagagataagtttaattgaactaaagcgagcaaatgttaaaatatttaataaggataagacatattctaaagatttgaataaagcaattaatcaaataacagcttatgaagaatggattataaaaaatgaaaaaaaattcaaagaagaattaactaaaagaataaattcggattctgaaaatttatttgatcaatttgaaatctatatttctaaatatattgtaataggaagaaaagaagaaggtaaagaaaaagaaaataaaaaaagggcttatattcataaaatgcagaatattgatattttgacatatgaccgattaattaaaatagaagaagaaaaacatagcactcggataggtgaaaaattaattgaagaggggctgtctcaaaatggttaa

SEQ ID NO: 62254 - DNA, 1212 bp, Lachnospiraceae oral taxon 107 str. F0167
atgaatgttaacgaaattttaaatggtatatcaaaaatttattggaagaaaatgtggaaatatataagcgataatgaaatttcacctaaagatgtcaactgtttaattttaaatccagaatctataatattctattttggagaaaagtatatagcaatagaatattgtgggaaccaatttttgagcaaaatatctaatgaacatagtactgtagttaaagtaagagattatacaaaagaacatttaacaaataagcaatttttagataaaataataggatttgaatatgatggaacaagtagtgttcatttttcagtaacatcaggaatgtatgaggacttagttgttccaacaaataaagggattgagaagttattagatttaaaatggaattttgaggctcaaagtagtattatgggcattaatacaaatggattagatattgccgataatcaatttgttagactaatcaactgccgtttttttgatgagcataatggtgatttaaagacaagaattattaagtggatagatttcatcccttgcgtatatgaagaaccaaaagaaggagactttgatattattaatgtagatattaaaatttttgatagattatggaagtcggatttgaaatataaatatcctagaccaaatgattttaaatatgctaaattgcctcaaattaataaatttatagaaatattttctgattcaaaatatagcgaacctgaaattaccggatttttagcagaagaggaaaataaatttattttaagaatggcttttatgggaactgatatttataatgaagtgatttgtaaatggcaaagtgaaaaaaaggaggatttaagaccagatttttttgttaaaagggctaatggatatgctgatattgtggaatttaaattgcaaaatgttagaagtaagactattgtagggagggcaaatagagaacattttagttctgaaataaatacatacattgctcagactagaaagtattgtgtatactttgatgatcccaataatagaaattggtttgaacgtgaatatggttacaaagtatacaaacctagaagatatctcgtaataggacgcagaaatgattttgcttcagatgagtgggttgaaataaaatctgattatagtgatttggaattaattacatatgatgatcttgttgatacagttatgtcacagttctatggttag

SEQ ID NO: 62255 - DNA, 1353 bp, Rhodococcus sp. JVH1
gtggtgagatacagcagtgaccaggacataaaggccgaacttgacgttcggcgtcgtgataatgaggtggacggattcttcgtcccactcgatactccaaccgacgatcctggggcttccaatggggtgcggatactcaacttctcaggggacagttcggagctgcgaatcttccccatcaacacattcccggacaaggagaagtacctccagtcgaggtacccggtaattcgcacgttgacgattgccttgccggatattgacatcgatgatgttgatttcacggagattcttgagtatttgccgaacggcttccgcaagacctacaaatctggtcttgggctactcaaggactgcaatcgcctcgtacgactgatcgaggagcacaccgagtgcgacgaaatctactttatgggagggacgacagtcgcagtggacgggaagcagctgctgttcggcctggatcgcttcgaggcgatcctttcggagatccggcgaatcaacagccgcggcaatgacggggctggacgcgtcaaaaatgcattcgttcacaatgaactggcctccaccttcgggcttgagccggcggtgtacagcctcggccgccatccggtgtcgcaggtgctgacgaaggcggctggcggtgtcacggagttgaccaagcaagagcaggacgcgctgctcgacacgtttgcatccgagtccgcggtactggcgcggacacggccggagtcgtttgtgaagctccaccgtgatgtcgagctcgtaagcctcgatctgctcattgcgtcctacgaggatgcaatggctagccgtaagaaggaggggttctggcagaacttctttgacgacaattcttttgcacttcagcaggtattcggcgtgccaatggtccattttcagtcaagtgcaagtgtcggtggtgtcggattcgacggtagcggagaaaagatcgccgactacatgttcaagaacccgctgaccaataatgtggctttggtggagcttaaaaagccggcaacatcgctgctcaccgctaagccgtatcgcgggggtgcgttcggcccgtcaaaagaactcgccggcgccgtgacacaggtgatggatcaggcgaatcgcctgatgattactttcgcgagtaagaaagtcgcctcgcgggtgacaaatctggaggcgtacgcggtgtcgtgcttcgtcgttattgggcgcaccccctcctcggatgacgagaagaagtcgttcgagatgtaccgaggaaactcgcggagcgtgaagattgtgacgtacgacgagatcctagaacagcttaagatcctgcgggatttccttctcccgccagacaaggatcgctag

SEQ ID NO: 62256 - DNA, 822 bp, Sporosarcina newyorkensis 2681
ttggatggggtatgtgatgtgaaaatatattcaagagattttacagttctaacaaaagaggaattgaaggaatgggaaatcttaaaggataaagaggttgttcataggtcggggaattttgtcgttaggagaagtaagtatagagaatatccagccgcagtaagacactatgaaagtttgtttcccaataatcatttggatatagtcgatctacaaaagatagaacagcttacgaagttaactgaaaaatttcatcaaatgatagacaatcctaactcaaatgaaagatctattctcaattggattcgtgaaaacagagcttactttataatcgcatctatcatgaagggcccttataatttcggtcatcatgatgcatttatttttccagaattccaattaggaaatacatatcaagttgattacctaattgttgggaggaattctgggggttatgaatttatttttgtagagttggaacatccgaataaaaatattacattggctgatggtcatttaggtgatgcaattagaaaaggagagaggcaagtaatcgactggaaatactggttagaagcaaattatgcaacactttatgaaacgtttaataagtataaagatcccaagaagttgttaccagttgagtttatgaaatatgacagtacccgtattcactatgctgtaattgctggaagacgaaatgacttcaacgaaaaaacttatcaattaaaacgacaaaagttaacggaaggtatcttattactgcactatgataatctctatgattcggcaatggcgttaattggtgaatctacatattaa

SEQ ID NO: 62257 - DNA, 1245 bp, Bifidobacterium stellenboschense
atgaccactagcattagatttattgttataaacaacaatataatacttgcctattctccaatcaatggaacagattggattgccgaaagactgtccaacagcggcattatcaccattgcgcgaactttttcatttgcagcagcagataaatataatctggaagacactcctgaaatcaacgatgaatatgacgacactgcttatttcaaaatcggaacaatcgagggagagtattataaaatcaatgcgcacatacttgaacttcatcatgatttactaatctccaacgacattagactcgaaagaaagctatttactaccgtagacaatatatccatattcgccaaaatagacagcattatcgatgggccaattattatagggggaagctcggaaaacgcaattccgaagcagatctttctcgaattgctttcgcagttccctacacgaaatattttacgccggtattctgaggcctgcatagcacgagcgatatcggattacattccctgcaaacctgatacagagcaacgacttgaggccgcttggcgtaggatacgcagaaaaacaacagtccccactaccccagcccttccctcaacgcttacggagatggaaacatcaaaatttgtctacatccgcgatacgctgaaagctatgctggccgacgcggacagctatcccgaagcgacatggcagactgaggtgtcaaagttattcttattaatttatccacaatatatcaccttaatcaatcaggtcaccatacctgattcaatatcaaccgagtcgtcgcaacggcgcattgatatgctcttggtcgatgcaaacggctttatcgacgtattggaaatcaagaaaccgtttgcacattcccttgtcagaagaggccgctacagagataactatcttttagggcatgaaaccgaaggtgcaatcatgcaaacggaaaaatatcttcataatcttgttcggtggggagccagcggggaacagttattaggcaccaaatattcctctcaaatccccgatgatatgaagctgaatctgacaaatccaagaggaatagtcctgataggacgcgacgatttatcacaagaagagcgtgcagattttgaaattatgaagcggcgctattccgacatatccgatatcattacctatgatgaattattgaaacgggtcgacaatatcctcttctcactcaatcgacatacagccgctcctttgccgacaaaacaatag

SEQ ID NO: 62258 - DNA, 555 bp, Opitutaceae bacterium TAV5
ttgtccgcatgcctgcatgggattgtttatccgaaccaggtgatcagccagtttaagtttgggaccgattttgtggcggacttcgttgcttttggtgcgttctcaggcgcctgctgtttccatttcgtcgaactggagccgccgggagagcggctttttacccagaacggcgttgccgccaaacgattcaacggtgcgctcgcccaaatctcagcctggaagatcttcgtggaaaagcatcgggaagaggttctccgagagctggccaaggtattcagccagcgggagctggtcttcggtcggaaaggagaggagccaaccgacaccaccgggatgccactttacgatccgtgccaatggatcgtatgggactatcacatcgtgatcggcaggagagactctttatctaaagcggaattagggaaaaagtccgcttatctgacccaggccgaggtggacgttatgacctatgaccgactgctggatcaagccagggcgttcgacgaagagcccgaaaccgggatgcacgatcgaccgcgtgcaagaggcaggtaa

SEQ ID NO: 62259 - DNA, 408 bp, Candidatus Brocadia sinica
atgataatactggaaccgcataatttagaagagccaaaaccatcaaaatgtgcaatgaaatgggatgcatatactcaaattataaataatgaatggtcaaatcttttgtcaagtactcaagagaaagagtcagaatatcagagtttttttgaacgtcatccttgcatgttgcctcgcccatctagtttacccgatgctggtactgaaccatggatacctgcgctcatttcacagcccatattaccatcatacaattataggacaccagattttatgtggatatctataaatagtggtgggttatacgcaattttgattgaaattgagatccctacaaagccttggtggacagataaaggctacgcatcctcaaaattaacggaggcacagaatcaaatactcgaatga

SEQ ID NO: 62260 - DNA, 798 bp, Kibdelosporangium phytohabitans
atgggcttcgccacgttcgcgcagacgctggtcgaccggatcactaaggtgcgtgaggctaggcggcagcgcaaccttagcgcggccgagttgggccgcttgctcgccgagcgcaacgtcagcccgactgagctgggtcgcacaattgccgggctcgccgacgtgggcggtgtggtctcgggcatcacctcgaccgatgagggacgcttggcggtggatgtcgacgtcatccgccgacgccgcgaggcagtcgcggaactgcgcgagctcgtgctgaacccagcgaccaccgaagccgagatccagaagatgatcggccgtaggtactggatatttggtggtcactacacgggcgtactcgatcgccgcaacgccgtcccgctcgaccaacacgacatcccactcgtctgcgccgatcgcagtatccacatcgtcgagctcaaacgaccaggccatcagctcgtcaagccgcaccgtaaccacttgatcgtctccaacgaagttcacgaggcagtagggcaatgcatgaactacatccgcgcgctcgacgagctgggcgcaggtcttgagactcttcaccgcaacgaactcggcgtggtctacgactaccgtcgtgtgaaaggcacggtggtcatcgggcatccggagctatgtgcgacagactcagtggccggtgaacagatcgagcagacgatccgttcctacaacgcacacctgagtcgcgtgcaggtcctcacgtacgcggagctggtcgacagcgccgaacgagcgctgcagttcgaggccgaggagcactga

SEQ ID NO: 62261 - DNA, 330 bp, Kibdelosporangium phytohabitans
ttggtgaagttgcaccgtggttttccgatcacgaccgacgaggtgaaccaggcctgcgcgcaagtcgcgaactacctgcgtgcgttcgacgaggacagagtcggggtccctacccggcatggcatcgacgcgagacgagcgagtgccacggtggttgccgggcaccccatgtacgacgtcgaattcaccgagcagcaggtcgacgaggtccttcgagtccacaacgccgaccgttctcggactgaggtcgtcacgtacaaacagttgatcgacagagcccgtcgtgcgctggaactcagcgcgccgaccgaagtcgagccagccgtgtag

SEQ ID NO: 62262 - DNA, 636 bp, Acinetobacter sp. OIFC021; identical to SEQ ID NO: 61554

SEQ ID NO: 62263 - DNA, 678 bp, Pseudanabaena biceps PCC 7429
ttgaaaccgcttgattctttcaactttgacgtaagaagatgtattactgaacttaatgagtttgaaaagcttctcgataaagaagaacttcgagaagctcaagatgtattaccattttttagaagtaatttgcatttatcggcatttatcgcttcttatgtagcaggaatagtgagatttgataggattaaacatgaatttgccgtttttggcgattttcgtgccgatctagttgttggggactcggttaatgggacttactgctttattgagtttgaagatgctactaaaaatagtatttttatcgaaaaggggcgaagtacttctgattggtctcctcgatttgagcatggctttagccaaattgttgactggttttggaagcttgatgattttagaaatactgcccaatttcgtgctgtttttgatagtgatagtatcaatttttatggaatgctaataatcggtagagagtctttcctgtcacctatagataaaaatcgacttaaatggagattaaacaaggtgttgatcgattctcaaaaaataatttgcattacttttgatcaattagctagagatatcaaagatagattatctttatatcaactaagttatgagtcagattcatttacggaaatcgattctgatttattagatatagaggaagatgcttaa

SEQ ID NO: 62264 - DNA, 1263 bp, Bradyrhizobium manausense
atgatcggctttgaagaagacaaccgaggcctaattctcgaatacaaggtcgagaacaacgatcctgagtgggcctccagaaggctgaaggacgacggcgaagtcaccgtcagcagcggctttacctttgaatccgccgacctgctgacggctccttcgaagaggggcgccgaggaaccagtataccgattccggtttgcgacgaaggaagcgggctattttcggattccgggccggattctgggatgcgatcaggatgttcttatcgccgatagcggcatccgccttgagcgcaagaccttcgtcgctgaacgcaacatccgcattttcccgcgtatcgagaaggtgaagcaacccttcggcgagatcgtcgtcggaggttcgcgacaggacaggataccggtcgagatttttcgcgagcttctcgcgaaattcccgaactcgtccgagctcgatcgctatgccagggcacgcgtcgagtcgattgtgggagaggtgctcgatggcaacgcggctgcgagagagaaatacgaagcctatcttgcccgccgaggctccgccgtgtcagccgctccgctggagcagcccgcgctcatccaggccgaaatcgataagtacgtgatgttgcgcgacaccatcttggcctggctcgccgaggcgacatcttacagcgaaaaggactggcaaaggctgatcatcaaggtcatcctcctgctctttccaaaatacgttgccgtactcgaaagcgtcactgttgcagatttctactccaagcccggaacgcggaaaaacaggttcatcgacatctgcctcatcgatgccgggggaagcatcgatgttatcgagatcaagaagcctttcgacgacgtactgctgagccggggcctctaccgaggcaatagcgttccgaccaaggagctatctggaacgatcatgcaggccgagaaatatctctttcacctttcgaaatggggtgttgaaggcgagcggcagctcacgacacggtacgccgattttcttccacccggcatgcagatccgagtgactaacccgaaggccatgattttgctgggtcgtgacaaacgtgccgacggaacgtccgcactcgccgatgatcaactattcgatctagaggtgatcaagcgcaagtattccaacatgatggacatccttacgtacgacgacctgctgcgccgtctcgataacgttatcgcgtccctctcccgacgcggaggcctgaatactgcagagcgtagtgtgtga

SEQ ID NO: 62265 - DNA, 1569 bp, Alcaligenes sp. HPC1271
atgaccgaggaagagctgcgccgccactatctgtcgatcgcatctgatcggcgctcccgacgcggggagcgtacggccggaaagaaccgtttggtcaaggggcgtaagggcatcggcaagttcgccgggctcatggccgcagcggtgatgacgcttgaaacccgggcgcgtggtcggttgtgccgtatcaccttgcggctggacgatctatcccaggtcgaagacattgaacagttgaatattggcctgcagagcgatccttgtgggccggaactgcatggcacgaccattacgctgagcgatctgcatcagggcctggcttatccggatgccaatcggctgcgccagatccttttgcaggactacgggcgacaggatgactttgccatcacgatcgacggcaagcggctcgacgtcgatgatgtatccggtagctactcggagcaggaagaggaacttccaagtgccggcaaggtaaagctgcgtttctctatcagcgacggcaagtccgggttgcgtcagccaggtatcactttgcgtgtggatggcaaggccgttggacggcctgggttcttcggcctggatcaacgagatgactttccatccaagctgctgcgaaagctctacggcgagatcgaagcagatggactgcgcgaccacatcacggcgggctgggatgcggcggtcgagaacagcgagcttctgaaagaagttgaaggctacgtccagcctatcttgcgagaagcctatgagcagcagtaccggcgcgaaattcagttggcgcaggctcgcctgcagagagcgatcctcacgcgcttgtcggctctgccagagcacaaacgtgcatttgccgatcgtgcgatcaagaagattctcgacaagtattacggtgagccggagagcaaagtcgaaccggtggtaaacgtgctgttggaagcgatggagcgttccgactaccgtattcttctggagcatatcgcggaggcaacgccgggcgatgtcgcaggggtagctgagcgcctggatgaatttggcttggcggagatggcattcctcgtacagcaagcgacggctcgtcaggtcttccttgatcaactggacggccttgcccgtgatgccgccacgacggaagccgtcttgcacaaggcactggagcgaaacttgtgggtatttggcgccgaatactcgctattcagctcaaacagtacgttgcggcgacaagtggaagatgtcctcggcaagacctacacaggcgacaaagccgacaaacgccccgacctgcttctcaacgagaacctcggtggacagtacctgctgatcgagtttaagcggccgagccacgcgctgaagcacgaagattatgtgcaggcgattggttaccggcacgaactggcgaagtatctgggttccccgattcaggttctgctcgtcggcggcagtcgctcttcggattttccgacggacaatcgtgagccaaatgtcgaggctcggatttttagtcaggtcatctccaccgcgcggcggcagattgagtggctgctacgtacagcggagacatgttcaaactga

SEQ ID NO: 62266 - DNA, 1155 bp, Acinetobacter sp. NBRC 100985; identical to SEQ ID NO: 62063

SEQ ID NO: 62267 - DNA, 1221 bp, Streptomyces zinciresistens K42
gtggccgagacggactggaagaaggtggcggcacaccttcgggagctcagcggcgagttcaccccggcacagcgggacctcgccgacgccctgggcgtggcgctcgcgcccggcacgccgatgccggtcgcggccgcacttcttcgcgctcacctcaccggaccgctgctcctgaagagggcgcagccgatcgacgaggaggagtacggctacctcgaactcgtcgcaggtgaggccgccatcgaggtcccgccgcaggacttgatcgaccaccgggacatcctggaggcgtggctcgaagtggcctgggcgcaccggtcggtgatccatctcgagcggctgtcacccgagccgggcgatattgcgatcactcccggggagcgaggctctgaacaggtccagcacgacatcatcgcctcgatcagcaacagcggccgcctcaacttccgcgggggccggggccgcggggcgcggccgcaccgcgtcacgagcctggtcaaacaggacgcgccccaccatgccgacctcgtacgcaaggcgcgcgaggaggcgcttgcccgcgatccccgcccggggcgggtgaccagccgggaactcgccctgctgcggccctggcaggtcactcgcgggccctcgctggcagaacgggaggccttgcgcgagaccttggagacggcgacggccgaacgcgatctccaggaggtcctgcagcgtcatcccgccctgctcggacatgtcctcacgggcaaccacggcacctgggtgagaccggaagtggggttcggcaaccactaccgggccgatttcctcattgccggccgcacctccgcgggcctgcagtgggtgctcgtggagctggagagcccgaacgcgaggctgaccaaccggggcagcggacgcgagtctcccactctccgtcacgccgtcgatcagattcgcgactggcgggagtggctatcgaccaacctcctccaggcgcgcactccacgggtagacaacggactgagcctgccgggcatcaccgccgacgcccgcgggctgatcatcatcgggcgggaggacgacaccgaggactccgcacaggtgcggcgccgcctgttcaccgacagcaggatcgaggtacgcaccttcgactggctgctccgagcggccgagcaagccgattcccgcctactcggcctgctcgacctcgagtcgggcgacgacacggaagactggtga

SEQ ID NO: 62268 - DNA, 687 bp, Methylobacterium sp. GXF4
atgcagggagaagcgctcctggctttgcttcggcagaccaccgaccggccgaacgtgctgcgcgctgtgctggagcactcggcagcgcaccgcgatttcctcacccgcgccgccagcgcgctgaacctcgccgtctacgaagcggctgtggccgaccttgaacgtctcgtcgccaccgacgcggccgagagcgcgttccagtcattgctcgcggccaacccgtggatgttcggctcggagtacgcccgcctcctgccgaaccggacgatcaccgtgcgtcagcagcaggactttctactcacgcgcacggcagacgaccgcttggaactcgtcgagatcaagacggccttgggcggcgatccactcttcgcctacgataaggcgcacgacgtgttctatcagaaggcggacctcaccagagtgatcgcccaagtccagaactacatcgccgacgtggacggcacgcgcgacctcgtgctgcgcaaattcacgatcgacgcctacaaggtcacggcgcggatcgtgatcggccgggatggggacgagaagcagatggaggcgctcaagcgcaccaatgcgcacctgcaccggatcgaaatcatcaccttcgatggtctcgtgcggatcgcgcgtcgcgttctcgcccacctgggcgggcgcggtgacgctccaacctctgcttcttga

SEQ ID NO: 62269 - DNA, 1455 bp, Achromobacter sp. LC458; identical to SEQ ID NO: 62096

SEQ ID NO: 62270 - DNA, 807 bp, Bacteroides reticulotermitis JCM 10512
atgctccaaattaataaaaaatataattggtttagtttagaaacagagaattccacaattatgtctgcattagtggagcgttggaagaatacgctagattcaaatttgaaagagtcggtttttcatcaatttatccacgaccatgcaggtttttttttcggaaatgataattgttacttaactatttcaaaattgaagctcggttgtgattatgagactgattttgtgaatgttatagatcagcgaagtaatggaattatatacgaactaattgaaatagaaaaacctaatagcaaactatttacaacaagtggtgtgcctgcaaaggatttaagtagcgcaatgcaacaaattagagattggaaaagattcttgattgaaaataaggcatggtttaaaaagtatcttccatcccagacaacacgtgtaatcaataattcaggagtgatatttacaattattattggaagacgttcagaaaatgctttagaaatagaaaaacgcaatcaaatagctaatgaattaaggattaacatccgctcatttgattatcttactgatcttcttgaacgtaggaggttttttaatgatgcatgcttagatgtaaatagcgaactgtggttagagaatcagatcgaaaatcctttttacaaagcaattaatgattctaagtggagaaaattttgttcaactaaattcaattggactcatttttataaaaacaactgtgaagaaattattaagattcgtgattataacgatttgatacatgatttcctcaatagttcaatatctgtggaaaaataa

SEQ ID NO: 62271 - DNA, 1239 bp, Formosa sp. AK20
atgttagaaataagaaaaaaatctaaataccttcaactcatatatgcttatagtgattcaggattcagcaatgatgattgggttattaatgaactcaaaaagtataattatgttggtattgcacataggatttttaatcttattcctgaatacttggctaaaaaatcaagatataacttaagcactcaagagtttattctagagattcctgatgttgtttttaatattgcggaactaaaaacaattcaagaagggaaaataaaagatgagtattttgaaatatatcctaatgtactggtaagagaccgtagaatccttcttcacaaagacattgaaccagatataagtctattcattgctgaaacaaatatttctatattcaaacaaatcgcagagcttgttgatggtgatattataattggtggtaaaatcaataacagcattcctcttgaagagttctatggattaattgaaaactttcctacctcctacgagaaaaaactatatgcacaagctcgaatatcatctgtattaaaaaactattttgaaaaggtaaaagattcagaaaaaatatatgtaaaatatcgtaacaaaaaaccatcaaataaaggcatcaatcttaaaaaaatatttgaagattacgaggttaataagtatcaaactatctatgacaagttattatcaatgctcgaagatgaagagaattataatgagaccacttggcaattagaaatcgttgatattcttcttttactctatcctaaatatattgcagttttcagggaagtacctgtgaatgctgatgatttgacaactaaatcactggactatctttttgtggatgctaacggacatgtagacgtagttgaaattaagcaaccttttgaccatgctattatgactaaaggaaagtatcgcgacaactacattccactacgtgaactttcaggaaccgttatgcagattgaaaaatatatttactatctcaatagatggggaaaacgaggtgagaatttccttattaataagtataaagatgagcttccaaaagggtttaaaattcacataactaatcctaaagggtttataatcatgggaagagaaaataatttaaccaacgaacaaaaacatgactttgaagtggtaaagcgtaaatacaaaaacgtaatcgacattctatcctatgatgacctgttaaatagattgaagttaaccattaaacaaataaaacttcgataa

SEQ ID NO: 62272 - DNA, 1365 bp, Leptospira mayottensis 200901122
atggcaaaatggaaattaacctatgaagcgttagaatttataggtagggacggggccggatggcccattattgatctaatatctgattcttataatgttgaagataactctatacgccgtgtctctgtaaacgcaaagaatatagttttgaataccttaccaaagaacattgttggagttcgagttttcgatattgaaagaattgatgaaatgacgggcaaaaactactttgaaagctatcaaattgaagatcttaattttgaattagaagaaagtgatgctaagaagttacgaaaaatacaatttgatctattatccattgacggcggttcattagatttcgattatctaagactttttaatccagatttgtttgttatgaatttaatggatgtgaaagcattctttgttgatggttatggggtactaagtcatgaagaaggagctttagtattagaaaatttaaataacttttataattcatttacttctgatcaaatcaacgttttaagaattaatcccaaaagtgtctcttatgatgaaaacaaattgattcgtagatttctcggacaagatcgacaagtcgtagattcttctagtaaacaaaattacgttaaaaatggaagtaaagttaatctaaaatttctagaagaaaaaattaaagattcggaaataatttctgatataattgattggatagttgaaaacgaggaaaatcctgaattattaaaaaacttcagcaaacttactccggaaaatttaagcaaactaaatacattatccggtattgtaactttaaagaattgtttactacgatgggaggaaaatctactccattcttccgaagacttttggcaaaaagagtttgaagataactcatacgtaatttctcaactttttacatctccagttacaattatgaaatctaaagcttacttaggtggcaagagtattcataatactggaggatcgttagtggattatcttttcgttaataaattaacaaagaacacaagtataattgaattaaaaaccccggccacaagattattaggctcgaattatcgtagtaccatttataatatttctgctgaattatctggagcgattgtacagctttctaattataaagacgaacttttaaaaaactattaccagctggcaaatttaaataaaggaatatttcatgcatatgatccttcttgcatactcatagtgggaaatttcgcaacggaattagattccgaagaaaaagtaaaatcttttgagttatttcgacaacaactacagaatattcaaataattactttcgatgaactttttgaaaaaatgcgactattaatacattcattagaaggtagttag

SEQ ID NO: 62273 - DNA, 1365 bp, Leptospira mayottensis 200901116; identical to SEQ ID NO: 62272

SEQ ID NO: 62274 - DNA, 1140 bp, Flavobacterium sp. CF136
atgaacagaaaaaatagactttcaaaatggaaaaaagatgaaaaatatcccttggcatttgaaagtcctatggattctgattttgaagaatttttaaacaaaagaaataattcacaagcagataagaaggtcagtcttggttcaaatttcgatttaatgaaaatgacccgagaattaatctttgatataaaaaaaggaacaccaatatttcattatatctgtccaatgttagagacaaaaggacttcaattaacctataaccatttaattgatagtgtatttgaaggaggcaaaaaagatattgaaagagatgttataaatactctcggtcttgcagtagctctagaagtgccgatttatccgaacaatgaaaaggttgaaaaagaactctcatattattatcaaaagctaatcgaaaatggatttactgcaccagatgagaatggaaatgatgtcaaattggttcctattaattcaaagaaaatggaagatttcaaaattgataaattttcaaaaatcgatttaacaaaattctggtctcctaccgatttattaattctaaaagaagtaattaaagacgaattcctaaaattaaataatgcacatcgtactttaacaatgttagaacttgcaattaatcaattgaaaaatctattagacacttcagagagaaatgaaaatagtcttcaaaaatgtttaacagagaatccaatattacttggtcttgaatacgcaagaataattccgaaacataaattaggctctgagtttgaagttgactatgccctagaaaaatttaatggattaattgacttaatggaaatagaatctagtacactaagtatcttcaccaaacaagggaatccttctagttatttagttcacgcagaacaacaggtcattgactggctcgattggattgaaaaaaacaactcctatgctagaaacggtcttgaaggtttaatatcacctaaaggatttgtgataattgggagaaattctagtcttacggataaaacaaaatttagcttgattagaagaaacaaagcttttaatggaaatatttcaatactgacatatgatgatgttttagcaaaagcagaaagcctcagagacatattgaaaacagaaaaaaactag

SEQ ID NO: 62275 - DNA, 1161 bp, Flavobacterium sp. CF136
ttggagtattatcctcaggatggggtaagatggattaacgaaaattttaataaggacgaagatttaattataaaaaaaacattttaccttaccaatcaagacatgattcctactgatgacagtcctgacggcgacagtatggagtttcttataggggaattagaaaatgactattataaaatatacaaaagggtcttagcagccgacaatgacatattgtttcataaatctatcgacataagaattaagcattttattgtaaacagcaacatatctgttcttttaaaattcgaaagacttgccggccagcagatcatcattggcggagataaggaaaatgctgtagctgaaaatattttcaacgatattattaattctttcccatcacgaacagaacaaaatcattatgtcaattccagagtaacaaatgttctgtcacaatatttggatggtgttaaagactctggcaaagcatttgaaaggtatcttgaaagaagaaacaagattggtaatctaaatacattgtcatcaattaggaattatgaatatgaaaagtacttatttatattagcagcattaaagaagatgctcgctgatagtgaaaacttcagcgagaaagactggcagaatcaaattattgagatcatactaataatttatcccaaatacattaaatgtttttcagaggttgcaattaaagattattataccaatccaagtaaaccaaccactcgttctctcgatttgatgcttattgacgcaaatggcacagttgatgtcatcgaaataaaaaagcctttcaacaattgtgtggttacaaaaagaacctacagggataattacactccgatgaaagaattatcgggaaccgtaatgcaggtagagaaatatctattccatttaaataaatggggtgcacaaggtgaacaggttctgaatcaaaaatatcaacatgatataccttctggcatgagaataaaaataacaaacccaaaagggctgataatcctgggaagaaatgataatctatgtgacgagcagctttttgattttgagattatcaagcgtaaatattctaatgtaatggacattattacatatgatgatttgataaataggctggagaatatattacaaaaattcaaaaatgattgtacataa

SEQ ID NO: 62276 - DNA, 1371 bp, Chryseobacterium sp. CF314
atgaaaagagtatttttaaaaaagccaatagaaaaacttcttactaagcttaaaaaattagaaggggtctcagatgttgttaaaaaaagaaataaatattatgtggatggaaacttattacttactgttacaaaaaatgagctgatttattccaaatttaggtttagaccaaataatattgataaggttttagaagttaaacatttagattcagtaagaatttttataaatcatgatacattaaatattttaaatataaatattttaaatcctccaaataatgttaataagatttacagtgtatttaaagaaattgaagaaatttctattagaaatataactattggagatagtaataggattgagaatgaaaatttatatataaatcttgaaacatataataatataattaagattgataatgaagaaagtgttgaaaaatcacaaaaagtatttaatagattcatcccctttttaaaatctgagtttaattttttgacagataaaatcaattcaaatagagattataacctgttgcttaaagaaattatagctagtggtgagatagaccaagaggatttagtttcattatctgatcaattggaaagtggatctaaaaatcaagttgttattgagaagcagataaataagcaaacaaaatggctaatagatacaattgatgatatccttcaaaaagataatatctctatatctgatgcaaaagtcatcggaaataaagaatttgggtttttaaaaacatcgattactggcccggagcatttaatggaaaaaatacttagtgaatatggtcagtattgtttgtttggagtacctgcattattaaatacaaataaatatgtacaaagaaaaggaagatcaagatcacagtttgatttaattcttattaatcatttaggagatgtcgaagtggttgaattaaaacgcccggataaatatttatttaaatatggaggaggtaggggaaagttttatccatccgaagatctagcaatagcaatagcccaaacggaaagatatatcacaaactttcataaagataatgatccggaatataaaattgataataagacattaagagagtttttaaatgataaaattggagatacattacacatagaaacaataaggcctaaggggttgataattatgggatcatggaaaaacttatgtccggattatgaaaaactcgatgaaaaaataaagaaaaaaataaaaaaagatgactatgtaaatgatagtttacaagcttataaagaattaacacattcattaaaaaatattacaatccttacatattcagagttgttggaaaatgcaagaacaagattagaactggattctcaaaaataa

SEQ ID NO: 62277 - DNA, 1095 bp, Polaromonas sp. CF318
atgaaactacttaccgatgccaaattggttaccgagtcgggaggtaaacgagaacttgatgcagtcttaggtcgttgcattcaagagcacagcgtggaagcgctgctatctcttcagttgctcacccgtgatgactacggtggcttcacaatgaaaacggagatgaagcgtgccgctgcactttgtcttttgacttttggagaaagaggtatcacgagcttagtagaaatattcgaacaagaaccgcgtttctccaatgccacgcttatcttgcaaattctttcgcaacttgcgtccggtgaatatccatcgttaagcagcgacttaccacttgatttggcggagcttgtgaccacgcatttgccgcctatagcttcaatcagccagtttgcggaaacaatgctaaataaagtcgttctctccataaccgatgaggacgatctcaattcatgggtcggcgtcactttgcaaatgtcttttgcctttcaaggtcggaataatttttcctcaaccagaaaattgctcagtgcaatggcactacgaaccctaacagtgggcattccgatcattgaacaatttgaggaattacttagagcatcaccaaatgatgaacccgctcttcaacactttcttgagtccaacccgttactactagatcccttagcggttcgcgtatggcctcgaccagatttacacggaaaaaaggaaccagactttctcattcaacgagcagatggcacatatctggtaattgaaattgaaattccatcaaagagtttgattacactttcaaatcaggtttctgcagaaacttcgcatgcgattgcacaagcgcttgactaccgaaattttctacaaattcgatatcaaagtgcacagcaaacctttccggattttcgggttcccgatgcgctcgttattgtcggcatggagaactcgcttaacgctgagcagctagaaactcttcgtcgagaaaacgaggcgcgaaccaacttgcagatcataggatttgactttcttgcaaggcgcgccagaaccatgcttggaaatttgacgcacggacgtgtttcgattgagcgatttcggcttttttga

SEQ ID NO: 62278 - DNA, 1143 bp, Acinetobacter sp. CIP 101966
atgacaacaatgtatacactagaagaagactttctctttttaccacgagatgttgaaatcgcccaaacttctcttatcaataccctctacaatcatattcataaacaaaatttaagatttctaaccacttatattgatgaaacagacactctacatattcagacaactcatcgtctaaaatttcaaatcacgtgcgtcaaaaataatattaatagtttcaaaatcacaaaatttgatagaacaaaagaagttgaaacactcactttcagtaaagtaacaatcaccaatattataaatttcttagaattaatatcttctctagatattaaagatattgaccaaagaaaaatttctttaaatcagatatctaaaaccgatataaagaactctatatctcaactaattcaatcaacactggagaacaaagatcaagctgagctattaacaagttttctaaataatggactaataacttgtcaagacatagtaaatacagggtacagaaaacaacagttagatgtttttgagaaactactttatgaacctgatgctatcactgaatatcaaataaccaatcaactaacaagtttttctgaagagaaaacttggcaacatttttttgagaaaaatgaatggatttttggatatggcttagattacagattcaacaaaatcttacaacgtgaagcacatttaaatccatcaaatctcgacggctcaaattccgttattgttgattacgtaatggctgataatagattcactacttttgtcgaaataaaacgaccaaatacccccctatttaaatcacaaaaactgcgaggtaattgttggcgcatttccaatgacttatatgaagcccatagtcagattctcgcacaaaaaatttgcgcccaaactaaatttgaaacaaataatgcaggtttttgcagtaaagggaaaagaattcaacaaggtgcttatgatcctaaagctattcttataattggttgttggagcgaaattgagtcagatagtgaatatatacagaacttaaaaattcgaacatttgagttatttcgtcgtgacttaagaaatatagaaattattacctttgatgaactttatgatcgagcgaagtttattgttgaacatcatcaatag

SEQ ID NO: 62279 - DNA, 624 bp, Synechococcus sp. PCC 7502
atgaaaaatctgcaaaagcacgttatcgatccccaaaaatgtcgtactgaatgggatgacttttcaaatctccttacctctaagccaatactctcagagcaaaaagatgtgcttccctttttcaagcagcgccaaaatctctccttacttatttgcaactactttccaaagattaaagtccctgaccaatacgctcatgaatacgaaatttatggtgactttattgcggatttagtgatcggagattcatccgttcatcattacttactcgttgaatttgagaatggggcagcagatagtgtatttagacagaaagggaaaaaggcaactccagactgggcaccacgatttgaaggtgcatattcccagttggtagattggctttggaagcttgaagacatgagaagtacacaggacttccttaacacctttggctcccgccgtgcaacctttcaagggcttatagttattggcaaagatatgaacctagcagtacaagaacaggatcgtctaaaatggcgattagataaaacaatgattgactcaaatgcaatatcaagcgtctctttcaatcaattgagtaacgatcttaatcactggctaaaattctattatggggtctag

SEQ ID NO: 62280 - DNA, 1185 bp, Streptomyces sp. SM8; identical to SEQ ID NO: 61854

SEQ ID NO: 62281 - DNA, 1164 bp, Gilliamella apicola SCGC AB-598-I20
atggatagttaccaaaatcctaaaataggtaaaacttatattagccctgcattatcagacttccataataaagaaaaaaaaatcagaattgctactaaagccttattgtcaacaggaggttgggaatatgcaaaagagcatgatgaaattatattacgtaaaaaaactgatgctgcaacttgtattaaagcaaaatttttagaggataataggcaaacatttgtactgacaatacagaagtttataattaatgatgaagatacaggtactccttatggctcaggattttcttttgttggagatgaaatagataaattttgcgaattcctgcatcatattcaatcaataaaacttaaaacaaataattcttttaatatttcagacgaagaattaagaaaattaacgttaacgtctagtcaagcagaaaatttaatttcagacaatgaagaactatttgcagaagtaattcggcatgccataactaaaaaagatatcgttaccattgcgtataggaaaaaacaattagaaacatttagaaaactactggaagatcaagaatactttgatagagttaaaattatgaaaaattgtaaaaaagatgaagccgtttggcaaatgttttttgaaaaaaacccatggatatttggatatggtttagattatatttacacctctaatttagatgataaacgccttgagcaagttgtacatggctttcaagtttcacaacatgggaaaagggttgatgcattattaaaaacaagggcattcatttctactttatgttttgttgaaatcaaaacacataaaacaaaactacttcacaatataccttatcgttcaggttgttgggctccatcaaacgaattaacaggagctatcgcacaaatacaaggaactatttcctatgcacaagaatctatttttggaaaactgaccttaacagatcaaaatggttttcctactaaagaagatgtatttaattttcgacctagagcttttattgttattggtaatcttgagcaatttaatggtgaatatggaataaatcaagagcatatccgaagttttgagttatatcgtcaaaatatttttcaaccagaaataataacttttgatgaactatacgaacgggcaaaatacattattgcaacaaatgaataa

SEQ ID NO: 62282 - DNA, 1140 bp, Marinomonas profundimaris
atgaacgattttacaccacccccattaactgatgaggacgtaattttaaactctaaattagagcacttatacaaccatgagtttagtgatggacgattttttcaagttatattctccgatgaagatgaaactcatataaaattagcggcaagaacttgtcttaaggttgtttacctcaaagaaaaagatgatattgaggggtttgaaataattaaagttgtttcaaataaagaaaaagaacgggtaaaattatctaaatttaatttggaacaactaacttgcttcttagagtttatcaaagagctaaacttcaaagatgttactaaacgtcgtatatctttggctgatgatgaattaagtgttttagattctgaaactaaagccaagatagctacacttctatcaggagaggacggtagtgatgtagtgtacgaattattggataatggcttaattaccaatcaagatcttgtaaatacaggctatagaaaacatcaattagaagtatttgattcactactaaatagaaacggtttagcttattataaaattcaaataggtaaaccaaatacaaaagatgaaacagcttggcagcatttttttcaagccaacgagtggatctttggttacggtttagattataggttccaaggaattctccagaaagaatttcatgcatcaacatctaatgcagcaggtaaagaagaggttattgctgactttcttttaggtgataaaaaattcactacatttgttgaattaaaattacccaatactgagcttttcaataagtctaaaaatagatctaattgttggagcctgtctaactgcttaatagatgctttttcacagatcctagaacaaaaagctagtggtcaaattaaaattgaaactagtaaggagtttattggtgacaattacgaagaaataacgcaacattcatacgattcaaaaactattttattaatgggctcgtggtctcaaattgataatgatcccactggtatcaagcggattaaagagaaaaccttagagttatttcgcagagattctagaaacgtagagttagtcacttatgatgagctttatgaaagagcaagatttattgttcataacgagaaccattcaaaacgaagctaa

SEQ ID NO: 62283 - DNA, 954 bp, Acinetobacter sp. NIPH 2036
atgagcctgtctgataagaaattgactattctacgagataaacaaactgttattacacgagcaattttttggaaagttgagagaagtgattgcaatgaaattcatttaaaattaggaagatacaaaaagcctaaatttttcttagattcccaatcattagaaaatgaaactccaaagagtgagttaacattagatcatgaagaaatgactaatttaatgaattttttacaagctcattacgaacactttaaaattggtgaaaaagaatatataccaatacctaatgatataaacacccaagcaaaagtaaaaatccagcaactaattaataatattgagatttccgacttaatagaaattttaattgaaaatcaaattgatcgtcatgatttagaacttagcattagctatacaaacagattaaaagctatagatgagttcaaccaactactagagtacgatgaaactgaaaatgtatggcaaaaatggtttgaaaataatagctgggttttaggtagtgactttgttaaaacaatagatgaacgatcaatagatactagaaatatttctgactttttgatgcaaagctatgatggttttattgatattgtagaaataaaacgccctgatggaaatttaaaattttggcaatcacaattagaccatggaaactatattcctcatagtgacttgatcaaagctattactcaatcattaacgtacatacatgagatagagcaagaatcaaatagtgtaaaatttttagagcgcactgaacatattaaaacaattaaacctaggtgtactttaatctatggtcgctctaatgattggaataaagatcaaatcaaagcatttagaatattaaattcaagttatcacaatctaagtgtcataacttttgatcatgtattagaaagggcaaagaggattctcggccaaaaaaatttataa

SEQ ID NO: 62284 - DNA, 1158 bp, Streptomyces rapamycinicus NRRL 5491
atgcttgatctccttgctcctggcctcacccccgagcagggtgaacggctcacgcggcccgcttacaagcaggacttccgggaacgtgaagaggcgatctgtgacgggagttcctggaagctggagcgccgtcaacacttcgaggagcagggcagcccgagccgggacgctctgcgtcggggcgactgggatgaggcgttgcggcttctcgccgaccgatgcgacaacctggccgcggccgcacagggggtgaggatcgtggcgcgtggcacggtgaagtggtacaacgtcgaaaaaggatatgggttcattgcggtagacaatggggccgatgtctttgtgcactacagtgcggtcgatatgggcggccgcccggaactcaaagaaggccaaagggttgagttcgagatatcgcagtcagataagggacctcaggctgatgaggtaaaggtcgagactggacctgaaccggacgcccctggggaatctagggaagtgctcggtatcgagcttctggacggcaagctgaagttcgtctcagtccagccggatggcagcgtcaaattttttgactcgcctggtcagttacacaacctgctctacgtcgcctcgatggaggccgcggggtggaagtctctggtgcgggagcttgaagagctcattaactctcctaatacctctgagcaggatcttcagaaatttttcgagaaaaatccagagtttcttactggcgatgcatacgaagaggcgcatcctcacgttgtgctccagagagagaatgatgggccactcattcctgactttgctctcaagccgaggaattctgccgcgctctgcgatttgcttgaacttaaattgcctaaggcgaaactgctaagagtgagtaagaaccgtgtgcgtcttacgtctgcaatcatggaggcgtgtgcacagctgagggagtatcagtcgtacttcgaagacgttgctaagagggtggctgtcgagaaggtctacggacttcgattcttcaggccaaggatgatggtcctgatagggaagcgcagtgagtattctgcgaccgacctcaggaatgcggaaacggatgtcccgaaccttgacatcgttacctatgatgacgttcttgcacgggcccgagctcgattccggcggcgctag

SEQ ID NO: 62285 - DNA, 579 bp, Pseudomonas sp. ABAC61
gtgggtgtacaagccgtgagcgacaaggatcgccgcatcattctcgctagccagctacagaatttatatttactccctggattacgcgaaacaacaataggtgagttcctcaaactccatccagaaataataaaaaaagcttttgacacacaacatttcgaatatgagccatcgcttaagtgggtcgaacacgacggcttctgcactgacaatgaaataaaccctgacttactaataaaaagaaaagatggatactatgatatttgcgacctaaaaacagctaaacttgaaaaaaacagaatcactaaggcagaccgtagccgcaggagattcattgattatgtagccgaaggagtcgcccaacttgcaaactacagggagtatttccaataccctaagaatgccgcactagcgaaagaaaaatatggagttgaaataaaaaacccacgacttatcttggtcgtgggcaactgggacaacttcaacgaacaagaagtagctcaagcttgccggcaatacgagaatctagaagtaatagactacgacaccatatcccagctctacattaactccgaataa

SEQ ID NO: 62286 - DNA, 1170 bp, Nitratireductor pacificus pht-3B
atgacaggattcagtgaagaggaaatcttccataaatccaggactgacaagacctacgccagcccggcgttccccgacttcctcgggcgcaagctccggatcgcgaacaaggtcatcgacggtcggcctggattcgaatacgcgaaggtaaaggacgagttggtggtccgtgaaaccgcgggcggccgtttccagattaaagccaccttccttgaggacgaccgggcgttccgctccgtcaccatccagaagttcacatcgaagggcaacccgcgggagtatttcgccttcggaggtagggaggtggcggccctcctcaagtttttcgccgacatcaagcgggtgcacttcccggacgaggggaagctcaacatcctcgactccgaccttgagcagctcctgctgaagccggatcagctccgacgcgtcgcggccgacaatcaggaactcctcgcggccatcgcccgaaacgagattaccaacgaggatgtcgtcgcgctggccttccggaagaagcaattgaagaccttcgaacggctgctatccgacgatgcctacttcgatgcatgcgtcatgcagcatggaaaaggaccagaagccctgtggcagcggtttttcgaaaagaacgcgtggatattcggctactccctgagtctcatcaacttcgggccgctggacgaccgaaagctcgagcaggccgtcagtggtcgtgatctgactggtcccgggaaacgggtcgacgcgctgcttcgatcccgggctcttctcagcaccaccgcgtttgtcgagctgaagcaccaccgaacagacctcatgtctgcggaccagtatcgccccggcatttggcaaccctcgaaggaactctcgggagctgtggcacaggtgcagggaacggtggcggccgcgctggagaggtggagtacgtcggagagactgtcggaccgtgacggcgaggcgacgggcgagactatatatactatggagccgcgcagcttcgtgatctgtggtcgcctcggggagttcgaaggcgagcacggcgtcaatgaacgcaagttcggatcgttcgagcgcttccgtcggaacctgatccggccggaggtcatcacgttcgacgagctctatgaaagggcgcgcctcatcgttcaggccagcgagccggcggcagaatag

SEQ ID NO: 62287 - DNA, 1197 bp, Paraburkholderia udeis
atgacagacgaagcagagatccacagaaataagcagacgaacaagacctacattagcccaacgatagaaacgatggagggaaagcttcgcatcgcctcaaaagtgctcgattcggaggggcttcagtacgcaaaagttaagagcgaagttgtccttcggcgcacgcccaaggggcgaaccgaaatcatcgccaagtttcttgaagatgaacgcgaactgtcagtcgtcaccattcaggcattcaacggagaaaccggaacaccacataagacttacttctcctttattagctccgaaatcccgaagctgctgacgttcttcgaaaacattgccgtcgtggagttcaaggacagcgagcgcgtcaacatcaccgacagcgaactcagaaaattaaggctatcgaaggaacaggcctcgggcctagtacacgacaatcaagagctgttcgccgagatagcacgctctgcgctaactagagaagacgtagtcgctcttggatatcgtaagaaacaggtagctgccttccatagactcctgcatgaccctaccttttttgagcaggccaaacggtcaaaagacgtaagaggtaacgaggccctctggcaactcttcttcgagaagaaccagtggatcttcggatacggactcagctacttcttcgtgacgggcttcgatcaccgcaaactggagcaggtggtcgaaggacacgatatcttgaatcgtggcaagcgagtagatgggctcatgaaaaccaggggtatcgtaaactcactgtgctttgtggaaatcaagactcacgagacccctcttctcgacaatgctgcctaccgaccgggatgctgggcaccgtcaaaggaactatccggtgccatagctcaagtgcaaggaaccgtatccgttgctatacagaaccttggtaatctgctccggcccaaagacgaaaccggcgatcccacgggcgaagaggttttcaattttaaacctcgggcatttcttgtgatcggaagcctcgatgagtttgcgtctgaacacggggtcaacagcgacaaagtgcgatcattcgaactttttcggaacagcataacgggtatcgagatactcacttttgatgaattgtatgagcgcagcagatttatcgttgagtcgatcccgggcagcgccggaacaagcacctttgcctcacccgacctagaatga

SEQ ID NO: 62288 - DNA, 753 bp, Lachnospiraceae bacterium M18-1; identical to SEQ ID NO: 61828

SEQ ID NO: 62289 - DNA, 753 bp, Dorea sp. 5-2
atgaaatcaatacatatctttgacgtttttactcctactgatgaacagaaagaagcaataaataaaaaacgcggcggacattacagacgtggtaaaaataaagaaatggactactttattgagtgtgcaacttcgctatttcccaataaccattattcaaggttcacacctatacatgatactaccaaagagttttatcaactgattacttctcctgatacgacagaaaggattgttctaaattggatagcttctaatcgtgcatggaactatttgtttggcttattacggcgttattacagaacaggacaccacgacgataattacatctttccagagttcaaaatcggttcgtcttatgtagctgattatctgctcataggtagcagttcagacggttatcaatttgtctttgtggaattagaagctccaaacgggcgaataacaaaagaaaagggtacgcgtttcggagaagtactcaataaagggattgaacaggttagagattggcaaatgtatatcgctgcaaattggaatgtaattgtaacagagttagaaaagcactcattccaaaataaaaaattgccccgtcaattatacaaatatagcccttatcaagtttactatgctgtaatagccggacttcgtaaagattttgagaatattcgtgacagaaaactccaactgcaaaatgaaaataatataacacttttgcattacgaaaatcttatagacgttgcaaatgaaaattaa

SEQ ID NO: 62290 - DNA, 798 bp, Anaerotruncus sp. G3(2012)
atgaatttatatagtagggattatcgcagtattacttcaagcgagttggaaaaatatcaagctatccttaaacttgaaacagaagggcagcctattgggagaatcaatatgtatgattcatatccaaccgctgtaaagcattatttgagtttgtttcccaataatcatataaatttatgtgatatgaagaaacagggggatttacaagtgcttaatgacaaattcaaagcaatagtgcatagcgaaaatgctcttgaattagatgttttgagatttatcaataaaacaccagcttatcatattataggttctatttttgagtgtggtagatttaattttgggcatcatgaggcatatttatttccagagttttcttttgatggaaagtatcgggcggattatttgttaattggaaaaggttcaggcgggtatgagtttgtatttatcgaatttgaaaagtcaaatggaagaataactttgaaagatggaaatttaggtgaggttttccgaaaaggtataaatcaaatatctgattggcagacttggcttgatgcaaatttccagagtttagggaaatattttgaggggataaagggaaaaggagaattaccggaagaatttttgaagtatgataccacaaggatgcactatgtagttgttgcagggcttagaagtgattttgatgaaaagacatatcgacttcaaagggataaattaaagaaagaagatattaagttgttacactatgataatttgtgtgattcagcagatagattattagatatgcgcacattttaa

SEQ ID NO: 62291 - DNA, 954 bp, Janthinobacterium sp. B9-8
gtggcaaaagtcagcggtcagaaatttacagttttaaaagataaaaaaactgtcgttacccgagcaggcttatggaaagtgccccacaacactagtgatgatgaaatatatttggagctagggcgttacaacaaacccaaagactggacaagtacggaagtagctgaacttgacgatcccaaaagcgagcttactttaactggcgaggaattctctaatctaatcagcttcattcaagagaattatgaacctttcaaaagtggcactaaagcatttataccattagataatccatatgatattagtgttgccgatcaaatacggcagttattgaacctagatgatcgtcaaagaatgttagattttttaataaagaatgacgttatacccagagatcttgaaattggcttagcacacgcaaaacgctcaagagcaattgatgaatttaatgcaatgcttgagttggatcttgctgagcataattggcaaaaatggtttgaaataaattcttgggttttggggactgactttgtgaaggtccttgatgagcgaacaatagacactgcgaatatttctgattttcttatgcagagctatgatggttttcttgatattgtagaaataaaacgcccagaaggaggacttaaattttggcagtcatccttagatcatggcaactatatccctcactctgatttaattaaagcgataactcaagcttcgatttatatttatgaagttgaacgagaggctgatagccataagttctttgaacgcgttggcggtgtcaggacaataaaacctagatgcacgcttatatatgggcgttctaatagttggaattctgaacagcaagaagcgtttaggattttaaactccagctaccacaatttgacgattatgacctttgatcatgtattagaaagagcaaaacgaattcttggacaaaattaa

SEQ ID NO: 62292 - DNA, 1074 bp, Acidaminococcus sp. CAG:917
atggacaatgaggaaattacaatcagttcgacttctaatataacagcggatatgacccctattgtaattttagatgaaaccacaagaacacaagtccgctttgaattacagcaaatcgacaatggaaaagatcccgaaaaaaaattaaaagggaaatttatttatactgttgcaaataaaaatacgggcagttttgatgatataattcgtctaaataaaaaatctatcaaagcgggagaaagttttgaactcgctttatcttgtaaagaaacatatcaactttggcagcatttgactgaacggtataaactggttgagggtaaattaacgccatttggtgaagttaagtacgtcagaaaagatgaagattatgaaaaattaaagtctatattaaaaaacaaacgtgcattagcagagttgttagcaactgcggatttaagcaacattaactttgctttgaacgtagaaaatctaaaacgtgttaaaaaagaaatagaacagaatttagaaaacgatgacgaggttaaatattggcaaccatttttcaaagataatgcgtggatactatctcaaatgttcaatgccccctttatgattatgaaagactgcaattatgtgggtggcaaaagtttgaataataaacacggcaaatttacagattttatttatcaaaataaagtatcaaaaaatatctcgttaatagaaataaaaacgccaattgtaaatttgacacaagcgacagcatatagagcagatgttcattctgcaagtcaagatttgagtggtgctatcgctcaacttttaatccagaaagatgaattatataaagaatatgcgactttacaattaaatacagatagtaattttgaagcgctaaatgttagatgtgttttgcttgttggtaattattctaaactttcaaaatcagaaaagaagtgttttgaaatctatcgcaatgaattaagagctattgaaatactttgctttgatgaattactggaaaaaataaatctgatgcttaatcttttcgagggtaaagaagaaaatgattatgtagatgacttgccgttttaa

SEQ ID NO: 62293 - DNA, 978 bp, Clostridium sp. CAG:1193
ttgatttttaagccgggtgatggtgatatggtatatgatgaatcaataaatacagtaattgtttatactaattcatttaaagaagaagtggtaaagccatctgaaaaaacaaaaagattaagaaaaagtatggagaaacttgcaaaaaaagaaagaatatcttcaaatgaatttacaaatttagtaagtactattgctgaaggtgttgagataattgaattgacggaaagagatagaaacactgtagctaaactaataccacagttaattaaagaaggtgatataaaaatttcgttgagagatgtaactgatattaataaagatagattaaaggatatagtgcagattggtagagatttgttagttaaaaaaagaggcgttgaaaagaaacttcaaatcgatagggactcaattggaaaagaatttgcatggcaaagatattttgaaatgtacggaacatatttgttatttggatctattaaacagcaaaaaccagaggaattactgcaaattgaatcagctttgagaaataaggatagtaaactagatattttaactataaatagatatggattcttagatattgttgaattaaaaaaatcagatgaatatttatttagattagatgaatcacatgataatattgttcctacctcaaaattaagtacagctatatcacaagtaaataattatttaatgttattaccatatgctaaagagcagggtgaattaataaagggtgcagaatcagctacaggaatgttagttatgggaagtaaggaatatttaatgaataaagataatatacaaaaatattgtgaaaaaacaggaatgtcagaagatttagttcaacttaaattacgaaaggcattaagagatttaaattattcatatgcacatattcaaattgttttatatgatgaaattttagataatttagataattttattaatcaaatggaaattaaaattaattaa

SEQ ID NO: 62294 - DNA, 999 bp, Clostridium sp. CAG:299
atgaaagaatggaagaatgttaagcttacatctaaaggccaagagtatgttgagccgtgtgagttgaaaactggtttgcgcagttcgtcaagagcagttttctttagaaacacccatcaaacgactggcgaaaaaatagtctcattgaaaattgctcgatataggaaagtcaatggaacattttatgaaaagcaagacaaatcaattacgctttcctgtggagagattgataaactaatagagtatattcaagagtattatgcgcccttaaacacgggaatgtccgagtttatttcggtagacaaggatgctgccgagttgtttgctaaagttcgtgacttgggaattcccgatgcagaagttgtgaaaaagcttcatgaatctgggatacttaccgagaacctgagcgttgctattacggcagcagaaagaaatcgtgcagtcagtgaattcgagcaagctatcagtagcggctatcctgaatcatattggcaagattggttcagccgaaataaatgggtgcttgggtccgaatatctgaatatattgccagaacgagatattgatgtcacagatattgcagattatttaatgagagctatcgatggttttcttgatgttgtagaaataaagcgtcctgatctaccattttggacaaggccagattcacatggaaatttatgcccttcttcccagcttactgctgcgataacccaatgcttgaactatttatataaaatagagcttcaatctaattccgtggagttcatggaacgggtagaggatacaaaaaccgtcaaacctcaatgtatgttggtgtacggtcgatcagttgactgggatgataatgaattaaagtccttgcgaatcttaaatgccgcatatcatcaattgcatatcataacttatgaccaactattaatgcgagcaaaactcctacttggaattgagaatgaaactgctgacgaggaagaagatttttccgaatggccgttttaa

SEQ ID NO: 62295 - DNA, 810 bp, Clostridium sp. CAG:81
atgttatatgatcgcgattatcgcataggattaactgaagcagaagaacagcagtacgaaaaaataacggggcgaaaatttttggaaaaaagagtaagtggatttggtatggttaataattttatggcatatccaaaagctgctaggatgtgtaaatcacttttccctaataattatctggatgttgctgaactacgaaatcaagaacgcttaaaacatgcgaatgaagagttcatttttttgttaaataacaaggaaagtacagaaagagatgtattgaattttataagagaaaaagaatattatcacataatcggttctattatttgggggttgtctattaatattggacatcatggagcatatttatttccggaatttcaattgagcagttcatataaagctgattaccttcttatgggaagaagttctggaggatttgagtttatttttattgaattagaaagtccttatggaaacattacattaaaagatggacaactgggggcagaattcagagatggaatatcgcagttggaagattggaaaagatggcttcctgcgaattataattcttttggggaaattatgcgaaaatataaaaataatgcatttgatttaccagaagaattttatgttttggatatgtctcgttttcattatgttgtagttgcgggaagaagagaagattttaaagataagacttatattatcaaacgagaacgaaaaaaggcagacgatattgatatcatacattatgataatttagttgattacgcggataatttgataggaaaacgaacatattag

SEQ ID NO: 62296 - DNA, 1299 bp, Collinsella sp. CAG:398
atgtcaatcaactttttcgattctggaagagaaatatggctgaggtatcaaccctacacacttgacgacaccatcctatccaagctttgcatcgactttgatagagaaaaaaagctcatccgatattcgctagataatcttcccgatcggcttaagcgtgcgcgaccgacgacatatccagatgcaagccttcggataaagagagtgttcactcttctccaaagcgacttggtggatgacgaatgtgacggcgataccctagttttcaaattcgcctatctagacaatagctttccagattacttcagaatcaaaggggatatttttagctgtccgcaagaccttcttgttgctaaaggtataagccttgactggaggatgttctgtgttggctatgaacgtcgaacctctgtgattaaaacgatatcgtcaattctagatgactcagaaaaacaaataatcatcggcggtgaaaacgagaaagccattccattagatgagttcgcggaccttttggataaattccccaccacaacaagtcttgaacgatacggcgaggcgctgatagcaagctatgtacaggacttcctcgacataaaaaaggactaccaagcgcagcttgatcgccatctttcgagaaaacagcaccggctatcgtacagactaggcagcccagaacttaataagaatcgaattacaaacctctctgttgcccgacagcagctacaagacttgctagacaaaaacgataaggtcccagaagagctatggcaacaaggaatcctggacatcatacctgttctatttcctcaatacgtaaccgtaatcccaaaggtttcgattgaggaccggataacgggaagacgaagagtaattgattttctgttagttgatgcttcaggcaatgtagacgtattggaaataaaaagggcattccagaaaaacaagctactcatggcacggacctatcgcgacaactacataccggcgcgggaacttggtggaggcatctcgcaaattgagaaatacattcatcttctgcttaactggggcatagatggagaaaaggagctgaccaaacgttactccccccttcttccacagggcctcataatacgattcctaacccctcgtggcatcctcttaaccggcggttgcaggttcaacaaaaccgaacagcgcgactttgatttgattcgtcgtcagtatgcacatatcacagacatcattacctacactgacctgcttaaacgtctcgaaacgatgattgatgcgattccgttatcggataagtcttga

SEQ ID NO: 62297 - DNA, 987 bp, Eubacterium sp. CAG:180
atgagtgaaataaaaacttctgctaaaggaatagactacgcaaaaccatgtgtattaaaaactaaatcaagggtttattctcaagcagtgctaatgaaaatcccccatgagcatcacaatgaaccagacatatcattaaaaataggaagatatctgtttccttttggtaaagttcaaaacgaaaaacccaaaagtgaacttacattagacaacgaagaattaaatgctcttatcagttatatttctgaaaattatgttcctgtaaatcttggctctggaaaatatataaatgtatctgatgatgatgaagagcttataaataaatttaaagagttagttgaaaagaatagcgatactgccgaacttctgattgaaaaaggaattctgtctgacaatgtatttgttgctgcaacatccataaaaaagaaagatgcccttattgattttgaaaaaaatcttggagaaacattgcctgaatctttttggcagaattggttttctgaaaacaaatgggttcttggttcggattttgcgcaaattatcgatgagcgaaatatagataccgagaatatcgcagactatataatgcgtgcttttgacggattcgtagatttggtcgaaataaaaaaaccaaatggtttgcagttttggtctgcaacaaaagaccataataattatgttccttctactgatttagttaaagctataactcaatgcctcaactatatttatgctattgagcgtgaagcaaatagtgttaaattcatcgaaaagacaaagagcaaagtaataaaaccacgctgtattttgatttttggacgttctaatgattggaatgacgaacagcgagaagcttacagaatactcaatgctgcatacaatcaaatatcaattcttacatatgatcatcttttattccgtgcaaaaaatgtattagggataacggaagatattgatactacagatgacgatgagttaccattttaa

SEQ ID NO: 62298 - DNA, 1089 bp, Firmicutes bacterium CAG:321
atgaacaactttaatccaaaatatgatgataataaaaaagatggaaaaatatacatatatggtaaaaatattaaagaaaatggtgataattatagaaaagccgaagctttttgtgatattggtaaaacatacacagagacacagtataatattgaacaacaagcaatagaatttgaaattaaagataaagtaatgttatatgagtcagatgcgggacaaacaaaatattggtgttggcttgtggaaacagaaaaagggaatacaacaactggtttgcacatttgtcgcagaacatcaaaaggaaaagtatatgatgaacaagaagtaacattaaatcctcatgcaataagtatattaaaaaagtttttagatgaaataaaattatatcaagaagatgggataaataaaattcaaactacaaacaataattttaataaaatattaacaaatgatgaatttttaaaaatagtagaaaagaatattgactgtatagatgattattatatgcttatagatataaaaaagaagagacaagcaattgtagaattagaagaaattgttaagggaaaacatggaaacgaggtgtctatacaaaaatttttaaaaagaaatttatggctttttggaaatgaatatactacttttgtagaagaagaaaagataaattcaaaaaatatattagatggtattccaaaaacatttgaaaattttattgatgttattgaagttaaattacctgaagttgaattgtttcgttacgatcagcatcataataactactatacttctagtgatttaacaaaggctattgcacagactcaaaattacatttttgaattggaaaatatgacttctaacaatgaatatcaagaaaataataattgtaaaattataaagccaagaggaattattcttataggaacaaaaaaagatttaaatgaaaaagaaacggaatatttaagaatactaaattcctcatatcataatttgtatattattacataccaacaactattggaaaaagcaaaaaatattttatcattatctcaaaaaaataattttgatttagaaaaacaaaatagtaattaa

SEQ ID NO: 62299 - DNA, 1212 bp, Firmicutes bacterium CAG:466
gtgagtatcggttttatccatgaaaataacgaattaattttaattttttctccagataacattcacgtgcaatttattgtagataagttggaaaacggcgaggattggcatatttatcgatgcttttcagtgaaaaagatacatttgaggaaaaaagatttggatgaaaatgaattgtacttctacattggtacagttcaagaagaatatacttatattgataatgatattctgaggacagaacacaagttctatttttcaaatgatattaagctggataagcatcattttgttgcatatcggaatatttcggtccttgctaaaattgatcgagtggtaggtcaagatgtctatataggtggaaatcatccaaatgggtctattccagtagatacttttgaattgcttataaagaattttcctaaaactactgaattaaactattatgctcaagccagaattgcaacgattgtgaaagagttttttccacatgtagaatcacatgaaattaagtttagaaaatttttggagcgtcgcgagaagagtttagcagatactttttcatcgaatatacaaacaatttttcatgaaaatgctgcaattgaacttagacagtttaaaggtattcgaaataatcttgttgaactgttgaatagagaacagagtgtaagtgaacaagtttggcaggaacagatacatggacttttgcgattactctatcccaaatatattgcaggaatacgcgagattataataaaaggaattgaccagcatgataagcgtccagatttccttttgatagatgcaaatggctatattgatattcttgaaataaaaaaaccaagtgtccagttacttacgaaacaatcatcatatcgtaataattatgttcctgtacgtgaattatcaggagcaattcaacaaatcgaaaaatacatatattgccttaatgcctggaaaaaagacggtgagcatgatatccaaaagcagttaactggtaagattcctgatttagttattcctaaagttgttaatcctcaaggtattttgcttttaggtaggagtaaggatttcaattctcaacagaatatggatttcgaacttattagacggcagtataaacatattgctgaaattatgacctatgatgatttattacaacgcatcgataatattatagcggcattggatcaagagttaaatgcccagtaa

SEQ ID NO: 62300 - DNA, 1212 bp, Mesorhizobium sp. LNHC252B00
atgagttatgactacgatgagcgtaagtggtttttggaacgccgtactgacaagacgataattagtaaacgtattcctggaatgggtcccggccagcatctgcgtatcgctacacacatcgtagaaggagaggccggcctcgtatttggaacgataaaggacgaagtcgtcctccgccgaacgccggccggaagatacgagctaaaggccacgttccttgaggacgatcgatcgatctcatcgctgactattcagaaacatcttagtcggacaggaccgcacgataagcagcatttcacgctggtcgggccggagatcaacacgctgatcgggttcctcgcaggccttgagaccataccgctcgacgacgcgtcaaaggttcacgtatcggatgatgtggtgcgcgacctggtgcttaaccaggcgcaagcacgtcgcatcttcgagaagaattccgacgttttcctcgaactggcccagaacgaggaagtggcaagagatttggttgcactcggatatcgccgaaagcagctcgctcacttcgatcgactgcttaacgacaacgcattcttctccgcagaacggcaacggctcgggtgccgaccggaagacgtgtggcaacgcttcttcgaggccaacacatggatatttgggtacggcctgtcgtaccagtttctttcttcgcttaacgagaggaaactggaacagattgtgcgcggtaacacgcttgatggcgctggaaaacgcgtcgatggattaatgaagacccgcggcattatcggttcactgtgttttgtggagatcaagcggcacgacacgccgcttctggcttcttcgcgctatcgcccggatacgtggcagccttcgtccgagcttaccggtggcgttgcacagatgcaggcaacggttcatggtgccgtcgagcagctgggatctcttttgacgcccagctccgcggacggcgacccgaccggtgaagcgctatcaacatcgagccgcgatcctgtctcgtcatcggttcgctggccgaatttcaatctgatcgtgggacgaatctcccgaagtttcgctcattcgagcttcaccggcgccacaccaatcgcccagaaattgtcacgttcgatgagttgttggagcgcgcgaggttcatcgtggaacatggtccagagcagatggatcaaggttgattgtcaacagggatgctgcttgtag

SEQ ID NO: 62301 - DNA, 642 bp, Mesorhizobium sp. LNJC405B00
atggcgaagccctatttcgacgaccacgtcttcagtctgacagatgcagaagctgaactcgccgaattcaagaccctcctcgacaccaacactgatctcgccgagcgcgatcaggtgctctccaatttcaagacatggcccaatctctgcgcgatgatggggcaatacaacatccgcttgggaatcggcgatctgattaggcgtgagtttcggatcctcccacacttccggaccgatctcactgtccgccgcgccggcaccgacaatatctgcctgatcgagtttgagggcgcatctgatcgccacattttcgaagatagcgagcgcggtatcgacacatgggcgcgcgcgttcgagagggggttcagccaggtggtcgattggacttgggcgctggatcactaccgcaagaccggcgattatgtggacgcgttcggcggcgagcggcccaatatcgtgggcgtgctcgtcgtcggacgctccacctcactgtcgacaacagtccgcaaggatcggtgggagtggcggcgaaacaaggttaaggccgacagcttcacgctcaccctcgtgacattcgatgaactctatagcgacttcgagatgtggctcggcttgagaaagatggatcgcgcggcctcctga

SEQ ID NO: 62302 - DNA, 1284 bp, Mesorhizobium sp. LSJC285A00
atgcaagcgcctgagattacgcccatgcagcctcagtccgttcttgccgatcttgtctcacagttggaggcccccaagttcgcgcaactgatgcgctttatggccaacctgcccatcccacgtgacgctctggagttgccagccgccgcatacggcgtgggagataccgagctccttgtccgaaaattgggacagccagggtcgcttggcacctgggctgcgacgtgggtgtatcagcaggcttatttgccgatcgggttctgggacgagatctcggtcgtcacgtttctgaaggagcgcctgacgacggcgaagcgtgatctggagttgcacccgggctcccactctatcctctacggatcggcacagcagaagggcgacggctactacattccagaagcgactgaagctttctattacttggccaccaacatcgccgtttcactgtcggacgcggcgatggacaccattggggatcacttccgagaacactttgggcgccgttttgcgcaattcggcttcgccacgcctcagtcgatggctgaagcgggtccaaatgaggttcgacgttttaccttggatctgctcaatagccctagcagctattacttcgtggcacgcgagggtcggataagcgtggtgccggtaactgagcacggcctgtatttaaccgcaactggcgaggctgcgactgcggctacggcgacaagttctttatcgttgagccctcggggcttcgctgacctcgaggctcttgtaaactcgcgcgcaacgagcgaagccgacctccaggccttctttaccgagcatcctcactttctcctcgggctggacgacgttcactgcgaggtaaggcctcatatcgtcctagcgagcccagcgggcaccaagctcgtgcccgacttcatggtgaggcttgaggatccgagtcactttgccttgatcgaacttaaaaagccaacggcgcgaatactgacaggcaagggtgaagcgggtcaggtcggaaaggtcgcggcgcaggcgatcaagcaactcattgagtacacggacgcggtcagaaccagttctgccagggccgaactgagacactcgattggcgctgcaccattcgatccttacctggtcgtcctgattggcaggggaagcccgaaccagcggcacgtttggagcagcacccgggcagggttacccagcgtgcaactcgtaacctacgacttcctgctggagcgggcccgtagttcacgcgcccggaatgagcaggccctcgctgagaattccgtctaa

SEQ ID NO: 62303 - DNA, 1146 bp, Vibrio sp. JCM 18904
gtgtttgaaattcctaattttaagcctacagaagaagatgtgataagaaactctaaattagagactctctataatcacaccttcgagaaaggtaggtttttccaagttattttctctgacgagaaagagtttcatattcagctagctcctcggacaatgatgaaagttgtctatctgaaagaaaaagatgacattgagggcattaagctatgcaagttagtcagcggtcaggagaagcaagttattgaactttccaagttcaatatgcagcaattgaaaacgttcttgaatttcattcaagaacttgatttgaagggggggatagcagagcgacgtattaagctatccgatgattcaatggatgtgcttgatgccgagacaaaacagaaaataaccacactactttcaggttctgatggtggagaagttgttagggatttattgtcgcaaggaatgatcactactcaggatcttgtgaatacgggttatcggaagtcacagttagaaatattcaaaaaactactgtcgtcaaactatctacctcagtataaagtcgatatcggtaagccaaatacaaaagacgagactgcatggcagcatttcttcgcggtgaatcaatggatattcggttatggtttagactaccgattccaaggtgtcttacaaaaggagtttcacgcgtctgatactaatgcgggtggcagtgaaggtgttattgcagatttcttaatgggtgacaataaattcacaacgtttgtcgaacttaagttacctacaaccccattgtttggaactgctcaaaatagagcgcagagttggaaactatcaaaagaattgatggaagcttactcacaaattctggaacaaaaagctagcggaacgctcaagattgaaacaactcgagatctatatgcagacgattacagcgaaataaatcagaatgcttatgactcgaaaacggttctaattgttggcaactgggcacaggttgataatgcagcggagcccccaggcatcaaaaaaatgaagcgcaaaactctcgaacttttccgtcgagactctcgaaacgtagaaatcattacctacgacgagttatttgaaagagcatcattcattgttcttaatgagcatagagcaaacaaatag

SEQ ID NO: 62304 - DNA, 891 bp, Psychrobacter sp. JCM 18903
atggatgattatcagaacccagaaactgggaaaacatatataagtcccagacttaaagcttttggtcattctgatagaaacgtacgtatagcttctaaaataattgattcgccccattcatatgcctttgccagagttaaagatgaagtggttcttcgtcacaaggaaaatgcaaaatcttatataacagcaaaatttatagaagatacaagaggcttatttttattaaatatacagggctatactgttgcaaccgataatcctcacaatgctagtttttccttcgtcggagacgaaattggcaaacttctagaatttattcggaatattcaatcagttgatttagataaaccttcacgaatcaaaattacagatgaagagttgaataaggttttactatcgaatgctcaaacaaagcgtattttgcacgataatcaagagctatttgctgaggtcttaaggtcagaagtcacaaaagaggatattgttgcagttgcataccgaaaaaagcaactcgatgtctatgaaaagctattaaacgacgcaaactattttaataaaatcaaaggaataaaaaaaactcataatgaagggctttggcaaaagtactttgaaaaaaattcttggatttttggttatggtctaggatatatctttctagaggggctaaatgataaaaagttagaacaggtagtacaaggtcataatgttaatatgcatggtaagcgtgtcgatgctcttatgaaactagaggtatcatatctaacctatgctttgttgaaattaaaacacatgaaactcagctacttgaatctacgccctataggtcagggtgttttgctccatcgaaagagttggcaggtgcaatatctcaagtacaaggaacagtag

SEQ ID NO: 62305 - DNA, 339 bp, Rhodococcus sp. EsD8
gtggtgcaggtccagcagaccgtgcgtatggccgtgcgagacctgggggactacatcgaggaacgagccgacgatggctcgcggacgggcacggggaccttcatcgtgcgaccacgttccttcctgattgtaggatcgctgagccagctgctgggccagagcggcggcccgatcgacgacaaggtacacagcttcgagctgttccgacgcaacctccacgagccggaggtcataaccttcgacgagctcctcgcccgtgccgagtggcacgtcaagctcgccgagggccaagcggctgtcgcggacggcaccggcgtggtggacgatggcgtcgcgtga

SEQ ID NO: 62306 - DNA, 1410 bp, Enterobacter sp. MGH 7; identical to SEQ ID NO: 61283

SEQ ID NO: 62307 - DNA, 1410 bp, Enterobacter sp. MGH 14; identical to SEQ ID NO: 61283

SEQ ID NO: 62308 - DNA, 1092 bp, Enterobacter sp. BIDMC 28; identical to SEQ ID NO: 61622

SEQ ID NO: 62309 - DNA, 1425 bp, Cycloclasticus zancles 78-ME
atggcaaatccaataattccagataagcccagaggaattttacttgaggatgagcagcatccagggttttatagttttagcttcgttccccctaaggaaaagttaagggatgctggattaaatgaagataacccgatgtcttacatcgtgcctatactcgacgtaaatgcgcaagacaattacatacagatttttccaataaatacctttgccacacaccctgaattcttaaaatacaagtacccaaaactgaagagcataaccctttcaaactttgattttggactggctacaaatcaaggggaagttgaggaaatgctagatatattgccatctggctttgtaaaggattttaactatgggcttgggtttttaaaggattttaaatttattgtagatacactcgaagaactagattttgagcatttagtaattgataaagatggtgaaacttcattagatgaagagaataaaataataacgctaaaatattcagattatgacgagataagaaagggaattaatcgggtttcatatgcaacgcagaagactgctagaaaagttaaaagagcatcgacctataacacattatgcttttttatagatgataaaaaattcccgcaaaaaccactagacataaaagacacctatattgagagatcaatagcaaaggcttcggatataagagatataaacatctccgaaagtgaaagaaaacatatcataaaaacggtctctaaaaatgccagaaaaatattaggtgatgatagccattctctcgtaaaactaaagaatgaaattgaacttgtatctctagaagaccttatgtcaaatttttcggagatgataggaaagaagctcgctgaagataaatggcaggatttgtttcaagaaaatccattcatactaaaccttctatttggatacccgattattaaaattcaggatcaggcctctgttggtggaagaaagctttctggaaaaggcgataaaataactgactttctaagcaagaatgttaaaacgaataatacggctatcgttgaaattaaaaatccacacgcaaaacttctaaatgcaagggaatatagagaaggcgtgttttcaccctcaggtgaactgtcaggatcattaaatcaaacacttgatcaaagatataagctgcaaaaagaaatagctacaataaaagaaaatacgagaaattatgatattgaaacattttcggttcattgcgtgctcgttataggcacgacacctgaagggcatgatgagagaaagtcttttgaaatatttagaagaaattctaaggatgtagatgtaattacattcgatgaagtacttgaaaaattgaagcagctacacgaatttttaaccagcgaaaacctagaaaacaaggaagacagctctcatgagcaaaataattga

SEQ ID NO: 62310 - DNA, 1086 bp, Enterobacter lignolyticus SCF1
atgtactacttaactgagtgtggaaccaaaaaggtgctcgatgagatgtcaacttatatgcagagtttagttaatacatttgagaagttagcacttgaagatagtgcagcttcaattttgaagctgcaacagtatttggagatacgagatgctggaacgtatgaaaagcatataatcccttatttggcttgccgagcattaatttataagggagtaattggtatagataaaattgctgaagttcttcctactgctcctggacatatatattcgatggcgatactttctagtcttttgcaagcaagtgagggagagcatgcaaaattcatgtatgagctcaccgaagaaagtgctgtactttctaaaccaattattgaagatgttagaactgctgcaaagagtgttttctgggctttcttagatgactgtagagctgattcggattctttttatagactaataaatctactgcaccatgttcaattttactctatgtatgaattagagtcttctagtagttttaaaaaggtggtttttaatatattttcaaactcaacccttagagtatcagatagaaaaattaaccagttgggtgagctaatttcctccgagttccgagaggaggaatatcaaaaattcttcaccgaaaatcctgcttttctaaatccacttgccagtaaacttattagtaagcataaactgggtaatgagtttattacggactatgtactggaaacattaactggagattatattgcagttgaaatagaaaaacctaccgattgtatttttaccaagtcaaataactttactcacacatttactcatgcattcggacaagttattgattttatagaatggattgagcaaaatatctcatatgcacagaaaaaacttccaggaatttcctcaccgtcaggaatgttagttattggtgttcgtaccaccctcaataaagaacaagaggataaacttcgccgttttaataagaatagcaattcgattgaagttgttacttttgatgacttgttggcaaaagcgcgaacacttcaggcaaatattatacatagaacagaactcttataa

SEQ ID NO: 62311 - DNA, 936 bp, Agrobacterium sp. JL28
ttgtacacgcgaaatgttttatcgggctttagagggggcattcaagtcatggaatcgctgataaaagacaagtacattgaagggttcaaggagttgctttccaaaaccggacgacaagagaacgccatccaggctttcctcgagcaacatacgacctttctgccgacccccggtttgctcaaccaccgtcttcacctgaacagcatcatttcgaaattcccgatcggcgagcgaattgctgattacgcctatctgacgaaatcgtcagacgaatggaaactcgtccttgtggaactcgaagacgccggtaagaagctctttacccaatccagtaagcatgtcggcttcaccgcggagatgaatgacgcgatcgctcaggtcgacgtctggcgggaattttggaacgaaaaccgtcgcccggttctggactcgctcgaatatctgctcgttccgcccggcatgcggcggaacgccgtatcactcgaatgtgtcctggtcatcgggcggtcagccgagaaagacaacaacgacgcgaggcgaaagcgcttggccgcgttgcgcgccgacaaacagatccaggtcatgacctacgacacgatcctgcgtgcagtaggcgccggcttcggcgaggcgcgcgcgatactgacgaaaaccggcgctggcttccgcctgcgctccgtcgaaggactacccaacaacctattcacctatctcttgccagagcatctttctgtagatccggctgccgaagctgctctgcgggctgagggatacgacatggatgcgtggtttgcgaactaccccttgatcgtcaatgagaagtggccggataggggcgcttggaagcgtgccgaggaagcagggatgcatcccaatgtcgttcggctgctcaagagctcggaagaacggcgacggacatcgggatcagccacctga

SEQ ID NO: 62312 - DNA, 1026 bp, Microbacterium mangrovi
atgcagggatttgacgtcgaggactacttcacagcggaactgattgagggtcttgccggggaactcgcggcgcttttcgccgcggacagcagaagcggtattgattcggtcgatgggatcctcgcacagcgcgcctccgagccccattcgcggcactacatctatgccatcgcagccgatgcctaccggatggcaggagtcgacggtgtgcgagcgttggcgtctcaggtgcgcagcaacacgcgcggcacggcccgcgcctactgcctgcgggcgctctggcgcctcgccaacggtaaccttcctcgcgtatttagcaagatagtccgcgcgcctgtcgcccccgaggtccaggcggcttctcacgttgcgatcagcgacctcgtggtggattctcttggtgatctggagctcgctcgtacgttctggggggagttcagcaggaccgatcttggagcggatcctccgctagctctgttctacgtcaagcttgctggcgagtcacagttcacactgaccgacaaactcgtcacggaccttgagtacctcatctcgcaggaccttccggaggctgaatatcagggctttctgaccagcaacccgagcctgctcgacgtcaccgcggccgaagtgcgtccgcttgcaccactgggcctcgagttcaagaccgactttgtactccgtcgccacgacggccgatacatcgttgttgagatcgagaagcctcaagatcggctgtttacgaagggggcggacttcacgaaggagttcacccacgccgttggtcaggtcctggacttccagcaatgggtggccgagaacaatccgtacgccgccaagcactttccggggatcaccaccccggacggcattgtgatcttggggcgaaggtcagaactggacgaacgccgaactcgaaaacttgagcgctggcaattcaatagccgcgcaatcgaggtactgacattcgatgatctcgccgtgcgagcacgctacgtcttaggcagccttcgctctagcccctga

SEQ ID NO: 62313 - DNA, 288 bp, Rhizobium freirei PRF 81; identical to SEQ ID NO: 61403

SEQ ID NO: 62314 - DNA, 1569 bp, Alcaligenes sp. EGD-AK7; identical to SEQ ID NO: 62265

SEQ ID NO: 62315 - DNA, 1218 bp, Cellulomonas carbonis T26
gtgtctggcgggtccgggctcgacgacgagaccttctacgctcagggacgccgtcccggtcgtacgtatgcctcgcgcagcttcgagatcgggcagccagagtccagggactacgggacgcccgcacgcttcgtctaccgggtcttcgacgtccctacggagtctgagatcactgtcgatggtgacgagtacacggtcactgacgtccccggcggtaggtaccaagtgaaggttctcctcgctcgggaggccggccaaatcaaggacctctggatccagagggtgcccgccccgggcaccgatggtcgcaccagccaggtcttgaacctcaagcgggacgacgccatgcgcttcgcggagttcatgtgctcccttgccagcgtccccatggaggcagacgcggagcgcatccgtgtagatgacgacctactccgggacgtcttcgcggatcccgacttgctgggcaggctctacgaagaccgcagagacgccttccgagcgatgatcacttcggacgcgagtgctcgcgatgtcatcgccatcacgcaccggcggcagcaggtgacgaggttccgacggctgctgagcgaccgggagttcttcgatgacgaggcgacgcggctgcacggcccggagcgggtctggcaggagttcctcgagagcaacccctgggttctcggtgtgtccctcggtgcccaactcttcacgggcttcgactcggccagactcgagcaggtcgtagctggcgcgtcgatcgctggcccggggaagcgtgcagacgcacttctcaagacggcgggacgcgtgaggtcgcttgtcttcgccgagatcaagacgcacgcgactccgctgctcgaccgggagtaccgaccagggtgctggtcagtctctcgagaggtgtccggcggtgtggcccaggtccagggcaccgttcagcgggcggttgctcagatcggtcagcggctccccgtgactgcggaggatggcagtgaggtcccaggcgagtacacctacctgcttcgtccgcgcagcttcttgatcgtcggagacctaggtcagttcatcggccaagccggtgggcacgaccctgcgaagttcacctcgttcgagctcttccgacggcaactgcttgagcccgagatcatcacattcgacgagctgttggcacgggccgagtggctcgtggacctcgcacaagacgcccgcgatccctcctag

SEQ ID NO: 62316 - DNA, 630 bp, Enterobacter sp. DC3
atgggtataaaaatgaacgaattgatcgccttaattaatactgaccccgaagagtctacagtgcagaaatttttcgagaaacatccggcctcaatcattggcactgcctatgcgctatcgaatgcattgatagctaaacttccattaggtgtcgattttgttacagattttacatgggtaaatcctcgttctgggcctacatatgtttatctgattgaaatcgaaaaaccttctaaatcaatttttaataaagatgattcatttactcaaagtttcaatcacgcatacggacaagtggaagattggctgggttggtacgcgagaaaccaagatgcctttcgagatatattagtcccattaaagtctcataatgacttaccgccattttttgctgtaagaggaattttgatctatgggagagattcggagttaagtaataacaggagagaggagcgttgggttcaaaaaggattatcaaatccatttgttgaagtacgaacatatgatgggtggggtcgtgaaaaaaacaatactatacctcctcatgatatattatctgactatctatccactgtgcattattccaaccgttcctatatcaacaaagacctcccagaagttaatatatag

SEQ ID NO: 62317 - DNA, 630 bp, Enterobacter sp. DC4; identical to SEQ ID NO: 62316

SEQ ID NO: 62318 - DNA, 666 bp, Streptomyces sp. HCCB10043
atggtcttcagggcggcagaacttcaacgtcgggcggtcggcctggaccgcctccgcgcggtggcggaggaccggaccgcgaccgagcacgatctccaggccgcgctcgaaggacagcgctggatcttcggcggtcggttcgtgggggaagccgcacggaggcggctggtaccgggcgatgagatcgacatccccctcatccgcggcgacggcagcctgcacatcgtggagctgaagcgggccatgagcctgcgcaaaccactggtgaagcagcaccgaggcgcctgggtgcccgccgcagacgtgcacgacgcggtcggccaagagatcaactatcttgtcggactggacgagaaccgtcagaagatccggcgggagctgggcatcgagacccgccgtgcaagtgcggtcgtactgatcggccatcccgcagtccagcccgatgtccccgagcaggacatcaacgaagctctcaggacgttcaacagtcacatgagccgggtcgaggtcctgacctacaaagagctgatcgacaacgcggagcggtccctggggtcccaggaggccgggtctccggccgcctcctctcccgctgagggcagaagccgaaagccgtcgaccgaccagagactcctcctcatgcggctggaccgccggggaacctga

SEQ ID NO: 62319 - DNA, 1227 bp, Marinobacter sp. ES-1
gtgatcaggatattcaaggagcaagcccgtttgctgctgacttaccagcctgaccgattcaacgatacccgctggctggatgaaaagctcagacaggatggcagcgtcacgctgcgcagaacgttcaccttcacaaactccggtctcgcctcgataggcaagccgctccagattgacgacgacagtgaacgcgtattcgtgctgggagtatccgagggtgactactacaaagttaacaaagatgttctggggctgaagtacgatttgcggctcgaccgggcaatgaagctagagccgcgaacttttgttgccaaccgggatatttcgattttccgcaaaattgatgagttgatcgatgagcccatcacagtaggtggcgctgacgaaagcgcgattccgctggccgattttgatcaacttctgaagacattcccaacaagcactgagctgacccactacgcccgatcacgtatcgcccgagtgttgaaggattatttcggaaccctttcggatgcagagcggcacctcaacaaatacttggagaaaaagtccaggcttgtcacctcatctcggggaggtcttctagagaccttcgagctgcaaaagttcgaatacatccacgccgagctgaaagagatgctgcgggaagctgaggaataccaggaaaaggactggcagaggaaaatcctggacctgttgcttttcatcttccccaagtacatcgctgttctagaaaacgtccagatcaaggatttttactcgaagccgggccgggcaaccaaccgctacatagacctgatgctggttgatgccaatggaagcgtcgatattatcgaggtcaagaagccattttcagatgcattgctatctcgccacaagtaccgggacaaccatacaccgagaaccgaactggccggagccgtcatgcaggccgaaaagtacctgttccacctcagcaagtggggttgtaccggtgaacaggaaatatacaaaaagcacaaaaacgagctcccggtcgatattcaaatgaagatcacaaaccccaaggccctgatcctactggggcgtgacaaagacttcactgacgaacagcgttttgacttcgaaatcatccgccgcaaatacgccaacatggtcgacatcatgacctacgatgacctgctgcgcagagtggaaaatatcatcgccatgatgaagcagcgagtatctgaagggagtgcacaatga

SEQ ID NO: 62320 - DNA, 1227 bp, Marinobacter sp. EN3
gtgatcaggatattcaaggagcaagcccgcttgctgctgacttaccagcctgatcgatttaacgatacccgctggctggatgaaaagctcagacaggatggcagcgtcacgctgcgcagaacgttcaccttcacaaacgccggtctggcctcgattggcaagccgctccagattgacgacgacagtgaacgcgtattcgtgctgggcgtatccgagggtgactattacaaagttaacaaagacgttctggggctgaagcacgacttgcgcctagacaggacaatgaaactagagccacgaacctttgttgcaaaccgggatatatcggttttccgaaaaattgatgagttgatcgatgagcccatcatagtaggtggctcggacgaaagcgcgattccgctggccgattttgatcaactcctgaagacattcccgacaagcactgaactgaaccactacgcccgatcacgtatcgcccgagtgctaaaggattatttcggaaccctttcggatgcagagcagcacctcaacaaatacttggagaaaaagccgagacttatcacctcatctcggggagatcttctagagaccttcgagctgcaaaagttcgaatacatccacgccgagctgaaagagatgctgcggacagctgaggagcaccaggaaaaggactggcagaggaaaatcctggacctgttgcttttcatcttccccaagtacatcgctgtgctggaaaacgtccagatcaaggacttttactcgaagccgggccgggcaaccaaccgctacatagacctgatgctggttgatgccaatgggagcgtcgatattatcgaggtcaagaagccattttcaaatgcattgctatctcgccacaagtaccgggacaaccatacaccgagaaccgaactggccggagccgtcatgcaggccgaaaagtacctgttccacctcagcaagtggggttgtaccggtgagcaggaaatatacaaaaagcacaagagcgagctcccggtcgatattcaaatgaagatcacaaaccccaaggccctgatcctgctggggcgtgacaaagacttcactgacgagcagcgttttgacttcgaaatcatccgccgcaaatacgccaacatggtcgacatcatgacctacgatgacctgctgcgcagagtggaaaatatcatcgccatgatgaagcagcgagtatctgaaggaagtgcacaatga

SEQ ID NO: 62321 - DNA, 666 bp, Candidatus Contendobacter odensis Run_B_J11
atgcacttccagtcagccgaagaagtccgcgcccaagctaggcgtaatgatcccctgaatgagtattttgtatgctgggatcgaatcgcacctgaagacatcgcgagtctcattgtggttcttgattgcgccaagcgcgaggaagatatccagcagtttttgcaggagaatccaaagttcttgattcagcacttgggcggaggtcacggacgatgggtaattcccaaacaaaaacttggctccgaacacgttacggactttctaattgccgaaaagcactctttcgggcacgaatggcaagcagttgaattagaaagtccactgaagccaatgttcaacaagaatggcgatccgtctcaatatctcaatcatgcgatacggcaaatccaagattggcgtgcatggctcctgcaaaatcagaactatgccgctcgtctaaaaattgagaatggcctaggtttaaccaatatcagtccgaatcttcaaggtattattttgatcggacgtagagcaaagcttcgaaatggaacgacggaacttcgccgtcaaatggtagcagatttaaatattaggattcatacctatgactatcttgttgaggcacttcaaggtcgattgaaaggtcttgttatgtggtccggtgagcaaataacggatgaaatctaa

SEQ ID NO: 62322 - DNA, 489 bp, Serratia sp. DD3
atgttgtcctttctacttcttctgttcccgaagtatattaaggtactcgagaataatactattcacgactattatagcgaccccactaagaagacagatcgttacatcgacattggcttgattgatacaaatggtaatcttgacgttatcgaggcaatcgtattccgacttccgacttccgagctgagcggtagtatcatgcaggccgaaaaatatctctttcatctgtcaaaatggggagtcaaaggtgaaaaaaaactcactacaaagtatgctaatgatctgccgcctggcatgaagatccgaatctccaaccctaaagcgattattatcgtaggacgcgatcagatcggcggagctaacatgacagatagtcaactactggacttcgaaataattaagcgaaagtacgcaaacatgatggatatcatcacatacgatgacctgttgcgaagattaaataacactatcatcgctcttggaagttga

SEQ ID NO: 62323 - DNA, 1158 bp, Methyloglobulus morosus KoM1
atgattgaattagacagttacaaaaatccaaaagaaggaaaaacatatattagcccaagtttaccctcttttggtgatcggacagacaaagttcggatagcatcaaaagtaattgagtctcaagattcttttgcattcggcactataaaagatgaagttgttttgaggcatgtggaaggcggaaaatcgtatataacggctaaattcattgaagatccaagagggttatttttactaaacctacaaagatataccgtaggaacagataaaccgcataacgcaagtttttcatttattggtgaagaaattgggaagcttttcgagttcattcaaaatgttttgtctgtaacatttaaaaatgatcgtgcagttaacattacagatgaagagcttagaaatatagttgtttcaaataatcaagcaagaaagttatttcaagaaaacgaagaggtattttcagaaataataaaatcggaaataactaaaggggacattattgctataggatttcggaagaaacaattagatgtttacagtaagctcataaccgaccaagaatatttcgagaacttaaaaaaacagaaaaatacaaccacagaagggttatggcaaaaattctttgaaaagaacaaatggattttcggttatgggttgagctacttgtttttgtccagcttagacgaaaagaaacttgagcaagtggtgcaaggtcacgatgttgctggttttggtaaaagagttgacgctcttatgaaaactaagggactgatttcaagtctgtgcttcgttgaaatcaagacgcatgaaacgcctttattgcaaaaaaagccttatcgttctggttgttgggcaccatcacaagaattgactgaagctatcgctcaaattcaaggcactgttgcttcagcagtgaaatcgctgacacaaaaaatatcgcttagtgatgaacatggcaatccaacaggtgaggaagcatacaattacttgccaaaatcgtatttagtcattggtagcttaggtgaatttaccaaagaacgaggtgtaaatgaagatcagtatcgctcattcgagctttatcgtaaaaacataactactccagaaatactgacttttgatgagttatatgagagaacaaaatatatagtgcaaagcgattaa

SEQ ID NO: 62324 - DNA, 774 bp, Defluviimonas sp. 20V17
atggccgaatacagggttagccgcagcggcgtcgtgctcgaatatcgcgcgacgcttcagggcaatgcttggatcatggatgaacttaagaagggcgaagtcgagatcagctcggcgttcaccttcaggcccgacgatctgctcgtgaagccaacgcaagaagaggtcgagaacgatttcctgttcacctatcgcttccgcctcgccgtcgccagttcgggttactatttcatctccggccgcaagctcgacattgagcaggacgtgctcatcgccaagagcggggtcgagtggcggcgcaagctgttcgttgctgagcgaaacatctcgatcttcaagcggattgcgaagctgattccggaagcggaggagatcatcattggcgggaagcgcgaggatgccattcctatcgaggtgttcgaagacctgatcgcgcgcttccccaacacctatgagatggaccgctacgccgaggcgcgggtcaccaatatcatcggcgaatatatcgagcctgagcgcgactttcgggagcagtacgaggcctatctgagcaaacgcaaatcgcggcgtagcgacacgccgctacacgccaaggagttgctcaccaccgagatcgagaagttccaatttgtccgggacacgctcaaggcgtggcttaaggccggggaaaagagcgaggatcagtggcagaaggcactgctctccatcctgccgctgatcttcccgaagtatgtcgcggtgatcgaaaaggtgccgatcgacgatcgctacacg

SEQ ID NO: 62325 - DNA, 467 bp, Defluviimonas sp. 20V17
agatcgacatcgcgctcgtcgacgtgaacggcaatattgacgtgatcgaaatcaagaagccagaagccggcatcctgcttaggaagacgccctaccgcggcaactatgtgcctactggcacactgtccgggacgatcatgcaggccgagaaatatttgttccaccttagcaagggcggcccggcggccgaagagaagatcaccttgaaattcaggaagttgcttccgcccaatctcagaatccgcatcaccaaccctaaggcgatgtgcatcctcgggcgggatcggaaggataatggccatcaggtgttcaacgaaggacagtctggggacctggaagtgatcaagcgcaaatacgccaacatgatcgacatcatcacctatgacgatctactgcgccgcctcgacaacatcctcgcgtcgctgaagcgccgcaaggccaacggactggatgcgaccactctctag

SEQ ID NO: 62326 - DNA, 1422 bp, Blastomonas sp. CACIA14H2
atgccatcagtccgaccatccgtattcaaccagcgcgaacgtgcggatggaggcccgttccttctgatagagccatcggaggaggacgacggcctcagcatagatgtcttcttcaccgatactccgcctgacgaccgaacaggttcgtatccaaaagagcggcttctgaacgtgacgcccagctccttgcggatattcccgctgaatgttcggcagggccgagacgactatctgacccctaagtacggccatctcgtttccatcacggtcagccgtagggtcgaccggccctatgagctgccccaatccgtcgaagatgtgcaggcgatccttgaggggctgcccgatgggttcgcgaaggacttccgcttcggccttgggctgctctgggagtatcgagccatccccgaagctttcgccgggcaggacaagattacgctgatgatcgtgcatggcggcgaggaagctacgctcgacccgccatttttcatcctgggtgtccggcgcttccatgagatccgcaaagaaatcaaccggatcagcgcccgttatcagcgcgatgccaagcgggataaggaccactacgcctatcacatgctgttccatgcagcggaccagcaggtgtttccgcgcttgaaaaagactctccgggcggacgcgttggccgacgcgaccagcggcggtcgggaccgagtggagctctctaagcgagacaggcgggccgcggtcggattggtgcgatccaatttagaagcgctggcgcagtcggacaccgacgcccttctttcgctgaggggcgaaatcgagcaggtcacccttcaacagcttatcggccgttttcgagaaatgctggccaaggattttcccgagagccggtggcaggccttcctaatgcaaaatccctttatcctaagcctcgcattcgcagtgccggcgatggtcgtgcagggacaggcttatgccggtggcaagcgcctaagcggccgcggcgggaaggtcactgacttcctctgcgcatccgcctcgaccggcaaccttgcgatcgtcgagatcaagaagcctgcgaccgacctattgggcggggcgccctatcgcggtgacgacgtcttcgcggcctcgaccgagcttagcggaacagtcgcccaggttctcgatcagcggatgattctccagcgcgagttgcccaacctgaaagagcagagcgagcgatatgacatccacgactatggcacgcgatgcatcatcgttgctggggtgacgccgagtgatcgggcgcggcggaagtctttggagctcctacgcaatgcgttggtcggcgtcacccttctgaccttcgatgagcttttgaagcggttggaggagatccacgcagcgctaagcccatcagcagaatcgcctacgaacggtgaggccccattctaa

SEQ ID NO: 62327 - DNA, 1053 bp, Hydrogenophaga sp. T4
atgaacctcaccgaaatcattacaagatacctagacaccttagacgaaggcatcgacacactatccaaccataaagaaggcaagctctccaaacttccaagctgggtgcttcacaagagagtaattcaaattggaattacagaggacagagagggaattgtcataaaaatcacccccgacagcaaactagaatcggactccgttagcataagcaccatttctaatgcaagggacataaacagagtcattttccctatgcgttttgaaggtcgccttccaaacaaagaacctcaagattttttcacgactgttggcgacatgtcgatagttgaagcaaacaatcctctcgcagtcccagtattggacaaccaattcatgattggctggggaagatcgctcgccttctcaaattcatttagtgttgaaaatgcaaaaaaagaggcagttgatatgtggaatgcagccacaagcaatcttgagtctcgaaagtcatatatccaggaaaccaagaaagtgctggacaaattcgaagcaatcgtaagaagaaagtcattcctagaacgcagaattcatagattcatcaatgaacaccgctctatttttctgcctgagcacaaaacatgcctttttgagcaacgtctacaattaaacggcgaaacaaggattgcagacttcattctgggacgagaacaaggccttccttctattttcattgaacttgaatcgccagttcatgaggtattcaccaaaagaggcgatctaactgctcaagtcaaccatgcaagacagcaggtttccgagtgggtgaagtatgttgaacttgcacctcaatcaaatgcctctggagaactcgaatttctcacagggccaaaggagcgaatgataataataggaaaagacactgacaaaaaggatcgacttatcgacacaaaacacgatggcacaactgtttggacatattccattttgcttcaagaagcgaggcgaaggatgaacaacaggttggtgtcgcaatacaaaatgctagggctcgaacccactgagcccttctaa

SEQ ID NO: 62328 - DNA, 1446 bp, Hydrogenophaga sp. T4
atggtgaccaagtcagtctggcagtctctgggcattcaggaccagctggaaggtcgaatcaccttcgactgcgagaagcacgcggaaggcgggaccaacgtctatttctctctgatgccgtccccaaaccaccagattgacaatactcatcggtggctacttctgaacgtgtcagatggtttgctcaccatctatccgttcaagagcacggccggcggatacgagcccaaatatgaacacattgatcggatagtcatcggccagcggcggcattgcgcctgggaagagccggaggacgatggtgacgtgcaatacctgcttgaacgtattcccgaagggttagaggccaatccgctcaacggtctgggcttcagcagtctggacaggtcgattccgcagtccatctcggctgcggcgagcggagtcctaatcttcgtccaaggcgaagagaagccgccatatctcaaagatggcctctacgtcattagcgagctgtacttaaagcgccttgtgcgtggacttagatcaatttcgtcgcggcatcagcgacaggcgaggacagagaagctgatcctcgcccacaactcgctgctgtcggagatggacccaagtaagtatcctccccgccagaagaagctcagcaccgagagcgtgtacgaactggtccaagtcgggcgcatcaaagtaggcatcccgaaagcgtcgcagcgcagcgttgtgggtatggtcgccgacaacgctcaggccatagcgaagaacgcaccggatgtcttgtatgagctggccgccaagattgagcgtgtgacgctgcaggagatgatcgccaagtacgaggacatgctgaccaagcggctaaacgagaccaagtggcagcgcttcttcgaggcgaacacctttatcctctcgctcgtgttcacagtaccaacggtgttcgtacaggagacgccttacgtgcacggcaagcggatcaacgggaaaggcggccgattctctgacttcctcatgcgcggacaaggcacaggcaatgtcgcgctcattgagatcaagtcgccagaaacggcactgctaacggcgtaccgggcagaacagccgtgcccatccacggaactggtgggatcgatcacacaggtgctgggtcaacgtcgacggctcaccaccagttggcacaacctcaagggcgaggacgatgggacactgtcgaacgccgagctttactcgccgcaggccgtcgtgttgatcggaaggacgcctacgaccaaggcagacagagaagcgttcgaagcgttcagaaacgccatgaaggacgttgccgtgatcaccttcgacgaattgctactgcggcttcgatacctgaacgaagccctggccgctcaacaagcacttccggcgccgctgtccacacccgattcccctgacgaaactgacgagaacgctgatctgttttga

SEQ ID NO: 62329 - DNA, 1308 bp, Pseudomonas sp. BAY1663
atggtgcagttcctctggcagttcggtgacgacgcactcgacctgagtcccgccggtcagctcctggagaaggaatcgcttccgaaccgcttcgatgcttgggatacagggtggaaggtcagtggctggatcggcacggctaggttccccaaacaactggatagtgaggatgccggcaatctgaatggcatcgtcgtgttcgcccgtggccgcctgtttcacgagaacatcctcgacaaactgaacgacgggcggctctacacgaagtacctcaccgggcagatcgaggccgatttcctagacgccgacgacgcaccagacatcgcgaccagcgatcggcagcgcgtgcaggaggatgacccccgatatgggcagctgatcgctttcctgaaatcacgtcttacgcaagtcgagaagcgctggacggaatggcgcaagaagcacgaggtcgagaaagcgaaggaaacatcgcccgccctcgccgagtggctcgatacgctccccgagggatacaaaaagagcgcggagacgctgatcgccaaactcagtgcgctgccggtcgatgaggaagaggatcggaagctcatgtaccggcacggcatcctggcattcgagcgcatgaagctgcgcggctcgaccgaggagtttgtgacgagcatcgagagtgccgacaggctgctggccgtgctcgccgacagagactcgcttgaggcatccctctaccgggacatcgtcaaatcgcgtctggatgccatccgggatttccagaccatcatcgatgaggacgcaaaggaacgggtgctccagaagtacctgttcgatcacctctggttattggacccggcatgggagcgtgccacgggcagcccgatcatggaatcgcgcctgacgacggaaggcgtgctgatcgaagacatgaccgagaaagagcgcctgggccgcgtcgacatcgcctatcgcaccaatgcgggcaagcacgtcatcgtcgagctcaagaaggtcggccgcaagatgggattgctcgaactggtggagcaaggtcagacctacgtcgacaagctgaaaaagatcctgcgcgagcaaaacgatgtcagccccaatatcgaggtgatcttcgtccttggcaagaccgtcaacgaagaggcatcgaaccccgaccgcctcaagtcatcgatgacatcgatctcaccgggcagccgcatcgtccattacgacaccttgattcggggcgctcaagaggcgtattcggcatacatcgagaagagcaagtcactcgacaagctcgaaaagatcgtggacaggatttga

SEQ ID NO: 62330 - DNA, 1143 bp, Vibrio sp. OY15; identical to SEQ ID NO: 61709

SEQ ID NO: 62331 - DNA, 1401 bp, Pseudomonas sp. RIT288
atgtacgatggagaagcggttttcaatccaagctttcgccttattcccggactgccgaatcaagagccatgtagagacctttacatggaaacattcttcactctagaggatcccgacgatccagatgcctggtaccctcacgcagtggaccgctggcatctgctcgccagtattttttccaatcgcatcgtcacatatcccgtattcaccaatccgcatgcaaaacgctacctctcccgtaggcatgggcgaatcaatactgttatttacgagatgaagtatgaacaggcacttccggaatcctcggatgccgctttgactttgatcgatttatatctaacttctcgatcatggaacagctgtaattttgggctaggattgatcaaagatcttgagcccctatgcgctggcctgatgcgagtggctgagctagataccttggtggtaacgcacgatgatcacataaaaattgaccgcaactgcgcgcgtattcccgagcggcagattgaggatttgaggcggacattttataaagcggatcgcagacaaaaggagcgcattcgggctgcgaagcactggcacgttcgcaatgcaataatggcgaagctcgcacctgataaatttccagcgctgctgcaagtgactagcacaggggaaatgatcgagtaccgaatggccagcacgaggcggtcgcaggccatggagaagcagcaacaacaggcatcagtaagaaccgttaggcagaatgccaaacagattgcaaagaacgcgccgcacgagctgctgcgtctacatgcggaaattgaacgagtaacgctggcaaacatgatcgagctttttgaaaaaaagcttaatcagcagctctccgaatctcactggcagcgtttttttgaggacaacatattcatcttgtccatgctgtttgctcggccagtccagctacttcatacccaatttcatgctcaagcagccagcatcaatggggctggcgcgcaaataggcgactttcttttccgggagttggggcagccattagctatcgttgaaataaaaaagccatccagtccgcttatgctatcgagtgcctatcgcaacaacaaagtcttcgggccgcaccaagagctcagtggcgcaatgactcaggttctctaccaacaaacctcattgcgtagtaactggttggttcatcgagccgacttaccaggatcacaacccgatgccatcaagtgcataatcatctgtggcaccactcccacagaacccgagccgcggcgctgcttcgatatttttcggcacgcctgcaaggacgtggaggtcgtcacatttgacgagcttctagacaaactgaagctgctgctttaccacctaaacagttcagagcgaaacgaggacgccacctga

SEQ ID NO: 62332 - DNA, 1410 bp, Pantoea sp. PSNIH2; identical to SEQ ID NO: 61283

SEQ ID NO: 62333 - DNA, 1410 bp, Pantoea sp. PSNIH1; identical to SEQ ID NO: 61283

SEQ ID NO: 62334 - DNA, 789 bp, Desulfosporosinus sp. HMP52
atgaatttatatgagagagattatacaaaaatactaaatcaggatgaattaaaagccgctgaagcatacaaagagtaccatgccaaaaaagggattaaatgtacagcagatgctcctgaaagatcaaaccctaatgaagaggtcagaaggtttttatggcatttccattcactttttcccaataattatttatatcatttagaaccgatgaaaatattagatttggaaaaggaatcaagagaatttaaaaaagtgatttacagtgccaagaatgagaacgaaatccaaagttacattaaaactaatagaaaatggtttatacctgcatcactttataaggaatacaactttgctcatcacggagcatttttattccctgaattatcttttggagctgagtatgtatcagattattgtttgttggggcgtagttctgacggtttcagtattgttcttgtagagtttgaaaaagccaatgtaccatttatgatgcaaactcaaaactctgagagtgaaagtgtaagaaagggaattactcagattagagactggaaacgctggcttgacgataatcgtgagtactttattcgaagcatgggattggaagcgaagggaataaaaataccaacaagtcggatttattattgtttggttgtaagtagacgagatctaatggatcagaccgcggcagatctaaggagtcaattaatttgtgaaatgcaaaattttaaaatagtatcttacgacagattagtcgataacatacttgcgattgctaatggttattaa

SEQ ID NO: 62335 - DNA, 1419 bp, Pseudomonas sp. WCS374
atggcggacggtgagcagcagcaccacacccgttggactgatgatgatgtcctgactccctccttctatctcgctcgacgccccaacgagaatggtttctcggccaacctctatctccaaatcttcgagcaggtggaaacagggtcatggcgatccctgccggaggatcaatggcatctgttggcctccattgatcctggctggatcaccatgtacccgatttacacgaatccgcatactcagcgctaccgaagccccaggcacggcaacgtacactgcatcatctatgaggccagtcatgctcataatgtcccagataatattgatgatgccctgcttcatatcgatcttaacctccctggcaagctgttcaactcatgtgatgaaggcttaggactagtaaagcaactagctccattgtggcggggcttgaggttgattccccgcgcccacacccttgttatttgcagtgatggggacacatctgaggaagggggggccgtatttgtgcgggagaccgaggtcgatcagtgccgaagggcgtgcatgaggatctccagggccaagcgcagaagtgaaacctcggctcagctgcactgggtcatgcaggaggtcttcgctggccttgtccctaatctgatcttcaccggccagcgtatcgaatcaccgagcaaaggagccggggcggttaaaagcgctgtgacgtacgctgcaaggcaggagcgtcgtagccagctcaaccaggtcaagaacagcgtaggattgctggcgcaagaggcgcctcgggagctgtatgagctgcatgccgagattgagcgggtaaccttggccaagatgatcgagcggtatcagcaaatgcttgggcaagaattgcccgagagccactggcagcgtttcttcgaagacaacatgttcatcctgagcatggtgttcgcacgccctgtttcgcttttgcacacgcaatttcatgcccgcggatccatgattcacggtgctggcgctcacattggtgacctgctaatagcgcaaggccgtgaactggcgattgtggaaatcaaaaagccgtcaacgccgctcatgcaaagcaggccataccgcaaccaggacgtttacgggccgcatctgcagctcagcggcgccatcacccaagtgctgcaccaacagggcctcatgcgctcgaattggctctcacaccttcaagatagggccatgcgcgatctgcatccagacaccgccaggtgcgtcgtgattgctggcaccaaacccactgaggaaagtcgccgtcacagctttgagctgttccgcaatgcttgtaaggatgtggaagtggtgacattcgatgagctgctgggcaagctgcaactgctcgctgagcaccttgtacctgcggggcccaaaccagtcccagatgtgttttga

SEQ ID NO: 62336 - DNA, 1488 bp, Pseudomonas sp. WCS374
atgccatctatgcgcccttcacagtacgccatgcaacagcgcgccgatggcggcccatttcttcgttttgacaatggcgaagcgagagggctgagcgaggaagagctcgaagcaatcgaatcgggcgagtacaacgaaaatgacttccgtggcccgacacacgtttactacagcgatgtcccccttccgaacaatgcgccaggatggcatctcattttgatggtcaccccggactatgccactatttacccaatcatcgctcgctcggaaaactctgaatacggcaagcccaagtacgacaacatcaagtcgattgtagtcaccgcacctctgtacggtgactatacataccctaccgatcaagatgagcttgatgccttgctaggacttcttcctgccgggcttaccaaagactggcgctatggtcttggcttccactatgagtaccgatacatccttcaggcattgaatgatttggagggggtggacacacttatcctgcatgggggccctggaaactccgatgcgaagatcaaaggcaacgagttctacttaggcgtcgaacggcttgaacgactgaggagaagcttggataggctaacccagcggcatcagcgagaaactactgcggacaagaagctcgtttgctacacagggctactgcataaagcagatccacagctccatcctccccgtgaacgaaagctgccgtcagatcttcttgccaacctggtaacgctggggtctgttgcgcctcgcttatcatctaaagaccaaaagcaggtcgcgaagcttgcccaacaaagtgtcccagcactggcgaaatcagccccgaaaaccctatatcagctcaagtccgagattgagctcatcacgctcggagaactcattgaggtctaccgaagaatgctggagagcaacgcctctgagagcaagtggcagagcttcctgagtgagcatcctttcgtgctcgacatggcattcggctatccagtgaagatgatttcagaacagccctatgtcggtggtaagaacctaagaggccaaggaggtcagtattcggattttctcatggcggcgaaggcaactggaaacctcgcactgatcgagatcaagcaccctgggcaagatttactcgggaaagcctaccgcaagaccttcgtgccctcttacgagctcagtggatccgtggcccaagtaatcagtcagagaagcgttctacagaagagcatttccaacctgaccgataccgatgaccacgatgaacgtgtctacgcacatgcagtggcggccattgtcatcattggccgcacgccatcaaagattggtgagcagcgtgccttcgagcagtatcggaacagccttaaggatgtcctcgtgattacctttgacgaaatgctgggtcggctcgagggcattcatcaagccctgacgccgaagccgccagtcgcgcacctgcccctcagtgatgaagacctacccttctga

SEQ ID NO: 62337 - DNA, 1434 bp, Burkholderia stagnalis
atggcagcaaagaaacgtcagcggcaaaccaggtggtatacggatgccgaggtcatggagccatcattccggcttgaagctggtgtgaccgaaaatggcgtggaatacagggatctgttcatgcagaccttcgagcaggacacctcggaacctcgtcgttggcagagcctgcccgagtccgattggcatcaactggcaagggtgtttctgaaagaaatcatcacctatccggtatttacgaatccgcatgcactgcggtacctgagcccacggcatggtccgttcagaacagtcatctatgaaaagagttttggaagcgatctgccggatagtgctgcatcggcggtctcccacatcgaacttgcgcttccatggcgcacgtccaaccagtgcatctttggactggggctcaccagggatttggaagaaatctggcgaggcctgctgagccttcggaaactcaacaccctcgtggtggcacgcgatggcgcattgcgggtggacggcgacacggtgcgaattccggagagcgaagttgaccggatacgtcgtgctttcgaacgcacaactcgcaagatgcgcgacgtcgcgaaacaggcccgggtgactcacatccgcaatgcgcttctggccccgctggaccctaagcggtttccaccgattgtccaggtcaatccggaaggccaattggtcgaggttcgcctggaccggggcaggcaaaacaaagacgccgctcgctccgggcgaaaagccacggtgaaagcagtgcgcgccaacgtggaaacgttggcggccgaagcgcccgaggaactcatcgagctgcatgccgaaattgaacgcgtcacgctggcccagatgattgaaaagtacgaggatatgcttcagaagggcctgcctgagacggcgtggcagaagttcttcgagcgcaacatcttcatcctgaccatgattttcgcccgtcccgtcaggctgcttcatactcagttccacgcccaaggcggaggactggacggtaccggcgcacaaattggagatttcctgctggccgaaaaaggcttcgccatggccatcgtggaaatcaagacacccgcaagccccttgctgcgcccaaaggcctaccgaaacagggaagtgttcgcgccagacgaagacctgagcggcgcggtgtcgcaggtgctgtaccagcaaagcaagatccatgagaactggctgattcatcgggtacggcccgagctccaggattcgcgcccagatgccatcaagtgcgtggtcatcactggcatgttgctcaaggatgaaatgcagcgccggagcttcgaggtgtttcgcaatgcctgcaagaacgtcgaagtcatcaccttcgacgaactgctggacaaactgaagctgctgtcggagcaccgtaagcgcttccccagcaccgtctgttcatga

SEQ ID NO: 62338 - DNA, 1458 bp, Burkholderia stagnalis
atggcagcaaagaaacgtcagcggcaaaccaggtggtatacggatgccgaggtcatggagccatcattccggcttgaagctggtgtgaccgaaaatggcgtggaatacagggatctgttcatgcagaccttcgagcaggacacctcggaacctcgtcgttggcagagcctgcccgagtccgattggcatcagctggcaagggtgtttctgaaagaaatcatcacctatccggtatttacgaatccgcatgcactgcggtacctgagcccacggcatggtccgttcagaacagtcatctatgaaaagagttttggaagcgatctgccggatagtgctgcatcggcggtctcccacatcgaacttgcgcttccatggcgcacgtccaaccagtgcatctttggactggggctcaccagggatttggaagaaatctggcgaggcctgctgagccttcggaaactcaacaccctcgtggtggcacgcgatggcgcattgcgggtggacggcgacacggtgcgaattccggagagcgaagttgaccggatacgtcgtgctttcgaacgcacaactcgcaagatgcgcgacgtcgcgaaacaggcccgggtgactcacatccgcaatgcgcttctggccccgctggaccctaagcggtttccaccgattgtccaggtcaatccggaaggccaattggtcgaggttcgcctggaccggggcaggcaaaacaaagacgccgctcgctccgggcgaaaagccacggtgaaagcagtgcgcgccaacgtggaaacgttggcggccgaagcgcccgaggaactcatcgagctgcatgccgaaattgaacgcgtcacgctggcccagatgattgaaaagtacgaggatatgcttcagaagggcctgcctgagacggcgtggcagaagttcttcgagcgcaacatcttcatcctgaccatgattttcgcccgtcccgtcaggctgcttcatactcagttccacgcccaaggcggaggactggacggtaccggcgcacaaattggagatttcctgctggccgaaaaaggcttcgccatggccatcgtggaaatcaagacacccgcaagccccttgctgcgcccaaaggcctaccgaaacagggaagtgttcgcgccagacgaagacctgagcggcgcggtgtcgcaggtgctgtaccagcaaagcaagatccatgagaactggctgattcatcgggtacggcccgagctccaggattcgcgcccagatgccatcaagtgcgtggtcatcactggcatgttgctcaaggatgaaatgcagcgccggagcttcgaggtgtttcgcaatgcctgcaagaacgtcgaagtcatcaccttcgacgaactgctggacaaactgaagctgctgtcggagcacctgacgccacatgaggagccgccgcgcgaggtgacgcaggatgagctgccgttctag

SEQ ID NO: 62339 - DNA, 900 bp, Burkholderia stagnalis
ttgcttgaccagggctacatcattccgcccgcgacctatatcgagcactacgaaaccaacgacggggcatttgattcgttcgacaaggtgactcttacgcctcacgccaattgggaaaagctgagtcgaggtcgggtactggaaatgattggtgatgaagatgtcgagctatctgatcgatcttccaccaacccgcggattgtcgctcaagcagaaagacttctgtttcgccaagatcccttcatcggatctaggtaccccgagagtaatgaggtcacgaagcgccgtctcgaaattatcgggagcatggtctcaaaggcatccgtagaggcacttgttcaatccgggagtggagagcaagagctgcagcgcctgctgaaaaccgacctatcaatctttggcgaggcatacgcaaaacccgacgacgagtacatttgtttctctgaatttccacttgcagacggatccgttgacttcgtcgtgtttaccggacgctccaggatggatatcatcctcattgaggtcaaaggtgctgaattcaatcttctgaacgccaatcactacaaggcgttcaatcacaaaatcaccgaggccgcggggcaaatctctcaaaggctaggcatcatcttccgcgacttgaacagcttccggaaagaagcgcatgcgattaggaagcgggccgaatccggcgacacactgtataacgcttttctaggtccacgcagcaagctcggcgtcgattctgacaaggacataaatttcaggtgtgtcgtgatcggtgggcgatctcagaacgatctagaggagagcattaagcgtcaagattatgaagcccacaccacgcctcggattcgtattgaatcatgggatacgtggctgagacggttgcagcgcatctga

SEQ ID NO: 62340 - DNA, 1458 bp, Burkholderia stagnalis; identical to SEQ ID NO: 62338

SEQ ID NO: 62341 - DNA, 1458 bp, Burkholderia stagnalis; identical to SEQ ID NO: 62338

SEQ ID NO: 62342 - DNA, 1458 bp, Burkholderia stagnalis; identical to SEQ ID NO: 62338

SEQ ID NO: 62343 - DNA, 1458 bp, Burkholderia stagnalis; identical to SEQ ID NO: 62338

SEQ ID NO: 62344 - DNA, 981 bp, Burkholderia stagnalis
atggtggctcttctgactgatctgggaaacaaaaacgatggtctatcggtaacgaatgctgttgaagtcatcatcaaatctttgcttgaccagggctacatcattccgcccgcgacctatatcgagcactacgaaaccaacgacggggcatttgattcgttcgacaaggtgactcttacgcctcacgccaattgggaaaagctgagtcgaggtcgggtactggaaatgattggtgatgaagatgtcgagctatctgatcgatcttccaccaacccgcggattgtcgctcaagcagaaagacttctgtttcgccaagatcccttcatcggatctaggtaccccgagagtaatgaggtcacgaagcgccgtctcgaaattatcgggagcatggtctcaaaggcatccgtagaggcacttgttcaatccgggagtggagagcaagagctgcagcgcctgctgaaaaccgacctatcaatctttggcgaggcatacgcaaaacccgacgacgagtacatttgtttctctgaatttccacttgcagacggatccgttgacttcgtcgtgtttaccggacgctccaggatggatatcatcctcattgaggtcaaaggtgctgaattcaatcttctgaacgccaatcactacaaggcgttcaatcacaaaatcaccgaggccgcggggcaaatctctcaaaggctaggcatcatcttccgcgacttgaacagcttccggaaagaagcgcatgcgattaggaagcgggccgaatccggcgacacactgtataacgcttttctaggtccacgcagcaagctcggcgtcgattctgacaaggacataaatttcaggtgtgtcgtgatcggtgggcgatctcagaacgatctagaggagagcattaagcgtcaagattatgaagcccacaccacgcctcggattcgtattgaatcatgggatacgtggctgagacggttgcagcgcatctga

SEQ ID NO: 62345 - DNA, 1458 bp, Burkholderia stagnalis; identical to SEQ ID NO: 62338

SEQ ID NO: 62346 - DNA, 1458 bp, Burkholderia stagnalis; identical to SEQ ID NO: 62338

SEQ ID NO: 62347 - DNA, 1458 bp, Burkholderia stagnalis; identical to SEQ ID NO: 62338

SEQ ID NO: 62348 - DNA, 1458 bp, Burkholderia stagnalis; identical to SEQ ID NO: 62338

SEQ ID NO: 62349 - DNA, 1458 bp, Burkholderia stagnalis; identical to SEQ ID NO: 62338

SEQ ID NO: 62350 - DNA, 414 bp, Burkholderia territorii
gtgcaatctagcagcagcatcggcgtcgggatcacgagcaacgttgcgcttgaacaaagcaacgaacgggttgccgacatggcgttcctcgttcagcaggccgcggcccgccaagtcttccttgaccagttggatgcgctcgcccgggatgccggtaccaccgaagcgatcatgcacaaggcactggagcgcaatttgtgggtgttcggtccggagtactcgttgtttagttcgaacagcacgttgcggcgacaagtggaagagttgctcggcaagacgtacaccggggacagagccgacaagcggccggatctgctactgaacgaaaacctcggtggcgactacctactgatcgaattcaagcgaccgggacacgcgctgaatcataacgattacgtccaggccattggctag

SEQ ID NO: 62351 - DNA, 414 bp, Burkholderia territorii; identical to SEQ ID NO: 62350

SEQ ID NO: 62352 - DNA, 1224 bp, Burkholderia territorii
atgggcgacgattacgagtattttcgcaacaagcgcaccgatcgcgtttatctgagccgttcgctgtccgataaacaattccgtagggctgaggacgggagcctcgaagaatttgagcgcccctttcgcatcgtttcgaaagtcattgattgtgccgagtcgcaccagtttttccgcgacggtaggcaggtatctctgcgaatcactgatggcgcgcgacaggagatcaaggccaagttctatgaagatactcgcgacgtatcgacactgagcattcagcgatataccgtggaaagcggtagtccgcacagcacctactttaccttcgttaatgacgaaatttcgatcctctacaatttcctcagaaatattcaatttctgccgctaagggacgaccaaagcgcgaagctcgacgataagtttgtagaaagtctcgtgctgagccgagaacaggctctcgaacttctgaaccagcagcctgatctgcttgacgagttggttcgaagtcgcgtgacggcacgtgaagttgcggagcttcgcctccgcaaggagcagcttgaagagttcgaacgcttattgtacgacgaggcgcactttgagaaacgaaggctcgaaacaggcaaagtcggcggcccggaggcagtatggcaacggtatttcgaaacgaatacttggatttttggctacgggcttaattacgttttcaactcggcacttgacgataggaagcttgagcaggtcgttcgtgggcatgacatctcgggtgcaggaaagcgcgtcgatgcgcttctaaaaacacatggcctaatcagtgctgtatcgtttggtgaaattaagacacatgagacaccgctcttgaagccggttgccagcccttatcgtaaagaatgctggcaaatctccgatgaactcgcgggagcgatcgcacaagtacagcgttcagtgcaagtctccctcgccaacattcgatcgcggctcgatgtaagaggcgaggatggcgctccaagcggcgagacgctatttctctaccagcctcgttcgttcctcatcattgggtcgcttgcggaattccgggcacggcacggaattaatgaagaaaaatattcatcgtttgagctgttccgcagaagcgtgaccgccccggaaatcatcactttcgacgaactttacgaacgggcgcgatttatcgtcgaggccggggagcacgagcgccgcgacgcgtga

SEQ ID NO: 62353 - DNA, 1263 bp, Burkholderia territorii
atgaaaacaccagcgattcaatttaagcccagaggcaacaagctccagctgatttaccgaccacacgatggcacgcaatggatctataggaaattcaaagacggtgatgacattaccgtcaagggcacattccgactgacgcgcgagatccttgtcaacgacgatgtcgatgagtggagtgaggttgatgggcgggagcctcgaactgacccggacgaattcgacttcgacgtgggcggcgaggaccgaatggacttcgtcattgcatcagcaaaaggcaaatacttttggtttaacccagaggtcttggcgattggtgttccggtgttgttgtatcgccaggccaggcccacctggaaatggttttgtgccgagaaaaggacatccatcctgggcgttatcgctcagctcaagacgagccggatcgtgatcggcggccccgagccggatgcgatccccgtggtagagttcgaaaagcttattgcccagtttccgacggcgcatgagctgaagcgatacgttgttgcacggattagtgggatcgttcgtgagtatacggacgctgagatcgacggcgaagagcagcttagaaagacagttgcccgaaaggtgaagggtacgccgagggatctcgcagcacccttccgtgaagcggatatgcggaagtttgaatacctgctcgcgcaccttaagacgatgctgtccaagccgaatgagtacaaggaaacgcactggcagtctgagatcgtcaagatcatttgcttgctaaaccccaaatacattgaggcctttactggcgtgcgagtcaaagattttgatagaggtagctatcggattctcgacatcctgctgctcgatgcgtcgggcaacatcgacgtcgttgagatcaaacggccattcggagatgctatggtcactccgcggcgctatcgcaagaaccacgtgccaatgcgagagctgtccggtgcggtcatgcaggtcgaaaaatatctgctgcacttaacccgatggggcaagagcggcgaagaggagctgaccaagcgctacgcgtcgcggctgccgcctggattcaaggttcgagtggtgaacccttgtggcatcgttatcatgggacgcgatgccgatatgacgccagaccaacgtgatgactttgaggtcacgaggcggcactacaaacacatagccgatattgtcacctacgatgatctgctgcggcgcctcgaggcggtattgagcaagctcgcgctaagcgctcaggtctga

SEQ ID NO: 62354 - DNA, 1080 bp, Halomonas sp. KO116
atgtgggaagcaattgcatatgtgagctcaggctttacattggcagcgttcatcgctgcagcagttgcttggattttgaacaaaaaatcagaagaaaaaggcaggttgattgaattagctgattcaagtacaaaagctcttctcgtgcaggatgctttagagttttttcatgttaattctgataacttgaataaagagcagcaattcaatttggcccttgaacaaataaaaaatagggccagcagatttaaaactattgcgatattagttggacttattgctgtgcttgcgactgcattatctgcgtatgctattagcaagatggacaatagttccaataatggctcccctgctgtgccgagcttgcaagaaaaaagtatatctcgatctgaaatttttgaaggattaatctctggtctcgctgacgttaatgaaataaggcagtttattgatgacaataggtggatgcttggtggtgctccagtatttatttcaggtctgccggaaatagagtctgtaagagatttcccagttgaagatggatttgtgccaaatttcacaagattcatttttcagccacgaatgtcacaggttcctgatcatataattttctttgatttttattctcctgatttagatatatttgatagctctacatttttaacagaacatataaacgataaaatatttcgaatgcagaaatacatatcaagcggacatgagaattacaatgaatatacagattccgcagcaaaattagcaaacttttctatcccgctatcaacaatgcaaggccattttcgtgcacgatttcaaggggtaattgttgttggtagaaggggtcgtttgtcagtgcagcaaatcgaatatttatctgcgctcaataaagaccgtaataatgatgtgataataattacgtatgacactcttcttgagtatgcaagacttgcggaactatatacgattaaaggagcaagcctaacaaaacaaattcacgcggacggccaaagcggcgctttgccaccggttatttgtagcgttagccttttgggggagactagccatcaactcagaaactga

SEQ ID NO: 62355 - DNA, 1215 bp, Streptomyces sp. NRRL WC-3618
atggcgatattccggtccagctactcgctcaggctcatggtcgaagaagcgcgaaaactcaccgagcacgctggcgtgcgtgaacggatcgacgcggtgctgcgcatcatgggcgatggcttcggcgggacgtacggcaagggaagaccgctggtggacgccctggaagatgtggcccaacagtgcctactccatgaggagttcgcgctagctcagcgcttccagaggttcgccggctacgcgggcggcaaactcttccttgacaccattgagaattactacgatgcggaggcgcggcagcggagcgaggagttcatgcggcgaatggcggcaatgggtacagagcgcgccgtgtccgtcctggaggcgctgcgcgccgagaatcccgatgcgagtgtcaccgacgcccttgctctcttccgcggcatcgcccggtccaccggccatctgggtatcggagacggcgagggtggaatccaactgtccaccaagtacctcaagcgcctccaggcgtacgggcacatggaactgatcctgcgggatctgccccggccggcctccgccgaaaccgcccggatgatgagcgagttcctggaagatgcggatgctggaatgctggctcagttgcttgaactgcgggccaggcgggcgggcctcgcctccctgcgtgccgcagtgaaccgccctgagagctctgagggtgccctccactcctgcctgaggaatcaggagtggatcttcggcggtgccttcgtggctgagctggcccgccgccagtacaccccggacaccattctcgacattccgctgctgcgaggggacggctcattgcaggtagtggaactcaagcgcgccaacatcgagaaactggtcatccgacccagcggccaactcatgctgggcgccccggtccaccaggcggtctcacaggcgcagaactacctacggactctggacgagggccgtgaagccatcctcgcgcgatacggagtcgacacgcgcagggcctctgccacagtcgtgatcgggcatccgcagtacgtgagtgaggggatcacgccccagcaggtagcggacacgctgcgaacctacaacacgcatatggcgcgcatagaagtgatcacctacgagaccttgctggattccgcggagcggttgctggcgctctcggcggacgagcagagctccggcccagttgacggacacacggcatga

SEQ ID NO: 62356 - DNA, 1200 bp, Streptomyces sp. NRRL WC-3723
atggtgctggagcggcagctggggcaggtacgcggcgcggccgccgacgaggccgtgcggtcggcggtggacgcggtcttcgtctacatgggcagcggcagccccggtagacgcagacagggcaaggaactcgtcaggctcatggaggccgcccgcaagacggcggcggaggcgggggagtggcacgtcgtccggctcttgcaggactcactggactacgcggagggccgcatcctccagcaggatctcgaggagcggtaccggatcttccaggacggggcgcgcagagaacgatcccgtgacttcgtggcgagcagcctgcggaccatgcaccagtggctggtcgccgcgggcgaggcctacctgagggaacatcccggcgcgagcgccgaggagacgctgagccatttccgggcccaaggggaggacgccgcgttcctgcgggctccggacgaccgcccggggcgctacgtgatcccccgtggggcggccgagatctcgctgtggctggagcggctgctgaggagcgagcggatcgacgtcgcggacccggcggagtcggctcgcaggatcgtcggctctccacaggccatggccctgctcgccgccgaccgcgagggacggctgatcctccaggccgccgagctgcgacgtcgggccgccggtctcgaggagctgcgggccgtcgtggaggaccgcacggccaccgaggcggatctgcagcgcgctctcgaagggaaccactggatcttcggcggccggttcgtcggcgaggccgcgcggcgccggctggtgccgggggacgaggtggacatcccgctcatacgcggtgacggggcgctgcacatcgtcgaactcaagcgggccatgagtctcgacgcgccgctggtcaaacgccaccgccacgcatgggtgcccgcggcgcacgtccacgaggccgtcgggcaggccgtcaactacctcgtcggactggacgagcaccgtgcccgcatccgcgaggaactcggcatcgagacccggcgagcgggcgcgctggtgctcgtcggtcatcccggtctgcaccccgacgtaccggagggcgaggtcaacgagacgttgcggacgttcaactcgcacgtcacccgggtcgaggtgctcacctacaaagagctgctggacaacgccgaacgctccctcgccggaggtgtcgaaccggtgtag

SEQ ID NO: 62357 - DNA, 1170 bp, Rhizobium sp. AAP43
atgagcagcgaagaagagattttccttaattcccggcccgacaagacctacgcaagcccggccttcactgactacacgggtcggaagcttcgcatcgccaacaaatatatcgatggcggtcccggctaccagtttgccaacgtcaaagaggagcttgttcttcgacaaaccgatgctgggcgcttccaaatcaaggcgacctttctggaggacgaccgcgctttccagacggtgactatccaaaagttcacatcgaagggcaatgccaaggagtatttctcctttggggtagacgagatgagggctctgctgaagttcatctcgaacatccagaagattcattttccggatgacggtcgcttgaacatccgggacagcgacctcgaagaacttctcctagagccggaccagcttcgtcgggtcgcagccgacaaccaacagcttctggccgctattgcccggaatgagataacgactgaggacgtcgtggccctctcataccggaaaaagcagctttcgatttttgagcgattgcttaccgatgcggactattttgacgagtgtgtcgcccatcatggaagggggccagaagggctgtggcagcgcttcatggagaagaaccattggattttgggctactccctgagcctgatcaattttggccctctggacgagcggaaattagaacagacggtccgtggccatgacatcgacggtccgggcaaacgcgtggacgcgctccttcgatcacgggccgcgctcactacctcggctttcgttgaactgaaacatcatcgcaccgacttggtcgctccagatcagtaccggtcgggtatctgggctccctcaaaggagctttcgggtgcagttgcgcaggtccaaggaacagtcgccgccgccatggaccgttggggcgcggcagtccgcctgaccgatggcgatggcgaaccgaccggggaaacgatctacactacggagccgcgttcctttgtcatttgtggccgtctgagcgagttcgaaggcgagaatggggtgaatgagcggaagtttgccagcttcgaacgtttcaggcggaatttgctccggcctgaaattataacattcgatgagctgtacgagcgggcacgtctcatcgtcgctgcgaacgattcatcggaaaagagggtctaa

SEQ ID NO: 62358 - DNA, 639 bp, Sphingobacterium sp. ML3W
atttggaacattgaagaagttgaaaaaaaacttttaaaggcttatcttaacgattcagaaactgaacttttggctatcctgaaaaataacacttttctattttatgatctttttacaagaaaatatggtattcaaccaattttccgagaactaaattttggaaatgaattcaggtgtgactttgcatggcttaatgataactcttccggtcctgaatgggtattggtcgaaattgaaaagcctaaaatgaatctttttaaaaacgataataaaccaactgctccttttcaagctgctattgaacaagtcaaaaactgggatcaatatttccaacaacatcctgcagaaaagaaacgaatatttggatctgtagctagatttagattaattctggtcactggaacacatgaagaatggcagagtgagcagggaaaaagatggagagcatatcaccataataacacaaacattgagattcgttctatgcaaacattttggaaatccttaactgccataaaaactaaaccagaagagttttggagctttgaagaaaagccaaaaacactttctcattcggcattaagtgactactggaaaaattatgaatatatggataactggagaggaattgatttataa

SEQ ID NO: 62359 - DNA, 1029 bp, Pseudomonas sp. 10-1B
atgactgacgatgagtttgagaaggtgatgcactcattaaaactcgcacgagatctccgtttagcaaccacaacggatgcacatcagatcagtgatgctctagcatttaagctttcggagcactttgatcccgagggggatatggaagcaagtttgaatgaacaccttgagtctattgaggaagagcagcagagaacagtaaggtctgctcttggagaaaatcctgatctcgaacgcttgaataaattatttgaaaccgatgccgagtttgagagggcaatagctactgggaatgatgcacgcaacagcatcaataggttgaaggagtatatgcaggagaactatttggatgatgaggcaaaggaatttgctgctctttgtattagggcttttgccgatattaatacaatgcttctggagaaggatgtggtgcctttgataaaaagaggtatctattcagaagacatagcttctgcgatttcggtttggaagaactcttttaaagataaagagagtgatgagggcttttggcaggaagagctatctgctcgcaaaggcattctcgaaaggctaataggtggccatgctgtatttttacagcgcgaatttcatgttggtagtacagatgttgagggcaaaggaggcaggcgttcagactttgctctgatagatggaataaataataatgtaactctgcttgagatcaaaacgcctggaacaaaactgctaggggcaagctatcgtaacacctttccactttctaccgaattgtctggaacgattagtcaggttataaatcaaaaaaatgaattaatgaagactttttatgctaaggcatataaaagtaaaagtgtatttgaggtgttttcacctcggtgttatgtgattgttggcgatttagaaagtttgggtggcgatgaggagaaactaaaagcgtttgaggttcagcggcaggctgtggctgcgcatgtaactatagtgactttcgatgagttgtatcatcaattttccaccttcaaccaagtctga

SEQ ID NO: 62360 - DNA, 1179 bp, Flavobacterium sp. KMS
atagatttgaactatatgaatacgggaagtgttgacaaaacatattttgctcgatcatttgtagataaattcacaggacaaactgagagatttgcgttcaagattttagacgataatcaaacggagtttattctacgaaaagaagcgattataggtacttcttttctcggaaaaagagcattaaaagcactattctacgaagatagcagaaatataaaaaaactctttcttcaacaattcgacgcaactgagttaccagtaaaaaatttgtctaaacaagcatcgtttactgaagatgaaatagaaagactatatttatttttgaagagcattaaagaagtcgaattcccaaacaatcaaacttacaatataaaggatgatgatttacgtaaaatgctcttggatgataagcaagcaaaaaaattgattttagaaaatcttcctcaattacaagaagctcttaagaataatgtaactacgagtgacattattaactatggttataggaaagctcaactcgaaatatttaaaaaattactctatgaagatggctttttcgacaatcataagcaagccttaattctcgaaggagaactatcatcaaaagctagagacgaggatttatggcaatcatttttcgaaaaaaacacttggattttaggatatggcttagaatatctttttaataccgaattagacgataaaaagttagaacaaataactagcggtgctaattttaatgaaagtggaaaacgaattgacggtttattaaaatctcaaggtgcgataaattccctttgcttttgcgaattaaagcttagttcacataaccttttgaaacaggttaagaattcttaccgcccagaatcttggcaaatttcagattcattatctggtgcaattgctcaggttcaaagaacaattcaaaaggcaatttttgacataaaaactaaaattgaaattgtagacaaacaaggtgatttgacaggagaagaactttatttatacaatccaaaaggatttatattgataggtaatcaaaatgaatttatcactgaaggcagaataaatcaaataaaatactcgtcatttgaaatgtttagaaaaaatttaaaaaatattgaaattctaacattcgacgaattatatcagagagcaaaatatatttgtgaaaaataa

SEQ ID NO: 62361 - DNA, 780 bp, Paenibacillus sp. IHBB 10380
atgaaagtatatgaaagagattacactgttttaacaagtactgagagaagcgagtatgatctaattctagagaaagaaaaagtcgatagactaggtgagttagatattagagtgaacctttttaggaaatatcctaaagcagccagacattttttgagcctttttccgaacaattatttagatactgtagatttagaaaatagtgaagaaattaaatctgtagtgaaccagttcttaacaatgttgaacgatggttcaattactaatgagcgtgaaattgcaagatttattcaagaaatcaaagcgtattatatactaggttcaatttttaattattatgattttggacatcacgaagctttcatatttcctgaatttcaactaagttctacttacaaagttgattatctattaattggtcgtaactctgatggttactcttttatttttgtagaacttgaacatcctgaaaagcaaatcactttggcagatggtgaacttggaaatgcttttaggaaaggaataaagcaagtaaaggattggagaagttggatctttggaaatttctcaactttaactagcactattataaaatataaacatccagataagcaattacctgatgaattttatacatttgaccctactcgatgtaactacgttgtagttgctggaagaagggaagatttaaatgatactactcgtagaattagacgagagcaccttgaggaacaaaaaatcaggcttcttcattatgataatatttgcgatatacgttag

SEQ ID NO: 62362 - DNA, 1224 bp, Mycobacterium sp. NRRL B-3805; identical to SEQ ID NO: 61849

SEQ ID NO: 62363 - DNA, 1230 bp, Bacillus sp. BH072; identical to SEQ ID NO: 61812

SEQ ID NO: 62364 - DNA, 267 bp, Pseudomonas sp. HMSC05H02
atgtccggatcatttattcaggtgttaaattacaaagaccaactgatgaaagagtattacaagctaagcgagggcgacgaaggtagttccttttctgcattcaacccaaaatgcttaattgttattggcacgcttgaatcagagcttaaagatgggaatcaatacaaatcttttgagctattcagaaatagcatgacgaatgtagagattgtcacttacgatgagctttttcaaaaggctcaagacattttagatatggtcaaataa

SEQ ID NO: 62365 - DNA, 609 bp, Grimontia sp. AD028
atgaacgatttaataaaccttgtagataaagaacctttagaacagcctgtacaagagttccttgaaaagtgcccgtcggcaatttgtggtacaaaatatataatgggaaactgtgtaatttcaaagctacctcttggtaatgaatacaaaactgattttgcttatataaatccccaatcaggctatacatttctacaccttgttgagatagaaaaaccaggaaagtcaatattcacaaaaagtgatgaattcactaaggaattcaaccaagctcttcagcaagttaaagactggcttttttggtgttctaataactcagaatatctatataacttgttcgaacctctgaggcaaagatcgggtgattccgtagggtactataatgctcgagggttattgatttatggcagaagctcagaaataaacaacattcgaagaaaagaacggtggacccagcaaaccacagaaaataactttatagagataagaacatatgatggatttgcgagggaaatgagttcctttttgcctccaaacaatttgtacagtgaaatgattgacacatatcattatgttcaaagagaattcaaaccaaagaaattggcttaa

SEQ ID NO: 62366 - DNA, 1264 bp, Paenibacillus sp. VKM B-2647
atgagcaaaaaccagctggttcagaaaagtgaggtctacgcttaccatactgatcttcgaacgatacattataaaatgtcctctaattttataacttcagaaattattttagatgggtttcaaacattccctactcacttttataaaaatggtggaggctttactgagtacataagctcatttgcatttacagaaggcttaaaagagtatatgggtgtaggaaatagtcacattcagaaattaaccatatcgaataataaatcgacatcaatacgaaaactcaaagggaaatttagcattaaccttcatcatgatgattttgaaaaattatttacactatgcatcataggaaaaagaaaaggtactagtctatcaatcaattcaattgctgaattttttcataatcgtttccctgcattttctaaatattcgcctgatcaaaaaacagattcagaattgaaaaagatgttcctgtcttcactggacgaaggattaattgataaattaagcaaagctgaaatcgaaaaagtacaagaattttacgagaaactacttggaaagaattcagagaagcatgattttattcttagaaatgttcttaaggtaaagcagataagtctcgatagtattctagatgacttttctgaaaagctggcaaaaaaaactcaagaatcaagttggcagaagttttttgaaaaaaatatattcattttcgattctagatatattgattttttgccaaaattcaatttgaagtcggggagaaaagcagagcccgatttccttgtttatgatatatatgggttcgttgatatatacgaaattaagagacctgacacgtctttaataagatacgataatagtcatgataattactattggagtaatgagatggcggaagccattggacaattagaaaaatatattttttgggcgacagagaatagaacaagtatacagcattcgatcaaaatggatagggggcaagaggtaagtatcataaagccgaggggtgtattagtaattggtactaatatggaactaaatgattcaaaaaaacgagaagattttaaaatattacgtgcatcgttaaaaaatattgagataatattattcgacgaaatgtttaacagtttacaaaatttgagaaaagtaactactaatgtgtttccgctaatacgtaatgtccaaaaactgacggtaatggttgtccgaatcctgaccgatataatgaccagaacatcaatccagggaaaggaaaaga

SEQ ID NO: 62367 - DNA, 1209 bp, Leadbetterella sp. JN14-9
atgaattacatatatgaaaaaggtaatgacctagtattaaaatgtgtagatgacataagtgaagaaaattggattaaaaaacaattcgcggaccgaaatttagctaaaatcagaaaagctttcaattttaaaaaatccgatattattgatcagcgagaacttgatgcaggtgaggaagaaatggatggctttgaatataattttagaattggtactaaagtcggaagttattacaaactaagtaaaagtgtattcggaattgaaaatgatatatacatcaaagtcggttccgatttcacaatgaaacactttgtaacaactaataatgcttctgtcataaagcgacttgatgacttaattatagaacctttatacattggaggagatgaaagtgggaatggtaagatcccatctaaagagtacaatgaactattaaaactattaccgaatggttatgaggtaaaactatattcaaatgctcgaatagaaagtactctatcaaatttcttggaaacaaaagaaagttctacgactaaatttaataactacctaaataaaaaacttgaacaactaaacaatccagatttagcgaaactttttgatgaatatgaaatacagaaattgaatacaattcttgagcatttagaagacatgcttaaaagcgagagaaaatattctgaaaaacaatggcaagatcaaattctgaatattttaattctgctcttcccaaagtatatcgcggtatttaaggaagtcaaattcaaagatatatactccggtaaaacgagaagacttgattatgttcttgttgattatttaggccatatagatattatcgagataaagaagccaatggaatcagcaatgatatcgaatagtcattatagagataatcacattcccaagagagagctatcaggaaccataatgcagatagaaaagtacatttactatctcaataagtggggaaaaaaaggagaggatgaacttaccaaagagtataaaaattgcttgccgaaaggaatgaaaataagaataacaaacccaaatggactaatagttatgggtcgagaaaacaacttaactattgaacagttaagtgatttagaaattattaagagaaaatataaaaacgttattgatatcatctcgtatgatgatctaattaaaagaataaaaattacaattgaacaaatgtcaaaagtttag

SEQ ID NO: 62368 - DNA, 897 bp, Streptomyces sp. NRRL S-495
ttgcagacggtggaggctgacaccagcccggccaggccgagggccatcgatgacaagcagtacaccgcggcgctccacaacgagtggaaggccgtcctcgactctgccgagaatgagcgctcggtccaggagttcctggagaagcacccggcgcttctgccaggatcgaacggcgtggctggcgtcggtggccaccacggtccgctccttcactgcgtctaccgtgagccgaagttgcagggcttgggaaactacaggccggacttcatgtggatcgcccggcacagcagtgtgatcacgcctgtctgcatcgagatagaggacccaaggaagcagtggttcacgcagggcggcttgcccacagcagaggttacgcaggcgatggatcaactggtcacctggaaggcgtggttcgataagccggagaatgagctctggttccgcgagttctacgaccttcccggtggttcacgaggaaggaagccgatcaggcccgcgtacttcctgatctacggacggaacgcggagttcgggcctggaagccgccataaggaccccaacttcttgagcacgaagcgcggcttcatggcccgcgccgacgaacagttcatgacgttcgaccgcctcagcccggaccgcggtgcgtgcaacttcgtgtgtgtgacccgaaccagcagcggcagggaagtcaagtacgtcccgccgaccttcgagacgggccccagtatggccgacacgctgctgaggcttgacggctgggaggatgcgatccgccggacggacggccttgaggacggacgcgcggactatctcatcagcagggttgagtactggcgtgagtatgcccggtcggtggagaccaacgggccccgtccttacagcctcgaccttgagtag

SEQ ID NO: 62369 - DNA, 708 bp, Pseudomonas sp. MRSN12121
ttgattgactatgtagacgatgaagagccagacctgtcggctctaggccttgttggccaggtcgtggaggccatagaggacttcaataacgtcatagttgcagacgacgtgttaccactgattgaacgaggtatttacgcatccgatgtggctcgggcactcgaggtgtgggcaaccaatcgagagtcgaaaaagggcgacgaggggttttggcaagaggagtttgaaagccgcaagggagttttggagcgccttcttggagggcatgctgttttactgcaaagcgagttccatgttgcgggtacagatacttctggagctggagggctaagggctgatttcgcgtttcttaataaaaccagcaacattagcctggtagagatcaaggctccggatactaagttgctgggctcaaagtatcgaggaacctatcccctatccagggatgtctctggggcgatttcgcaagtgttgattcagcgcggtgagttgatgaaacactacttccaaaaacagcattatgccccggtatcctttgaagtgttcgctccacgttgtttcttgattgccggaaatctcgatagcctggaagccgacccggtcaagttgaaggcgtttgaagttcagcggcaagctgtcgcatcgcatgtaaatatagtgaccttcgatgagctttatcagcagtttgcaacattcaaccaaatgtag

SEQ ID NO: 62370 - DNA, 723 bp, Geminocystis sp. NIES-3708
atgagtaaatctgaaataataccatctgcaataatttttaaaagtgatcaacaaaaaaaactatttcataatgctgaagataatgatattgatctttcagatggagtcggacaatttcacggtataatctcgaacgcaaaatcagaaaatgaagttcataattttttagaaaaatatcctgattttcttcctggttttacaaattatcatttaggtcctgctgccagagccattgtaacaaaacttccgttaggtaatgattttaaaacagattttgcttttttagcttacaattcaatggaagtttgcctaacaacaatagaaattgaaaatccaaaatataatattttcaatcaaaatggtaatttttcatctcatttcaataatgctcgtcaacaagtggaagattggatggaatgggcaacagataataagcaacaagcatttgattgttttggcgatttgggacaaataaattggaacaatacattaaccaagacatttaaagcatacttagttatcggtgattcagataaattggagttggaaatagaaaaacaacgatggtctaatctccaaagctatgaatcgaaaaacatttatataatgagttatcgtaggctcttacaaatgtcatccttagctcatatactttataataagaggctattagtttgttcatataaaaatagacaattatacgttaaaaatgttgcaggataa

SEQ ID NO: 62371 - DNA, 915 bp, Chroococcales cyanobacterium CENA595
gtgtttgttaacgctaataaaggtgattttcctcctgaagaatatagagttgaccctcacaatgtgacgggagatgatattgaaaaacttattacactgattcgcaaaaatgctggtgaaactgaaatcgacttgcttctaaaaaataggcttcccttactatcattaacttctagtttcttcagcacaggtcatcatagaagttggattattccacaagccaggattaagccgagcggttttactaatggtccagggctaagaccagattatctgtttgctggtgagaactcagatggggtaacttggtgggttgtggatttaaaatcacccaaagataccttatataaagaaaatggtgatggtcggattgtagaaacggacaaattgcgaaatgcaatcagtcaggtcgatgattacattacatactgcacaaaacaccaaggctctatcagaaacactttggaattaacatcattctcctctccgtacggaatcataattatggggagagaagcagaattaaaaagagatctaagaaaacaagagcggaaagcacagtttaatagaaggactcacactattcaaataagaacattcgacgcgtttgttagagaagttgagtttcattcaaaatgttcgtacaaattgccttttctaacaaagctttataagtctctttttgttattgatgaacttactcaccatgacaggtggtttatagatgaggatttgcaaataccaacatcagcacagcttcatggattgtatcgaataagttgtcaactaacatacatgatggttcaacccattcacttaatttgcatcaataatcaaactcaaaatttgtatattttggcaggacagagtgaggatattgaatttcaaattactccaactggtgaggtgctttga

SEQ ID NO: 62372 - DNA, 1254 bp, Berkelbacteria bacterium GW2011_GWA2_46_7
atggtacgagaagaaagaaccctatatcaccagagtctgaaaaccaaggacaagtatttcctgtgtattgatggcaagaatactaattatttggctatggagcggtcaaagaataagaaaaggactctttggtatccgttttggtacgaccgtgacctaaaacaaccaaagcaaaaatatagggaaataaaaggtattggcactgactacggaaagatacccagtacgggcttcacggccggtataaactctggttatggattcactcgaaaccaaggcgtagatagattcttctattacctaaccgaaaatcttaaaaaggaagttgaaacggtcatctttactcaaaaagagacgacaatcgaaaggaagaaacttttattaaatatacgtgattttggtcgcgtaagatcgcagacaaaatcttttacggaaagctcaagtaaagaagagaagcacctacataaaaccctgcttcacactttactgccgatcaaggtagatgaacctgaaaaacttatttacataccaggttctttaaagaggtatatgagtaaatacgacgacgcttcagtcactcttagcgctgacgatgcagagtcggttatccagaatttggatgtagaaaaacaggcggttctttctacgaaaaatgaagtcgaccgaatttatatagaagacgtgatctccgaatttaaagaaattatgtcccaaaagacaaatacgagtcaattagaagaaaggtggcatcagttcttcaagaaacacccatggatttttacaaacatattcgcatacccagccacttattttagggataagttcaacgtgggtggccaagatttgagtggagggtcggacaaaattgtagacttcctcgctaaaagcaactttacaaacaatgtagcgtttgttgaaatcaagactcataaaacgcccttaacacaaaaacgaccctacagaaaacccagcatctattctgttagttcgcacattactggctcaattgtccaggtagtggatcaaaagacaacatttctcaaaaactttcacgcacggaagggaagcgaagacgttgagtctcttaactcgtgctgtctcattgtagttggtagtataaaaagcttatcagacaaggataagagaaactcgtttgaacttttcaggatgagcaacaaagatgttcagattgtgacttttgatgagcttcaagaaaaaatggaaacactattatcattatttatcaaaaaatga

SEQ ID NO: 62373 - DNA, 1188 bp, Candidatus Beckwithbacteria bacterium GW2011_GWA1_46_30
atggcattagacccagaaacatctgaagaaaagatagttgataattattttaccgatactctatatagcagtcgggagtttaaaggtggagtaggaaagttttttacaatagtatctaaagatgaaaacagcgttccgattgaaattgatattgagcattcatatcctatacgcaataagataaaaacaacacttacattcatcaaaaaggaaaacgagattacctcaatttcttttaagcgtttcaagtattacaaaaaagaacattgggtcgaacaaccagaagaacaaattactttttcgtatagtctctttaaaaaaattataggatatttgcaattactatccgaactaaacttatcagatataagtgaacgcaggattgctttggctgacgacacactacttaatattaacgaggaaacaaagaagaaaattaaaactttgcttttgagcaaggacggtcaaaaaattattgaggaattgataaataacggcttaatcacatcaacggatatcataaacatcggatatcgaaagaaacagctcgaaatttttgagaaacttttgaatcaacctgattattttgcaacctatataactgaaaataaaattacagacactcgacatgaatctgtctggcaatatttttttaactcgaacgattggatttttgggtatggattagattatcgatttctcggaattttacaaaaggaagctcgtgtttcaagtacagatgttgcaggtaagggcgatgttagaaatgattttttgcttgggtgtaataaatttactgttcttgttgaactcaaaaagcacgatacgccattattcggaaaagacaaaaaccggtcaaactcatggactctttctgatgatttgatatccggtctatctcaaatactagagcagaaagctagttggcaagtttttgcggaaacaaacgctaatggaaattttgataacaatggaaaattgataaaacaaaaagccatagatccaaaaagtattttagttatcggctcaacaaagcaattcgagggtgaagacaaagaaaatcaaattaaggcaaagacttttgaactctttcggcgagattcaagaaatattgaaattcttacttacgatgagctttatgagagagcaaagtttattgttgagcataagaaaaaagattctgcgtaa

SEQ ID NO: 62374 - DNA, 1194 bp, Microgenomates group bacterium GW2011_GWF1_44_10
atggagcttattgacggcgtggcagaattaacacaaatctccagcggcgacttcagggctgtaaaatacggccaaattgttatttacttcgataaccagtgtaaatttcacgatcatttcggacacacgcggagaaccaagaggtttaagtattaccaaaacctggtgaaatacgtggaggaaaatcctagtattaagctctacttcacgctagaccccgcaattgcatcgtttgtcaaagttgtagatggctttctcattaacatggacgcctatcagcttttttgtcgatcaatagaacgcaaaactgagggaagattgcacgcatttcttggccaaaacctggacgtgcttagcactgaggaacggtctgagtttattcgggcgcacgcgactgatgaagacgtcaaggaagcattaaaaggttttgacccacagacccgagaaaacgtggtggcttttgccaagtccttaccacgagatcaggatgtccccgctggctcaaggccttctgaacccagcgttactgtggaagagtttttggttgcctttagtaaatttgccagtgaccctactgttcaaaccgcatttcttaaaaaattgccgcagattcagatagaaacacttaagtcgcatgtagaatttctaagagccaacctgaatcaaaacgaaacatttatccaaaactggattgatgaagaagatcacaaacaccgcaaaaaaagatgtttaatctttgggatcgagtatgtcgaccccaaaagggagggctttctaaatagtaagcggttcgacattcttgctgaacaaaacagaaaccaccacgtcatcattgagctaaaatcccctgacgccgacatatttaaagttgaggaaagtgctaatgccaatggtggcaaaaacacaacctacaacttgtctcctgatcttagtagagcaattccgcaggtgcttagctacaaagactggtatgaacgcactaccccagaagagctgcaaggcatcggtattgttgatcgaaaacgcgtttcaaaatgtatcatcgttattggtcagaataaaccagacgatgaagtttggatgagcaacttatcacgacttcgctccagtctcagcggcatggagatttggacttacacagatttaattgaaaagcttgagaacacgattgcaaatcttgagcaaaatctctaa

SEQ ID NO: 62375 - DNA, 1194 bp, Microgenomates group bacterium GW2011_GWF2_45_18; identical to SEQ ID NO: 62374

SEQ ID NO: 62376 - DNA, 1038 bp, Candidatus Woesebacteria bacterium GW2011_GWB1_38_8
atgagtaatttaattaaaacgaagtcgacctcgttagcttcagcagtaggtcaagacattgagttgcgatgtaccaaaagcacaagattagtattcagaccagaagttgtagataatttttcagaccgaagcgcatgtgtgcgtggtaattttatcttccaaagaaaaaaaatatctggacattgggaggattacaaatccttggagctttcaaaacttaaggaccatgaatggataaaacttgagttaaagtcaagtgaactcaaaaaattaatcatggaacttgataagtattaccagatatataaaaaatatggtattagatatggggaaacaagttttgtagtaacgccacaaaatgcaagggacttaattgaacaatttcttaaaaaccctcagaattttgagaaacttcaggagttaaaaattgacgacttaaaaaaattgaatttgatttcaagtatcaatagtctgaaaaatgtgttgaatgtatggaatgaaaacaaaaataatagcaacgagtctttttggcaaactttttttatgcagaattcttggattattgcacaaatatttgcttaccctgttatattaatccaagaccaagcatacgttggaggtaaaggtattgataataaaggaggaaatctggtcgatttactatataaaaacagctttacagacaatgttctgcttgtcgaaattaaaacccccacaacgccaattacaggtgccagttacagagataaattatattgcgcaagcagtgacctaagtggttcaattgctcaaatattggactacaaacatgagttgcggagaaattttaatgacctgacacaaaaatccaatggagtctttcaggtattcaatcccaaatgcatggttataataggaaaactaacagatgataaagtaagcgctgaacacaaaaaatcatttgagttatttcgtagcaattcaaaacaagtggaaattgtaacgttcgatgaacttttccaaaaagtaaaaatgctaatagaattattggaaggttag

SEQ ID NO: 62377 - DNA, 781 bp, Candidatus Woesebacteria bacterium GW2011_GWB1_44_11b
atggatataccaaaaagatttataaaagcaggaaacctcggatatccagaggaagaaattattgagaagcaagtcctcaaggatggcacttttgtaaagaaagtagcacaaactgttattgttgatcacaaaacacaagggcggcgtgtggaatctcttacgattgatgaattcaaaaagacaaagaaaaatgagccgtggcccgaatctgccacaagtagaatctcattagaccatgatgcagtaagaaatcttttgaattatctacttgcgcataaggaatttctgaaactccaacgttccagtttttatactttgattacgggaacacatgaattaagcgaacttaacgcatcagaattgtcaggggtggtgtcgcttgtgcaaaccgccgcaaagcagggaaagttagcggaaattgtcaagccagaggcgttgcagaacttcaatgccgcaataaatcaagcaaggtataaaagtgctatagatcaactttcgcaaatgctctcaaacgtggcattaagcgaggatgattacaaaaaatggtttttagaacatcattgggtatttggaactgattatttgggaccggaggacagaacaaaaatcggctgggcggtcaaaggcgatattattttgagaagtattgatggataccaagatttggttgagctaaaactaccaacggcagaagttctaaaaaatgacccatcgcacaataattggtttccgtctaccgagttatcaaaagcgttagcgcaagtaataaaatattttcagg

SEQ ID NO: 62378 - DNA, 1230 bp, Candidatus Nomurabacteria bacterium GW2011_GWA1_36_15
atggctaccaagaaaaagaagaaaaaacttgaaattccagagcaacattttgactcaaaagaaggcaaattttgtgtttatgaaatatatcgtaaatcaaaaaagaccgtttattttcttcgtggcacacagtcaaaacatatagacaaaatcaccttagaaggatatgagggtcttccatccggactttatttatataaagacgggtttggtttaggcaagaagggcaccttttttctttctgcgttaaaaactcatattgccaaaggaaagagacttgggttagttgttctaagtaaaggtaaaaagtctatacgcaacagttcgacaacagtaacagttagtttgcccgttatagatataaaaaatttattggttagactgggaagaattaatgaggatagcaataacgaactgcgtgaagcggttaattcttttttgagtacaaaatttcctaaaaagataaaaatttctaacgatgattttgatgaatataaaggaggagaagttgctgccttgttgagaagaaataaggtagcacaaaaactaaatgaagaagatcttgaatcacttagcaagtttttcccgaagatttttgagggttcactaaaaggaaaaaggaagggggttaaaattggacgtgcaactcttattaacaatacgaaaactacgaccgataagatttttcttgacgaagtaattaaagaatttgaagcaaatttgattaagaaatctatgtctgaaaatgactggcaaaagttcttaagcgagaaagttttccggtttatggcaaattatgtaacttcaattgagaaacagaatgtgagtattagtgtgagttatcctgattttgttttggttgatgtatatggttttgtagatgtctttgaaataaagaagcgtgaaacatctcttcttggtttcgacgaggaccatgataattactactggaagctagatatttctaaagccatcgctcagattgagaactatatcgatgaaattattcacaatgccgatgactatatccgtgacgtaaagaaaaggaaaggtatcgacattaaagttgttcgtcctcggggatatatcattgctggtactagcaaacaatttatcaataaaaaagaatttgcagacttcagaaagcttggctcctcacttaagaacataaatttcattctctacgatgaattattagaaaatcttaaaaatcttagatcaaaactatga

SEQ ID NO: 62379 - DNA, 795 bp, Candidatus Nomurabacteria bacterium GW2011_GWA1_36_15
atgaagttttcaaaagaaatatttaatatattgggttggtccgaaaaaagcgatgattttattattggaaaggacaatttttcagaccttcaaataagctcaactccggcaatcgagcagttttattattttttctaccaaaaagatagaagattaataaaacaatttgttctcaatgagggaaaacaggtggactatatatgcagagtaactttaataaaaaaggacgataaattcacgccacggttgtcattttctgtccgagataaaacgaaaaaaataatcgagaatacggaagtaacgcccacgaatataaaagcgaatgttagcttggacgagtgctatgataatttttggaaactaatttcttttcttaaatcattacaagacatcgaacttcccaaagacaaattttctcttatgtctcaagatgagggagaaattgtatccgcgttacgtggtcgtggaacagacagtgttttaaatattgttaaacaattatttttatctcccgatatttctctaacacaaaaagacataaattctcttttaaaaagaagggataggctggccggttttaaaaaagccctaagcgaacattcaactgatgaagggtggtggcaagattttttcgaagagaataaatggatttttggatacggcttaaactacgagattttaagacaacaacaatctcaaccaacatatggcggagttagaatggacggaaagggtggacaacgaggtgataatttaatgtctacaactggggatctaaatttcacagttcttgtt

SEQ ID NO: 62380 - DNA, 1230 bp, Candidatus Nomurabacteria bacterium GW2011_GWB1_35_20; identical to SEQ ID NO: 62378

SEQ ID NO: 62381 - DNA, 1230 bp, Candidatus Nomurabacteria bacterium GW2011_GWC2_35_35; identical to SEQ ID NO: 62378

SEQ ID NO: 62382 - DNA, 1230 bp, Candidatus Nomurabacteria bacterium GW2011_GWF2_35_12; identical to SEQ ID NO: 62378

SEQ ID NO: 62383 - DNA, 1188 bp, Parcubacteria group bacterium GW2011_GWA2_37_10
atggatttcacaaaatttacattttctaaaaaatattcaagaaacgatcgaatactcgaattgtcctttgactttgacataaaggaggtcacagggagaaatagtaaaacattcgatgattataatagccttctttacttcttgctgaataatcccaaaaaacaaatttttctaacccaaacccaaaattctgatttctgtgaagaaaatgataaattagtaataaatcttcaatcataccaagaattttgtaagaagattggacagaatggtaaaaacaggacacaggcatttcttgcacaaagattaaaaaattactcagaggatgaaaaaaagagtattatcagtagttcaactgaagaagaaataatagaaagaattaagaattttacagacgaggaaaaaggtatttttcttgaaaaattaaaaggtgttgaaggattgaagttaccagaaggcaatataaaaaacatatcaaatgaagaatttttaaaagcattttcttcttttttaactgatccagcaaaacaaaagatagtagtcgccaattacccacagattcaaataaatcttttagaagaatataagcaattcctagaacaaaacttagacaaagaggaaacttttattcaagattggattgatggaaaaattgataacaacggacagacaaataattcagatgaagaagaaataaaaaagattaaaaaatcaagatgtttaatctttggattagaatttatttcacacaaaagagaagggcaagtgagttctaagcagttcgatattttgacaagaatttctcaaggtaaaaacgactatgttttaattgaattaaaatctcctagtagtgatgtattcaaggttaaaactaaaaataatgacaatggtgggacatcagaggaatatcatttatcagatgatattgctagggcaattcctcaaatatctgaatataggcacttactagataacgcttcagatattgagtggcaaagaattggtcttgttagaggaaaaatatcgaaatgtttaattgttattggcacaaaaagagatgatgctgtatggtcggaacattttttgagtttaagaaaaaatttaagcagtactattgaaattttgacctatacagatttaattcaaaaacttgaaactacaataagaaatttaagggaaaatctttaa

SEQ ID NO: 62384 - DNA, 1143 bp, Parcubacteria group bacterium GW2011_GWB1_41_6
atgaaattttcaaaagaaatacttaatgtgttaagttggtctcaaaaaagcgatgactttattatcggtaaagacaacttttcagatctacaaataagttcaactccagcagttgagcagttttattatttttttgatcaaaaagatagaagactgataaagcaattcgttcttgatgagaaaaaacaagttgattacatatgcagagtaactttaataaaaaaaggtgataaattcacaccaagattaactttttctgttcgcgataaaaccaaaaaaataattgataatcaagagacaacgcctacaaacattaaagcaaatgttagtttagatgattgttatgataatttttggaaattaatatcttttcttcaatctttgcgcgacatagaactcccgaaggaaaaattttctctcgtatctcaaaatgaaggcgaaattgtatcagcgttgcgtggtcgcgggactgatagcgttgtaaatataatcaaacaactttctacatatcctgatgttttattaacgcaaaaggatataaattctcttttaagaaggagggaaaaattggtgggattcaagcaagcattaactgagcattcgtcagatgaaggttggtggcaagatttttttgaagaaaataaatggatcttcggatatggattaaattatgagattttaagacaacagcaatctcaaccaacatatggtggagttaaaatggatggaaagggtggacaacgaggtgataatttaatgtctacaaccggggatctaaatttcacagttctcgttgagatcaagactcccgcgactccacttttgcaaggaacacaagaaataagaaatggggcatggagtttatcaaaaaatcttacagatgccctttctcaaattcaagcgaatatccaaacatgggaaaaacaaggatccgaacaaccagaaaatcgggataaactagagaaactatctatcttcactgtcaagccaaagggtattattgtaatcggttcattaagccagttggtagatagaaataaaagagaaacctttcagcggttcaggaaatccattcatggcattgatattattacttacgacgaaatttttgaaagagcaaaatttattgttgagaatgaataa

SEQ ID NO: 62385 - DNA, 1230 bp, Parcubacteria group bacterium GW2011_GWC1_35_21; identical to SEQ ID NO: 62378

SEQ ID NO: 62386 - DNA, 1143 bp, Parcubacteria group bacterium GW2011_GWC2_39_11
atgaaattttcaaaggaaatattcgatatgctgggttggtcagaaaaaagtgaggattttgttataggaaaaaataatttttctgatctacaaataaactcaacacctgcaattgagcaattctactatttttttaaccagaaagggcgaaatcttataaagcagtttattcttaatgagggcaagcaggttgactatatctgtcgggtaactttaataaaaaagaatgataagtttactccgcgactgtctttttccgttagggacaagattaaaaaaataaccgaggaatctgagataaaaccgacaaatataaaagcaaatgtcagtttggacggttgttatgataatttctggaaattgatttcgtttcttcagtcaatacgagagatcgaaataccgcaagatagtttctcgcttatttctcagggtgaagttgaaatagtaaccgcgttacgtggtcgtgacacttcaagcattgtcaatattattaaacaactttcaaacacggaaggagttaagctttcgcaagaggatgtaaatcagctcttgaaacggagagaaaagttagagaaatttaaaaccggacttgataataaaatttctgacgaaagcaagtggcagagtttctttgagaaaaataagtggatttttggttatggcctcgactaccacattttaagacaagaacaagcacaacctcattacgggggcgaccgcgttgatggacaaggtggacaacgtggagattatctcacttcgacaatgggcgatttaagttttactgttcttgtggaaattaagacgccggttgcgccattattgcagggcacaaaggaaatacgaaacggagcatggagtttatcgaaagaacttacagatgctgtttctcagattgaagcgaatatcgcgatatgggaaaaagacggctctcgtcaagatgataacaaggatagattcgaatcagaaaatatttttacggtcaaacctaaaggtattatcgtgattggctccctttctcagctcgatacgcgaagcaaacgtgagacttttcagagattcagaaaatctattcacgggatagatattattactttcgacgaactttttcaaagggcaaagtttattgtcgggaaagattaa

SEQ ID NO: 62387 - DNA, 1230 bp, Parcubacteria group bacterium GW2011_GWD2_35_7; identical to SEQ ID NO: 62378

SEQ ID NO: 62388 - DNA, 1170 bp, Parcubacteria group bacterium GW2011_GWE2_38_18
atgagtgaatttggaaaaaacaaaaatccttcaatgacatatataagtaatgcagtcggaagagataaaaacatccgttatatttccaaggtctttgacattgaagattttaaagatttttatactgataaaataaacaaaaaagtttacgaagttattagagaaagtggaagacaagaaatcactgctatatataacgaagatacatctaaattttcaataagaattcagcgtttttctaaagaatcgggcttaccacattgccaatcttttagtttttggggaggctcattgattaaatttataaaattcattgaatcactagacgcctttaattattctattaaagataaaatcaaacttacagatcaacaagttgatggcttaatagaaagaaaaagaaaattacagcaactgattaatgcaacagatgatttaagttctacggaatttgaatatatatttaaaaatctaaagactaaagacaagatagaaatttttaaaaaaaatcttgatataatgtctaaagttgaaattgaaaattttgaagcagctataaaacagaaagagtataaaaaagccatagatgattttgaaaaactacttcaactagaagaagatggaaatattgtattcgacatacaaaaacattcagagttaacaaagtattttgcgggccaaccagaaaaaattttccaaatttggttagaaaataatctatgggtttttggagtagagtactacaaaaaacatagtttttctgttatttcgtcggatggttcaaaagcagatttagtcatggaaacggcggatggatttatcaatctaattgaactaaaaagaccaaaattgcaatatgagctatttaattatgattcaagtcatagaaattattatccaaccaaagatttttctcagtcaattagccagtgtctaatttatttaaaacggcttgaagaatttaaaacaacattagaaaaaaatcaacagactaaaatattacgaccaatgattaaattgattattggcagaacaaataatttttcttctgaagaaaaacaggctctacgtttattaaaatctagcttgcacggagtggatattatttcttatgatcaaattctttataatgcaaaacaaattgtttctttttacaaactaccatcttaa

SEQ ID NO: 62389 - DNA, 1206 bp, Candidatus Magasanikbacteria bacterium GW2011_GWC2_45_8
atgatttacgaagaaataaaaaatacttttaaggatatgtttggagattatgacgcttatcttttgagttgcttgaatgaagggcgtgatatttcggatgattctgggtttgatgcaaaaaaagttggatcaaactttctatcctcaaaactctgttttttgcataatacaaatttcaaaaagacaattgtgaaagcttttcatattggtgatagtaaggggaaaatccatcactacgatattcactttgtcagatttcagagaaataaagtttcagaagcttggcaacgagtagagattaaagacttaaaagataaggaggtcgaaaatttgaatagtttcttagctgagcaaaataagttagttggcaaagacaatagtcataaatactggaggcttattggctctgatgaacctataagtattggtgatctttccacagctataaatcttgccttaaaaaataaagatgttgatttttcaaagttgacagagggagaaataaccaatatctctgatttagtgggaaagattattgatggtgggaatgttttagtagagaataagttatatcagaatctgatttcatcaaggactagtcctaaatcgattactgtctacgagaaggatttgatggactttaaaaaacttatagcggacaaaaaaacactagaaactgatatgcaggattttttaaaaacccgtgtttggtttttcggtttaaattattatcagacacatcagaaaagtaagccaaagttctcaacaaccttaggcagtgaatacgattttctcttagaaggatttaatcaagtctatgatatcgcagaattaaaaggtcctaatgatttaatgtttgacgaatattcaagtggggaaaggaagaatgccttcgataagagagttgattataaattttctgataagtttagtagggctctgcatcaagttatttcttacatggacgaatttgaagaacattttgggttaattaaggaacatcaaccctcaattcaagaatttttatacccaaagggtgtgattgtaatctcaaagcgagatctgttccctaaggatggaaaggattcacaaaaatacttgcatttgacaaatagacaatttgcaaatatagacatacttacatacgacgatcttgctgatagagcagaaataataattaatttcatgaaagagatacagaattga

SEQ ID NO: 62390 - DNA, 1410 bp, Enterobacter sp. 35027; identical to SEQ ID NO: 61283

SEQ ID NO: 62391 - DNA, 1410 bp, Enterobacter sp. 35666; identical to SEQ ID NO: 61283

SEQ ID NO: 62392 - DNA, 1206 bp, Burkholderia sp. LK4; identical to SEQ ID NO: 62225

SEQ ID NO: 62393 - DNA, 1206 bp, Hyphomonas sp. BRH_c22
atgcggctagaaccatcattgggggctgctttgccggacgccaaagacgcagaatacttcttcaacacccttcccgggaaggtgattcatagcaaaagaataaatgatgcgccttctgggcgcggcatcagaattttgtctgaaatcgtggaatccgctgaagaagtaaaattcactaccgacctaaatgaaattacaattcgggagaccccacaaggacgctcgcgaatcaaagcgactgtatttgaggacaatcgcgcgataaaagtcttcactattcagagatacctgcgcgttggcagttcacaagttccacacaaagaagaacacttttcattcgtaggcgaagagatcacgaggctgaaaaagtttctggcctcaattgaaacgatttcgttcgacggcaacggcaaagggcgaatttcggacgcagacttggacggtttaattgtcggtacactgcaggctcgcaagctaatcgacaagaactctgaggtttttgtccagcttatgcagaatgagaattgggaaagagacattgttgcccttggttatcgacgaaatcagctgcaaaattttgaaaagctcctaaacgaccgtgagtactttgaagctcagcgggcgctaatcggtggatcagcagagcgcgtttggcagaacttctttgaacagaatacttggatattcggctatggcttgtcctaccaatttctcagtgctttggatggccggaaacttgagcagattgtaagtggtgtttctgtcagcaccgtagggaaaagaatagacggattgttgaaaaccaagggtgcgctggaagctctatgttttgtggagataaaaacgcatgagtcccctctgcttaaagaaaacttctatagaactggcgcatgggtcccatcggaacacttagccgggggtgtctctcaacttcaggcgactgttagagcggcgagtaagttgcttcaggaacattttgaagctgtagatcgtgaaggtaacccaaccggcgaactactacataacatttcgccgggttcttttttggtcgttggtaagctgtctgaattcgaaacggagaacggacccaacttacagaagtacgcttctttcgaggactatcgacgtagtctgattcgaccgacagttttgacgtttgacgaactctatgagcgggcgtcttacattgtggagcacgccgagtag

SEQ ID NO: 62394 - DNA, 1206 bp, Burkholderia sp. MSMB0856
atggacgacgaagagaagattcatcataacaagttgcccggaaaaacctacataagtccgcggatttatatcgatgcacatgaggcagtgcggattgcctcaaaggtgattgactcggacgggctgcactacgcaacagtgaaaaaggaaatcgtgctgcgacgcaccgagaaaggtcgcaccgagatcgtcgcgaagttcctggaatccacaagagacttgcgcgttctgacaattcaagctttcaatggccagacaggtacgccacataaaactcatttctcatttgttggcgatgagattccgaaactgcttgctttctttgagaacattgcatccgtcgaatttgagtcgcaagacaagataaatctcactgatactgaactgagccgccttgtcttatcgagggagcaagctgccagcttagttcaggataaccaagccatcttctcagaggtcgttcggcaggcgattacaaaagaagatgtggttgctcttggctatcgcaagaggcaagttgccacctttgcaaggttactgaacgagccgacctacttcgaccaagtgaaggcggctaaaggcgtgaagggggatgaagcactatggcaggccttttttgaacggaatcgatggatattcggctatggtcttagctatttcttcgtcaccggatttgataataaaaaattggagcaagtcgtagaagggcacgatttgatcaaccgtggaaagcgagccgacggcctgatgaaaacgaaaggcatcgtcagttcgctctgtttcgtagagatcaagacacacacgacaaagctactcgattccacacagtatcgttcggggtgctgggctccgtcgaaggagctctcaggtgcggtcgcgcaagttcaaaccaccgtcgcatccgcgatgaggagtctgagcgaatacatccaaccgaccgacgcactcggcgtccccacgggcgaagaggttttcaacttcaaaccacgagccttcgtcgttgtcggttctctcaatgaattcgtcacggagcgcggcgtgaacagggataaactccggtccttcgaactttaccgaaatagcatttcttccatcgacatactgacctttgatgagctgttcgaaaggtgcagctttatcgttcaatcggaggccgagcgtacatcaggtgaaacgccgacagacgacacagaaaaccgaacctga

SEQ ID NO: 62395 - DNA, 1443 bp, Burkholderia sp. MSMB1459WGS
atggccagtgaaacagggagtgaactgaacgctccaatcgaattcgatcatcgcgacgtgatggagccgcggtttcgtttggaggtcgctgccgccggcgatatcccatgcagagacctgtacttgcagacgttcgcccggtccgaatcaaactccgacgtgtgggtatcacttccggaaagcgactggcacttgcttgcgcggatctccccggaaaagatcgtcacctacccagtccatacgaatccccatgctcaacgctatctgagtcccaggcacgggcgtttcgcgacgctagtctaccagcgcgtcgaggacgagttattacccgatagcgcagacgacgcggtcgcacttatcgaatcacggcaaccttggcgggtcttcaacgaatgcatatttggtttgggtctaaaggatgaacttgacactgtctggcagagcctcgctgcactgccagacgtcgacatcatcgtcattaatgatggaatcactcaggtcattgatcaagcagtctggattacggaagacgatttggacgctctgcgacgtgcattcgatagagcgaaacgcggccagcgtgagcgtgtcaagttggcaaagaagacacacgtacgaaatgctcttctttctcgattgaatccagaacgattcccgcccattgtcgaggtcagctcaactggtcggttggtgcaagtgcgactggatcgaatgcgcccgtcaattgccgtcgcccgctctgagagaagatcaaccgtccgagccgttcgcgccaacgtggagctgctcgcggcggaagcgcccggcgagctgatggcgctgcacgccgaaattgagcgagtgaccctcgtcaatatgatcgaaaggtacgagagcatgttgcagcaatcactccctgaaggacgttggcaacggttcttcgagaacaacgtcttcatcctaaccatgctctttgctcggccggtacgcctcttacatacccagttccatgctcaagggtcaaacctcgatggttcaggggctcaggtgggcgacttccttttgggtggagaaggccaatcattagcaatcgtcgaaatcaaaaggccaactactgcgctgatgctcaatgcgccctatcggaatagggaagtttatggccccagtgccgatctcagcggcgcggttacgcaggttctctaccagcaaagcatgcttcacagcaactggttggtccatcgtgtgagtcctgtactacaggcatcgcggcccgacgcaaccaagtgcgtcgtcatcgcgggaattacaccgactgatgaaacgcaacttcgcagctttgaaattttccggaatgcctgcaaaaacgtagaagtggtgaccttcgacgagctgctcggtaaattgcgattgctcctgagccacctttcgccccaggaggccgcacctaacccagttcccttctag

SEQ ID NO: 62396 - DNA, 1152 bp, Microgenomates bacterium 39_6
atgcagaaatatcaattaactagagtgtcagcgaatgtagcaacaacagatgatgttgttattgaggaaagtggcacattcaggaagatatttcgtggggttgttattaaagacaacccaaaagatccaaaagccacattaaaaggctacatcatcgtgcaaaggaaaagtgcgaatgatgaatggcaagatttatcttcagtgaaactcactgaactaaaaaaggatgagggaatcaaatttgaattaaaaagtttggcattaaaaaacctatttgaagcactagtaaatttgtacagcatttcggagcaagaattgccgtggttgaaggaaatttatgttgtagccaaagaggacgaaatcattagggtcgatgaaaagagaaaaaattttgttaccaaattattagaacaagactatggaaacgaagtttgggaacaattagtacaaaaagaaccacacctcgccacaagacttgcatattcgcgagtacaaaccgaacggcaaaccgcacttagggaatttgaaagttcattgacagaaaataaagacgaagcttattggcaaaatttcttcaaaaacaacgagtggatttttggattgggattgaggtaccaatatcttcatcttataacgtcccagcctcaatacggaggtggaaatgttttcggttctggtagccaacgtggggattatctcatggatactgcagcagacggcaggtttacagtattggtggaaataaagaaaccaagcactgatttgctcgggaatgaggaatacagaaacggagcatgggaaattggcaaggatttagtgggtggtgtatcccagcttcaagttaacgcaaataaatgggaggtggagggttccagaacagatgaaaatcgtgaagaattagatggcatcactacatgtagccctaaaggattattggtaataggccattgtaatcagttaaactccaattcgaagaaaaaaacttttgaattatatagacgaaacttaaccaatccagagattattacgtttgacgaattgtatgaaagggcaaaatttattgttaacaattctgcagaagaagtacagcctcaaacggaggtagtagcttcttttgaagttgaattagaggatgacaaaataccattttaa

SEQ ID NO: 62397 - DNA, 885 bp, Sphingomonas sp. Ag1
atgcgacaaccgccggacgaagcgctcgcctccgccttcgagcaattgctcgccgacgatggcaagaacgaaaacgacattcagactttcctcgagcagcataccgaactgctcgacacgagttcctggctgctaaaccaccgcctccatatgaactgcgtgattgcgaagttcccgatcgcggggcgcaccgctgacttcgcctatctcaccaaatcgtccgatcgctggatcctggtgctgatcgagatcgagcgcccaaacaagccgctgttcaccaccagcagcaagcacgtcggcggctcctcggcgttcaatgaagcgcttgctcagacagcggtctggcgcgactattgggagcagcaccagtccgaggtgcgcgagcgtcttctgccgctgctcgttccttcgcctatggcgcgcaatcgcatcgagctgcgccgggtgctgatcatcggccgctcgaccggcaaggatttcaaccaggcgcagcgcgaccggatcgcgagcatcgaggacgaccagaagatcaagatcctgacctatgactcgctcctgcgaagctaccggtccggatggggtgagaagaagtgcgtgctgtcgccgcgctcgaccggctatgccatcaagcacctcgacggcttgcccaagctgctcttcgcctatgtcctgcccgagcacctctcggtgccggcatcggtcgagacaaggctgaaggcggaaggctaccagatgtctgcgtggcgcaacaatcagctgctgcgcttcaacgagaaatgggcatccgagccgaccgacgaggaagccggcgacgtacacccggcggtgctcagcgttatccgcgcggctgaccgcgcccgcccctcgaaggcgaagcggcggtga

SEQ ID NO: 62398 - DNA, 696 bp, Sphingomonas sp. Ag1
gtgcccgttctcaagataatgactgacgccgacttcgacaaatacgaggccaaagaagcgcagcggtttcccggtgccctctacggcagtccaagccatatccgcctggattggcttgatgcctttgatgcggcgttggccgcgaaagatgaggaggccattcagcgctgcatcgaacagcgcccttaccttgcacagtatataaccccgagcaccgggcaccacggcatttggctgtttccaaagcagcaaatcgcgttgcaccagccgaatggatcgcccggaaagatacccgactttctcgcagttgctgcgaactcggatggatatacatggtggataattgagctaaaacgcgccgacgttcagtttgcaaatatgaaggcggacgctttcagcccaaccgctaacaaggcgcttgtgcagtgcacgagctacctgaaccagttcgatcgctacgtcgatacagttcggtcgatgacaggcgtcaaagagattgtgcgaccaaagagcgtgctgctgctgatcggtgattcacggcaggaaacaccggggcagacgtcaatgcgtggaaacgtaaacgagtctttgtccgaccgtttgcaagtcgtctcatacgatcggattaggcgtcacttgcaaagtgacctgggctaccgccgaaggaaccgcggctttgcggcggaggtaacctga

SEQ ID NO: 62399 - DNA, 1005 bp, Enterobacter sp. GN02186
atgagcctgaatcactctttcctcataggctcagatgaatcaagtgagcttatgctaaacatttctggtcttgatgctaacgctaaagaagtggattccttatgtgccaatttctttgcacactgtgctaagactggcacacccaaattcacatgtaagctgacaatacaaaatcttcaaaatctttatagccatctatccagctatagcatggtatgtgatagcacttcttcaaagactggaagattcattgaggtcagagataattataatgagataatcagcattcttgaacacgctgataataattcattagttatggccttgcagcaccttgtaagcagcaagttaaccaataatgacatcaatacaatattagggagaaaggaatctctcgagacctacgaaaaaatgctcactgagcctgatagttataaggaggcagactggcaacgtttttttgaaaccaatgaatggatttttggttatggcttaaagtataaattcctaaaaattcttcaaagggaagctcacatatcaagaactgatttaaacggcggaaatgatgtaattgctgattttcttatatctgactcaagattcaccaagattgtggaattaaaaacaccaacaacaaaacttttcactaagcgacaagggcgctctgatgcatggttcttatccagtgaattaaccgacgctgttagtcagatattggcgcaaaaggcaaattgggagattgaatctcagtctagaaattacactacagatggtgaacttatacatgaagatacatttgatacagaatgcattttaattataggttcattatcttcaattgagggtagtgagcgagaaaaactaattaaaagaaaaaccctcgagctttataggagaaatttaaaaaatatagatatcttgttttatgatgagttgcttgagaggtcgcgctacattgtcagaagtgctgaagtaatagaagataagcttctctcagcactgtag

SEQ ID NO: 62400 - DNA, 1311 bp, Streptomyces sp. CFMR 7
atggccaccagatcggactgggccttggagctacagctgaacgctgtgaaggaccaggccaccagccccgcaacagagagcgccatcgaatcggccctcacgcacataggaggatccggatcacggaaccggagagggggcaaacagctcgtctcactgctggagcaggctcggtcgatcgccgcgcaggctgaggagtggcaggtagtgcggctgcttcaggactcgctcgactatgtggagggccggatcctcaagccggagttcgaagagaggtaccggctcttccaggacggacagcagcgcgacgacatccttcgggactacatgtccatgaccttgtgggcgggaagccggttcgtgaccgggaaggccgaggagttcctcgaaggcaaccccggttccagcgctggagatctgctcgaccacatattttcgctgggacaggacgccctgttcctggaggcaccggcggaccgccccgggcgctacacaattccccgggggcgcgccgagacagccctctggatcgagagagtcatccggcgggagcgcgtcgatgtcgacgatgccgcggttgaggctcaccgcatcgccgcctcccccgaggcactggcactcctggccgcagattccgacggccagatggtcttcagggcggcggagcttcagcgccgtgcggccggcctggaccgcctccgcgcggtggcggaggatcggaccgcgaccgagcacgatctccaggccgcgctcgaagggcagcactggatcttcggcggccggttcgtgggtgaatccgcacagaggcggctggtaccgggcgacgagatcgacatccctctcatccgcggcgacggcagcctgcacgtcgtggagctgaagcgggccatgagcctgcgcaacccgctcgtgaagcggcaccgcggcgcctgggtgcccgccgcggacgtgcacgacgccgtcggccaggcgatcaactacctcgtcggcctcgacgagaaccgccagaagatccagcgggagctgggcatcgagacccgccgtgcgagcgcggtcgtgctgatcggccatcccgcagtccagcccgatgtccccgagcaggacatcaacgaagccctgaggacgttcaacagccacatgagccgggtcgaggtcctgacctacaaggagctgatcgacaacgcggagcggtccctcgggtccccggaggccgggtcctccgacatctcctcgcacgctggaggcggagaccggaggtcgtcgaccgaccggagggtcctcctcatggggttggaccgccgggaaacctga

SEQ ID NO: 62401 - DNA, 1086 bp, Janthinobacterium sp. KBS0711
atgaaaattagtgattttattcatcgctaccctactgaacttggcctcagaacagatggaatttgtcgcgtcagaacttttgtcgatgaacaattaaatctgtccgcgctgctaacagaccttgatgataagaataccgccgcatcaataacaaatgctatcgagacagtatgcggctcactcgtcacaaaaggaattgtgccaaatcaatgccgtttcgtagagcactatgaagccgatagcttggggagcgacaaatttgatttagtcacgtttactgagtctggagtcccaaagtggaagtccattacgcgggccaaccttgagactctaatcgcctgcgacaaaagagaactagatacgaaaactcgagacgaaccacgcctactcaatgaaattgatcgcttacgaaatgaaatcgatccttttcttgattccccatggcttgagtcgccagcagtcactaaaagacgtaatgacatcgaatcacgcatgatcagcaaaaaaatgatcgttgatctcgtggcgcggggatcaggtgaacaagaacttcaaagtatccttaagcaagacctctcaatcttcgccgaggtctacgcgcaaccaaaggacgagtacatttgtttttccgaattcccagtagcggagggagcggttgattttgccattttttcaggccggtctcgaatggacgtcacactgtttgagataaagggagcagagttcgatttggtaaataaagggcactacgacaaattctccgccaaaattgacattgctattgaccagatcaggaaacggtcaagacatatcattgataacatacaggaattcagggtgcacactcatcaaacccgtcaaagtgttgaagatggaaagctacttcacaactctctgctgggacctgccgggtcgcttgaagttgatccagataaggacatcaacatacgatttgtcgtcataggagggagaactcgagacgatctcgaggaaagcagaaagcgccatgatgtggagcgaagtactcatccacctatacgagtggagtcttgggacacttggctgagaaaaattagacgagagtaa

SEQ ID NO: 62402 - DNA, 1158 bp, Marinobacter subterrani
atggaagacgattaccagaacccactgccggggaaaacctatataagcccgtcactccaagcatttggagataaggagcgaagggttcgtatcgcatccaaaatacttctctctgaagacggctatgaatatgcaaaggaacgcgacgaagtagttttaaggaagaagccagacgcaaagacctatataaaggcgaaattcatcgaagattcaaggcaaatctttgtcctaactgtacagaagttcgtatcagaaacggggcagccgtatgggtccggattttcctttgtaggtgacgaaatcggccgcttctgtgaatttctagcaaatattcattcggttgatttcaaaaacaaagcgaaagtaaatatcaccgacgaagagcttcgaaaaatagctttaacaactcatcaggctagagccttcctagtcgataaccaagagctgtttgcagaaattctcaagtctgaggtgaccactgaagatatagttgctgttggatttcgaaagaagcaattgagtgtctatgacaagcttctaaatagcgagagctacttcgatgatttaagggcaaggaaaaagtgctccaatgaggctctgtggcaaaaatactttgaaaagaatccttgggtatttggttacggtttagggtatatattcctgtcaagtctcgacgacaaaaagctagagcaagtagttcaggggcatagcataggctcacatggcaagcgtgttgatgcgcttatgaaaacaaagggtattatttccaatctgtgtttcgtcgagatcaagactcatactacagcactactagaaagcaagccttaccgatccggctgctgggcaccttctaaggaattagcgggcgctatagcacaggtccagggcacagtggcctctgccgtggaaaatctatccagcagacttacccctagtgatagtgaaggcaatccgactggcgaagaaatctataactatcaacctaaatcctatttagtcataggtagtttgagcgaatttttgtcagagcagggcgtaaacaaagataagctgaggtcctttgagctactccggaagaatacttccaatcctgagattattacatttgatgaactttatgagcgagcaaaattcattgtccagcacaaccaaatctaa

SEQ ID NO: 62403 - DNA, 1005 bp, Enterobacter sp. GN02457
atgagcctgaatcactctttcctcataggctcagatgaatcaagtgagctgatgctaaacatttctggtcttgatgctaacgctaaagaagtggattccttatgtgccaatttctttgcacactgtgccaagaccggcacacccaaattcacatgtaagctgacaatacaaaatcttcaaaatctctatagccatctatccagctatagcatggtatgtgatagcacttcatcaaagactggaagattcattgaggtcagagataattataatgagataatcagcattcttgaacacgctgataataactcattagttatggccttgcagcaccttgtaagcagtaagctaaccaacaatgacatcaatacaatattagggagaaaggaatctctcgagacctatgaaaaaatgctcactgagcctgatagttataaggaggcagactggcaacgtttttttgaaaccaatgaatggatttttggttatggcttaaagtataaattcctaaaaattcttcaaagagaggctcacatatcaagaactgatttaaacggcggaaatgatgtaattgctgattttcttatatctgactcaagattcaccaagattgtggaattaaaaacaccaacaacaaaacttttcactaagcgacaagggcgctctgatacatggttcttacccagtgaattaaccgacgctgttagtcagatattggcgcaaaaggcaaattgggagattgaatctcagtctagaaattacactacagatggtgaacttatacatgaagatacatttgatacagaatgcattttaattataggttcattatcttcaattgagggtaatgagcgagaaaaactaattaaaagaaaaaccctcgaactttataggagaaacttaaaaaatatagatatcttgttttatgatgagttgcttgagaggtcgcgctacattgtcaggagtgctgaagtaatagaagataagcttctctcagcattgtag

SEQ ID NO: 62404 - DNA, 1005 bp, Enterobacter sp. GN02534
atgagcctgaatcactctttcctcataggctcagatgaatcaagtgagcttatgctaaacatttctggtcttgatgctaatgctaaagaagtggattccttatgtgccaatttctttgcacattgtgctaagaccggcacacccaaattcacatgtaagctgacaatacaaaatcttcaaaatctctatagtcacttatccagctatagtatggtatgtgatagcacttcatcaaagacaggaagattcattgaggttagagataattataatgagataatcagcattcttgaacacgctgataataattcattagttatggccttacagcaccttgtaagcagtaagttaaccaataatgacatcaatacaatattagggagaaaggaatctctcgagacctacgaaaaaatgctcactgagcctgatagttataaggaggcagactggcaacgtttttttgaaaccaatgaatggatttttggttatggcttaaagtataaattcctaaaaattcttcaaagggaagctcacatatcaagaactgatttaaacggcggaaatgatgtaattgctgactttcttatatctgactcaagattcaccaagattgtggaattaaaaacaccaacaacaaaacttttcactaagcgacaagggcgctctgatacatggttcttatccagtgaattaaccgacgctgttagtcagatattagcgcaaaaggcaaattgggagattgaatctcagtccagaaattacactacagatggcgaacttatacatgaagatacatttgatacagaatgcattttaattataggttcattatcttcaattgagggtaatgagcgagaaaaactaattaaaagaaaaaccctcgagctttacaggagaaatttaaaaaatatagacatcttgttttatgatgagttgcttgagaggtcgcgctacattgtcaggagtgctgaagtaatagaagataagcttctctcagcattgtaa

SEQ ID NO: 62405 - DNA, 651 bp, Phormidium sp. OSCR
gtgaaatattttgaagatattgatttaaatatagctctatgtcggcaagaacttgatgatctaaaacaacatcttgacaataagaatgaactgagggaaagacgggatgtactgccgttcttccgggagcgcaggcacctatcagcgtttattggctcgtattttccatacatagatcagtttgataaaattgcttatgaatatgacattttcggtgattttaaagcagatttagtcgtcggtgattcaaactctagctggtacggatttgtggaatttgaaggtgccacagaaaacagcgtttttcaatttaaaggctcaaaatcgactcccgactggtctcgacattttgagcatgggtttagccaggtgttagattggttttggaagttgtcatcccaagaatacgaacgagagtttacctatcgttttggaaaagattttgccggttatgaaggaatgctcatcattggccgctctcaagaccttcaaccacgagaacaggatcgccttcgatggcgacgagatcgattaatggtgaactcgaaacatatctactgtgtcacatttgatgaactgtattctacattaaatacaaggctaacactcatcgagcgttatcatgtcgtgaatccagatgagtcactttaa

SEQ ID NO: 62406 - DNA, 1410 bp, Citrobacter sp. MGH103; identical to SEQ ID NO: 61283

SEQ ID NO: 62407 - DNA, 1410 bp, Citrobacter sp. MGH105; identical to SEQ ID NO: 61283

SEQ ID NO: 62408 - DNA, 1410 bp, Citrobacter sp. BIDMC107; identical to SEQ ID NO: 61283

SEQ ID NO: 62409 - DNA, 1092 bp, Enterobacter sp. MGH86; identical to SEQ ID NO: 61622

SEQ ID NO: 62410 - DNA, 1005 bp, Enterobacter sp. MGH120
atgagcctgaatcactctttcctcataggctcagatgaatcaagtgagcttatgctaaacatttctggtcttgatgctaacgctaaagaagtggattccttatgtgccaatttctttgcacactgtgctaagactggcacacccaaattcacatgtaagctgacaatacaaaatcttcaaaatctctatagccatctatccagctatagcatggtatgtgataacacttcatcaaagactggaagattcattgaggtcagagataattataatgagataatcagcattcttgaacacgctgacaacaattcattagttatggccttgcagcaccttgtaagcagtaagttaaccaacaatgacatcaatacaatattagggagaaaggaatctctcgagacctacgaaaaaatgctcactgagcctgatagttataaggaggcagactggcaacgtttttttgaaaccaatgaatggatttttggttatggcttaaagtataaattcctaaaaattcttcaaagggaagctcacatatcaagaactgatttaaacggcggaaatgatgtaattgctgattttcttatatctgactcaagattcaccaagattgtggagttaaaaacaccaacaacaaaacttttcactaagcgacaagggcgctctgatacatggttcttatccagtgaattaaccgacgctgttagtcagatattggcgcaaaaggcaaattgggagattgaatctcagtctagaaattacactacagacggtgaacttatacatgaagacacatttgatacagaatgcattttaattataggttcattatcttcaattgagggtaatgagcgagaaaaactaattaaaagaaaaaccctcgagctttataggagaaatttaaaaaatatagatatcttgttttatgatgagttgcttgagaggtcgcgctacattgtcagaagtgctgaagtaatagaagataagcttctctcagcattgtag

SEQ ID NO: 62411 - DNA, 1158 bp, Acidovorax sp. SD340
atggcaaacgaagaggaaatccatcgcaacaaactgacgggtaagacctacattagcccgcaggtcccgacgctgaacgggcctcttcgcattgcatccaaagtaatcgattccgagggtgcctactacgccaaggtgaagaaggaggttgtccttcgtcgcactccaacagcaagaaccgagatcgttgctaagtttcttgaggatgaccgcaagctcactgtgttgacactccagcagttcaacggcaacaacggacagccccatcgcacgaacttctcatttgttgacagcgagatcccaaggcttctgggctttctcaacgacattgcggaggtggagttcaagcacacaggcgcagtcaacatcacagacaccgagttgcatcggctggtgctctccaaggctcaggctgcgaccttgtttcatgacaaccaggaagtgttccttgaagcgctcaagtccgaagttaccaaggatgacatcgtcgctttgggctatcgcaagaagcagcttggcgtgttctctcaactcctgagcgatccagaattttttgaactgtgcaagaagcagaaatccatcaagggagacgagccactttggcaagcctactttgagaagaatccatgggtgtttggctacgggctgagctacttttatgtcaccgggtttgaagagcgaaagcttgagcagtttgttcagggctacgaccttctcaacagaggcaagcgagcagatgctgtcctgaagaccagaggaatcatcaactccctttgcttcgcggagatcaagcaccacaacactagactgcttgagtctgatgcctatcgagcaggttgctgggcaccatccaaagagatggcaggcgcggtcgctcaagtccaagctaccgttgcgatagccatgcacaagcttcatggcatgcagcgcatggtggacgacgatgggaatcccacgggtgaagatgttttcaatttcaagccgcgtgcgttcatcgtgattggctccctcaatgagttcatgggcgagcatggtgttaaccaagacaagctgcgttcgtttgagctttatcgtacgagcatcactggaatggacatcatgacctttgatgaactgtacgagcggagcaagttcatcgtggagtccgcacagccatga

SEQ ID NO: 62412 - DNA, 1404 bp, Pseudomonas sp. RIT-PI-r
atgtacgacgctgaatcggttttcaatcccagttttgacctggttcctacccagcaagccggtgagccatgtagagacctctacatggaaaccttcttcactttcgaagacgcagatgattggtacccgtatccgcaagatcaatggcaccggcttgcacgtattttctccgaccgaatcgtcacctatccggtattcaccaatccgcacgcacaacgctacctcacgcgcagacacggtcgaatcaagaccatcatttatgaaatggagtatgaccaggttttaccagagactactgatggcgctctcacactaatcgacatgtttctgacttcgcgaatttggaacaacagcaactttgggcttgggcttatcaaagacctagagaccatatgtactgagctcatgcgtttgccagatatagacaccttaatagtaactcacgacgatcaattaaggatcgaccgcaattgcgcgcgcatttcggagaaacttctcgatgagcttagacgcacgttcgacaagacgggcagaaggctaaaagagcgtattcgctcggctaagcattggcatgtacgcaacgtactgctcgctaaactagctcctgctcagtttccagctttggtgcaagtgactagtactggggaaatggtcgaatatcgtatggcaagctcgaagccatctgcggctatggagaggcagcaacgacaggcatcgatcagaaccgttagaaagaatgctagacagattgccaaggatgccccgcaggagctattcagcctgcacgctgaaattgagagggtgacgctcgccaatatgatcgagcttttcgaaaagaaactggaacaacaattgaccgaggctcattggcagcgtttttttgaagacaacatttttattttgtccatgcttttcgctagaccagtacagcttctacatacccaatttcatgctcaggtctctggtctcgatggctccggcgctcaaatcggggactttttatttcgagaactaggtcaacccttggcaatcgttgagatcaaaaaaccgaccagcccactcatgcaatcaagtgcctatcgcaacaacaaggtgtatggaccacacgcagagctaagcggggcagttacacaggttttatatcaacaaacctccttacgcagtaactggctgcttcaccaatgtagtttacagggttcgcaaccagatgcgatcaaatgcattgtcatcagcggtaccacgccgattgagcaggaaccgcggcgctgctttgatatcttccgacacgcatgtaaggatgttgaggttgtcacctttgatgagcttttagacaagctgaaactgttgctcaaacatcttaatcatgaaggttctagagatgaggcgattagcaaggagagttga

SEQ ID NO: 62413 - DNA, 1035 bp, Pseudomonas sp. RIT-PI-r
atggactcaaacgacgatatttttgaaaatctaatgcactcattggatttatcgagagatcttcgaaaggccagaacagtagacttcaactcggtaagcgatgcattatccttcaaattatctcgccacttcaacccagaagacgacatgcaagaggagctggaggatctaattctggaaataaacgatcactacaagaaagtcgtcaaacaaactattggagaaaagccaacacttgaagaattcaaaaaagaactagaaaacaaccaagactttaaaaaaaccattgctgatgcaaaaaacgcccaagacagtattgaaaacttaatcgaatatatcacagacaaccatctagataacgatgcaaaggaatttgcctctctgtgtatcagtacatttaccaatatcaactcgatgcttctggaacaagacgtagtccctctaatcaaaaggggaatttactcagaagatcttgcttccgccatcgaagtatggaaaaaaaacgtattagaaaaagcagccgacgaagatttttggcaaaatgaattatcagcaagaaaaggaatcttagaaagactaattggtggtcacgcactattcctacaacgagaattccatgtcgggactacaaacaaagctggcaaaggcagcaaacgttccgacttcgcattaattgacaaactaaacgacaacctgacattaatcgaaatcaaaacccccgacacaaaacttataggctctgtataccgaggcacatttccattatcaagagaattatccggaacaatcagccaagtactcaaccagaggaatgagctaatcatgaattactactcaaaaaggtacaacagcgaaactgctttcgaggtatttgcaccaaaatgcttcgtaatcgcaggaactttaagcaacctaggcaaaaacaaagaaaaacttaaggcctttaaagttcaaagacaagcagtggcggcacacgtaacagtcataacttttgacgaactatatcaccaattctcaactttcaaccagatatag

SEQ ID NO: 62414 - DNA, 957 bp, Pseudoalteromonas sp. SW0106-04
atggcaaaaattaaagatagattagctaaaattattcgtgataaacctagagtattgacccgagcaatattttggaaaatccctcataacacttctgaagacgaagtgttcttgaagcttggtcggtataataagccaaaaggttggcttgagggtgaaacactagaattagataaccccaaaagtgaactcactctcgatagtgaagaattcagtaatctgatagattttatttcaaccaattacgagcctttcaaacagggtacgaaagcttttttacctttagataacccgtacgacacatcaaatgcagagcaaatcaaacaacttttaaatttaccagacaaacaagggatgcttcagtttctattggacaacgacgtaataccggaagacttggaactgggcttagagcatgcgcgaaaatctcgtgcaatagatgagtttcaatatttactagagtctgactttactgaaaacgtatggcaaaactggtttgaaactaatagttgggttctaggtagcgattttgtcaaagttttagatgaaagagcaatagatatccataacatttcagactttctaatggaaagttatgacggcttcctcgatgttgttgaaattaagcgaccagaaggcggtttaaagttctgggcttcaggtcttgatcataataattattacccgcactctgacttaattaaggcgattacacaatcccagtcttacatacatgaaatcgagctagaggcaaatagtgtcaaattcatggaaagggttggttatgtgaagacgattaagcctcgatgtacgttaatatacggtcgttcaaatgactggaatcgagagcagcagcaggcatttcgagttttaaatagtagttaccacaacttgactattatgacgtttgaccatgtgttagaaagggcaaagcgtatacttggaaaacgctgctaa

SEQ ID NO: 62415 - DNA, 929 bp, Gemmatimonas sp. SM23_52
ctgaattgatcacagcgcgactagggttcgatattgtgttgcgtcgcgcggatgtgccgccaactcctcccgccaagcccttctgtctgctctcggttcgtaatacctttgagtttcacatcttgggtgagatgctatcaatagagcctgaacgaccgcgacagccgttcttggtgcgcagcgcgatgcggctaccggttggttgggagtgcatagaggtttttccgtctgcaagtctgctcaactggaagcctgggtatgcgccgatctgggctgagaacgacatactcgcagcggtggtttctcaccagattcaagaaacgcgtttaagtaccctcgatcctcacgttggggctcgcagatacttctccaccctttttcaggcctaccaagagctgctggattccaagcccgatcgtgaggaggctctccagcgattcttggccgagaatcctgcgctgctctgcccgacgcacattaggttttggcccaagttgcccctgggcgcgcatgtcacggactttgttttccaagaggcgactggcgactacctcctggtggagcttgagaaatccacgcatcgcctgttccgcaaagacggccatgcaaccgagaagctcaacacggccagtggccaagttctcgattggcgacggtacatcgaagacaatctcccgactgtgcagcgggaactcggacttgaagggatttctgcgaatccccgtagcctcatcgtgatcggcagatccagtgacgtctccctggcagaccgtcggaagatcaccgccatcgagaaccaggcacccaggctaaagatctgcacctacgacgacgtcctcaagaacgtcaaggcagcagtcgagaaccttctgggccctttgtggaacgttgaaggcaacactaggatctactatctgaggcaggagtga

SEQ ID NO: 62416 - DNA, 1239 bp, Phycisphaerae bacterium SM23_30
atgactacgagacacacatacgtaaaaaaccttcttgatagccttagcattgaggactttgcgaccgttgctgcgactttggtcaaagaaacaagctacgacgagttgtggggaaagtatggtagacgtgtcgttagcgaaagccgatctagtgacggccgttctgttactattgggcaagtacaacccgtcggcccgggagctgttccaaccttacgttattttactgcaattgctgctcccttcttggttaagagcttctcatcagaaaaggaagcatatgccctctttgactttctggttagttcagccaattcagcctgcgcggaactcgcaacatctggcgagcacggcgcagactttgctctattctatcttgtaactaatatgccccgaacaactctgaatatcctcaagaagtcagggctgttctttcaggctatggacgaggcaaggcagagaatcaatgccttgcatgccatttccgtcggtaacatgggagtattcactgcggacaacgttgccgaagccgcagatgagtatcaggaacttgaagaatgcctgcgcagggtggggcagagttacggaagactcgtgttttcgcagggcaccaatggcaagattttggtggagtcggctgttctcagtggtttcagatgtatctccttggagggcaccggagatctgctctcgaaaatatcgatcccacatgaggtgtctcaggattctctttccgcccttgaatctttgcttaactcaccgtcagtcaatgaaggagacattcagcggttccttgaggagaatccttcacttcttgctatgggggagaatattgcaatctatccacaggttgtactgcttaggtcagacggaactctgcttcgccctgatttcttactggaaccagtcacgggccctctatgcacgatgcttgatatcaagatgcccggagaacgcatcattgtgaacaagaagaatcgtcctcgctttagcgcaaagatctatgaatatgctgctcaattacgtgaatatggtcgttacttcgatacaccaagccagcgacgttggtttaaggacaaatacgggattgatgctttcaggccccgtcttgttatgatagtaggtcgagactactccgctagggagtatggcctactcaaaagcctgaggaatacattggatcctattgagattcttacatatgacgaacttatgcgacagtaccccgaacacatgtaa

SEQ ID NO: 62417 - DNA, 603 bp, candidate division Zixibacteria bacterium SM23_73_3
gtgaataagacttatactgaattatctgatttgctgagtagagacccacctgaagagattctacatcaatacctttacgcgcatacgtacctcctcacagaccttggctatggagtgaagttggttttttctaaaccttccttcggaagtgattttagagcggactttgccctggccggctggggtaactacacatgttggacttttgttgagatcgaaaggagttcagatccgttgttcacgaaggagggcctggtagcccagccccttaatagggctattcagcaaatcaattcttggtggatatggctctatgactataatgaatatgcgtccgcagagtttcataagttgtcaggtgagaataccgcagccatcgtcatcggacgtaggtcgagtctatctccaaccgacctaagaagactggaacagctcaacgcgacccaacttggagggaaacttaggatcgtgacctacgacgcattgctggacagcatcaaggatctgtccaatagtgatctgaaacaactccagaggaagcaccaacggttgactcagtttaggagcatcaaggaatggtccaagtcggaatatgttaagtag

SEQ ID NO: 62418 - DNA, 789 bp, Lysinibacillus sp. FJAT-14745
ttgaaactatataagaataaggattatacagttttaagtgaagaagagatgaatttatatgaggaagttaaaaaaacagaaaataaaggtaggcttcgtagatccaataaatttagagagtatcctaaagcagcacgacattataaacatctttttcctaataactatttagatatagtggaattaggcgatatcggaaaaataaacgatatttgcaatgagtaccaggtattattaagttcaaatcctggagagagggaaatgttaaacttcatcaacaacaacgaatattatctgttaatcgcctctcttttcaaattttataactttggccatcatggagcatttcttttcaaagaatttaatattggcggacatgtagtagattatttactggttggtaaaggatcaggaggatatgagtttgtttttatagagttagaagatccttcaaacccttcctttatggctaactgtcattatgcagaatcatacagaaaagggttaaatcaagttagagattggaaaagtgctttgaatagaaattttagttatttgtcaaatgagtttagaagagctaccaagcctggtgtagcattaccagaggagtttttagaaaatgatgagggtagaaggcattatgttgtaatagctggtagaagaaaacactatgaggtaaatccacggaaaacatatgaagtgagaagaaatgaatcacttgctagaatatttcattatgataatttaattgattatacaaaagaattgataggtaaaaaaacgttttga

SEQ ID NO: 62419 - DNA, 639 bp, Planktothricoides sp. SR001
atgaaacaatttttaaaatttcatttcaatccaattctatgccatcaacagcttgatgagttccgctacctcatgcaaagtcgtgaatttttatccgaatttgacgatattctgccattttttaaacaacggcatcagttatccgccttagtgggttcttaccatgcgaaaattattcgaccggatataattgcctttgaatacgatatatttggagatttaaagatcgatttagtggtgggatattcggtgacaaatgcttattgtttcatagaattcgaggatgccactgccaacagtatttttgtctctaaagccggtaaaagcactccagaatggtcgccccgattcgagcgcggatttaatcaaatcgtcgattggttttggaagctaaacgattttgaaaaaaccgatgattttgaaaatcgatttaatagccggtctattgactacaccggattactgattatcggcagaaatgagcatttggaacgtcgagaaaaaaagaggttgcaatggcgtcaaaaaaacttagttgtgaattatcgacatatcacctgtattacctttgatgagttataccaaactttattacgtcgtcttgttcaatatcaattcgttagtcaggaagataattaa

SEQ ID NO: 62420 - DNA, 1236 bp, Pseudomonas sp. 655
atgaacgaaaaagaagaaacaacctcctctgttgagcctttggtgttggccttcatgcaggggatgaaccataattatatggccccgctgaggaaatacgtacaagagaacccgagtctcacaaaaacggctcctggcttcctgttaaatcctgaagaagttattgtatatattggccggacacatatcgctgtagagtacgtcggatctgagatcgctgaagagataaataccgtcggggtaaatattagatatcacgattactcggtaaaagaatgcaatcttttcgagcagatcataggtttcgaatacgactcaaattcaagtcgtttattttcaatgcccttgccgccgttcagtgaagatctagtcctgccaacaaataagggatgggacaagctttcagagttgaaatggaattttgcagctcaaaatagcattatggggtttaacgtaccaagcccagaggcgatgaaaggtcagtttactaggatcgtaaatgggatgtttttcgatgcggacgactccggattaaaaaccaggcatataaaatggctggacttttttcctatccattttgatggtagtgatgaggagtttgatcgtattggttttgatctagaagaaattaaacaatttgtcgagcatgacgcccattactcttatcccatgcctgatgattacaagtatattcagctacctaagataaatagattcatcgagatatgggggagctcaagaagcaccgagcctgatataacttcccatctatcaaaagaagaaaacaagttcatcctcactatgaaatttggagcaaaagatgttttttctgaattaacctgcgaatggcagagcgaaaatagaaaaaacataaggccagacttttttgttttacagcctaacggctatgctgatatcgtcgaattcaagcttcccgaaattgataagtgcttcattgtcggcggccagaacagagagacattctcttcttggcttaactcctacatctctcaaaccagggtatacgcaacgtactttgatgacccgaataatagaagatggttcgaagaaaaatatggtttcaaagtccacaagcctcgcaggtggcttgtcgtcggacgtagaagcgattttgagtctgatgtgtggcgagaaattatgtccgatcatcgagaccttgaaataataaccttcgacgatttaatagatggagttgtggtgcagttttataagtag

SEQ ID NO: 62421 - DNA, 1158 bp, Rheinheimera sp. EpRS3
atggatgatgattacaagaatcccctgccggggaaaacctatataagtccatcactcccagattttggtaacaaggaaagacaggttcgtattgcatctaaaattctaccctctgaagatggctatgaatacgtaaaggaacgcgacgagatagttttaagaaaaaagccagacgcaaaaacttatataacagcaaaattcttagaagattctaggcaaaccttcgtattaactatacaaaaatttgtatcagaatcaggacagccttacggggctgggttttcatttgtaggtgaagaaataggtcggttctgtgaatttctggcaaatatccaatctgtagatttcaagaacagagctaaagtaaatataactgatgaagagcttcgaaaaatagctttaaccactcatcaggctaaaacatttcttactgaaaatcaggcgttgtttgctgaagcattaaaatccgaagtcaccacggaagaccttgttgcggtaggatttcgaaagaagcagctaggttactatcacagacttttgcatgacgagagctacttcgacaaattaaaaattaaaaataaatgttctaatgaagctttgtggcaaaagtactttgaaaagaacccttgggtgtttggttatggactaggttacatattcttgtccagtcttgatgatagaaagttagaacaagtggtccaagggcatagcgcagtttcgcatggtaagcgtgttgatgctcttatgaaaacaaaaggtattatatccaatctatgctttgttgaagttaagactcacacgactgctttactagatgctaagccttatcgatccggctgctgggcgccttcaaaagaattagctggtgctatcgcgcaagtccaaggtactgtcgcctccgcagtagaaaatctatctagcagaattaacccaagtgatagtgaaggcaatccaacaggcgaagaaatttataattaccaacctaaatcctatttggtaataggcaatatgggggagtttgtatcagagcaaggtgtaaacaaagacaaattgcggtcatttgagctgcttcgtaaaaataccactaatcctgaaattattacatttgatgaactttatgagcgcgcaaaattcattgtccagcacaaccaaagctaa

SEQ ID NO: 62422 - DNA, 1011 bp, Klebsiella sp. G5
atgagtgttgatcattcttacttgattggatctgatggtataaataaccttcagttaaatatttcaggtttggatagggaatctcaagacatatctaacttaagagctaatatttttgcttattgctcaagtaccgctatgccaaagttcacatgtcaacttgagattgaccacttaaggcgtttgtatcaacatctttcacaatatagtgttatccgagaaaggacctccactacaggtaactttgtggaggttcgcggtaatcagcaagagattatgcaactactcgaacatgctgaaagtacatctcttattttagcattgcagcatgttataaataatcggctcacaaatgatgatataaacactattcttggtaggaaagatgcacttagtgaatatcagcgaatgtatgataacgctgataatcatattgaaaccgagtggcaaaggttctttgaaagaaatgaatggatttttggctacggacttagatacaaatatctaagtattttacagagagaagcacatatatctcatacggacttaaatggttcgaatgatgttatcgctgatttcttaattacagattcacgatttactaaaattattgagttaaaaacgcctcaaacgaatctttttgttaacagacaaaatagagcagattcttggcgattatctaacgagcttactgatgctgttagccaaattttagctcagaaagcaaattgggaagtggaaagtcaacgtgataattatacggctgaaggtaatctcataaatgaaagaacatgtgatcctgaatgtattttaattataggaacgttgggtgatatttctggtacagatagagaaaaactaattaagaaaaagacctttgaactttatcggagaaatctaaaaaacattgatattatttgttatgatgagctgctagaacgagcaaaatttatcgtgagaagtgcagagattattgaagaggctattggtgaagcgttaaccggtagttga

SEQ ID NO: 62423 - DNA, 1299 bp, Gracilibacter sp. BRH_c7a
atggatgaagatttgttatatgagtttgatggcgagattagatacgaatatcctaaggaaaaacttaaaaccaaggataagtattactttgttgataaagaacgaggtatagaaatcctatctaaagaagtaatgaaaaagaagaaagaagtaattcactacccctttagaagggatggtaagaaaaaatactcgtttactaaaattatatatagaaacatgcctaaaaatttacccgttggaataatgaaaagtcccaattacggttatggctttaccaaagaagtaaatccctttatctatagactacaggatgagtttaaggatttagatacattaatagtcgattatgaaggttgcacagaaattattgatggtaccataattaagttatcatatgaagatattaaacttgcaagagaaagaatagctccaatgttatctaagcaaagtaaagaaaagaatgttatagtctctaatattataaataatattttcccaggcatcgttgaggatgaaaagtatgattatgtctccggagaattagctaattttattacatcgaagagcattacaacggataatctttcaatctcagatttaaccactatgacagatttaatatcaaaactagacattagtcatttatttgttaaggaaaaagggataattgctactaaagaaaaagttgaaaaagtatttttagaggacattattcataagtttgaagaactcatgaggcaaaaaactgaaacagatcgattagaagataaatggcaagatttctttagagaaaacatgctttactttaacatgggctatgtcgaaaaatttgagaaagaacgtatacaaggtgataagtcccttaatattccagactacattcttttaaatacttatggatatcttgacgtttttgaaataaagactcatataactaaattgttaagctacgatgcaggaagaaataactttcactggagttctgaggcaacaaaagcaatttcacaatcagagaattacattgactcaatgatggaaaacagtaagaccataatgattaatattagagacaaatacagaattgaagtagatgtaataagaccaaaggtatatattgttgctagttcatgggactatattgctggggaagatactaaagataagtttgtggcagaaaaataccaaaaaatgaagaatgattttaggagattgaataactcattaaaaaatattgagtttgttctatatgatgacttacttgaagtatttcaaaatacaattaatcggatttcttaa

SEQ ID NO: 62424 - DNA, 1131 bp, Alphaproteobacteria bacterium BRH_c36
atgaacgacgatgtcgaatacttggcgaattacaaagcagatacgctgtatatccatccggcagcaggcaacaaaggggcctacgcgagcctcctcgcggaaaacgaggttatgattggggaaattgaggtcacagggcggtcacgcttagccgtttcagctttttttgtgaatgaaaaagagaactatggaactttaaaactgacaaagctgcagtaccataagacgcatggctggcgccttgatggccaaattacaatgaacccttttctagttgataggatgcaggagtttgtctctcttcttgccagcttaaactttaaagatgccagcaaaaacaaaatatcattgaacggcgcaaatctcgatgtggttgatgcgataatgcgcatggaacgtggcgcggacgtgcttagaaccattgcggagagtccggccctttctgaagatatatttgcgcttgcccacaaaaaaggggagctggaggtttttcggaaattactgaatgatgacagcttcaagtctgaatacgctgagcggcatgaattaaaggcggcgggcgctgagggcgtgtggcaacatttcttcgagcaaaatccctggattttcggacacggcctgaattatgtttttctcgataaaataggcgacaagcttgagactgtgacaacaggtttttctcatgaacagcctgggaagagggtggatgcgctaatgcgcacgcgcgcagtgattagccagtatgtactgattgaaataaaaacacctacagcaccgttgctgaaggcacgcgagtatcgctcagggtgctggtcgcttcatgaaggtgtgtctgaagcagtaacgcagatacagaaaacgacatttgattttaccagcaatcaatttcacaaggtgcaaatgaaggagggtggacgattaacgggtcaagaggttttccgtattcaaccaaagagttatttggtgattggaaatcttgctgagctgcaaggtcaagatgataagttcacttgtttccagctgtatagaaattcccttacatcgcctgaaatcattacctttgatgaactttacgagagagcaaagtgtattgtagaaactatcagtcataaacagaaagcctcaacatga

SEQ ID NO: 62425 - DNA, 1263 bp, Chryseobacterium sp. Leaf201
atgaaaaagcaaaacaatattgagaatgatctttattattttaatcaaagaaaacctgaaaaaatctatgtaagtaaagcttttccttatctacatttcagcagagttataactacagagaaaaggtatataaagaaagtttttgaaaaagatgatacctcagaactggttgaagttgaaggagaaataatcttgaaaaatataccaactttgtttggcaaataccaagtgaatgcagtagtatattcaaaacaagatacaaatcttttagaatttactttacaaaagtttatagagacaaaagatcaattaagacctgtgaaagattctgcattttcatttacaaatagggaatttaccgaacttttacaatttttgagtgatgttaaatttcttgattttaacgataaagaaagattcgttatagattcagaaaaatttagccaccacaagattttgctgaatttaactgagccagatccaaacaaaatattggtagataaaaagtttggcgacttaataaataagctcaatgaattggatttaaaagaaagagaaaattttcttgaaacattaaagaataaaatcctaactaaaacagatcttgacattttaacaggaagaaaagacggacttgaacaatttaaaaattatttaggtagtgaacatccaattactgaaattcaatggcaagatttttttaaaaataattcctggatatttggatatggtcttgattataaatttctgaatattttacaaaaggaagcatcagtttcttccgtcgatgttggtagaaaaaatgaggttaaagcagattttcttctcggagacaataattttacagttatcgtagaacttaaaagacctgatactcctttatttgacaacacacaaaaccgatccgaatcatggagattatctaaggatttaacctatgctgtttcacaaatactgactcagaaagcggaatgggaacttaaatcacaacacactcaatttgatggtgaaggcaatccaatttatcaatcaacttataacccaaaggctatattaataattggaaatacaaaacagtttgaaggagagaataaagaaagcttaatgaaaagaaaaacttttgatttgtatagaagaaattcgagagatatagaaattgttacttttgacgaacttttagaaaaagcaaaatttatagtgagcgataatcggcaaaatgatgaagttataaatttggaggaaaatgatgatttgccattgtga

SEQ ID NO: 62426 - DNA, 450 bp, Rhizobium sp. Leaf202
gtgtttgagccacttaatgaacaccttataactgagtttgaaacgtgcctcgcagagcccgcccccgctggcaggaagaaggaacaagtcgttcaagaattccttgaagccaacaccgttctcattccgactccgcatcgcctcaaccacggcctgcatttcaagtcgatcatatccaaattccccataacttctggcttggaaacagattacgtctacttgtcgaaaagctcagggtcttggcagatcaccttcgtagagctggaaagcccagacaaatcgatcttcaccggcgccacgaagaccgttcagcctagcgccgaattccagcaagcggtttcgcagatcgaagactggcgcacgtatttgagtgaaaacaagcaagagatattgaaccgcctgtccccgctgatccagccgatgagccgaaatccaattaatttcaaataa

SEQ ID NO: 62427 - DNA, 678 bp, Sphingomonas sp. Leaf10
atgactgatgccgacttcgatgaatacgaggcgaaagaggcgcagcggtttcccggtgctctttacggcagtccaagccatatccgcttagattggttgaatgcctttgacgcggcgctggccacgaaagatgaggaagccattcagcggtgcatcgagcagcgcccgtatcttgcgcagtatattaccccgagcaccggccatcacggcatatggctatttccgaagcaacaaattgctttgcaccagccgaacggatcgcccggcaagatacctgatttcctcgcagttgctaggaactcggatggatatacatggtggattatcgagctaaagcgcgcggacgttcagtttgcaaacagaaaggcagacgctttcagcccagcggcaaacaaggcacttgtccagtgcacgagctacctgaaccagtttgatcgctacgtcgatacagtccggtcgatgacaggcgttaaagagattgtgcgaccaaagagtgtgctgctgctgatcggcgactcccggcacgaaacaccggggcaaacgtcgatgcgcggtaacgtgaatgagtctttatccgaccgtttgcaggtcgtctcatacgatcggattaggcgtcacttgcaaagcgacctaggctaccgccgaagaaaccgcgactttgaggaggttgcaacctga

SEQ ID NO: 62428 - DNA, 1242 bp, Sanguibacter sp. Leaf3
ttggcacggacgagacccatccaggaaggaattcttgatcagctcgatttcaacaaattcttcggtaattatgtcacaggccagatccgggcagagtttttggacacggacgatgccgacgacattgccacgagcgaccgtcagcgactcgtcgaggacgacgagcgggtccagctgcttctcaaaaagttgcgtcagatgttcaacgatgccggctctcagtggtccaaggaaaggccaaaggaaaagttccggcaagcgacagaaaagtatccgactattcgagactgggtcgacaagcggccggatggccagcgcgacgcagccagaaatatgatcggaacgatcgcatctctccatttggaccgcgaagtggaccggccagcgctctttaaggccggcgttctggctttcgagagaattgcgattgaggacaccggaaaagagctcgagaaactttcgcagggactcacagcgagcgacgtactgccactactcgcaacctccagatcgtacgaagacgcgctctatctccagattctgcgttcccggctcgaggcgatcgagcgcctagagcacctgatcaataaggatgagctcgagaaagtccttcagaagcacctctttgacaatttgtggcttcttgatccctcctgggagggagcggcgggcgattcggacatggaaatcgcactttctaggatccgtagcggtgcactattcagcaaaaccgaggctgagaaccagaagcaaggccgtatcgacatacaatacagatctgccgccggcgtccacatgattgtggaactgaaaagatatggacggtcctcgaaaattgacgatcttgttgagcaaggaaacaagtatcacgaggcactcagggaagttctcgagaagcgccagcaagcgcatagcgggattaacgtcgtgttcgtgctggggcagaagccgaaggtcggctatctaggcgatcgaactgagtctcagtttattaccgagaaggttcagcatatcgatggtcgcgtcctctactatgacgagctgcttcacaacgcgcagcagagataccgggagtaccgcgaaaagaaacgcgaatcgaccgccctggatcaggttctgcagtcgctggacgaactgatcccggagcctagtggcggcaagtccgctggttctacggaggatcaaaaaggttcatcttccgtatcgacccccaccccgtcgatcatggcaaagaagcgctag

SEQ ID NO: 62429 - DNA, 1221 bp, Serratia sp. Leaf51
atgattgactttgagtctacaacaaaaggaatagtgttcaaatatgagccagaaacggtaggcaaggagtgggtttggagggagttgcaacaacataacgaagtccgtatctcacgcgttttctggtttgagctaagtgacttgataacccaacctagctccaatcaagattttgatgattacgtttacgatttcaaatttggaactctgagcggtgactatgtgatcattcccgctcgcatattgggcatcagtcatgatttgcacataagtaaagaaatcaatctctatagaggtatttttgcggcagaacgcagcacatcgatttttagacggctatcaggacttttagaccatacatctccaatagtgattggtggagaagcaacaggcgcaattccgtggttggttttcagtgagttactgaggaaatttccaaatactcatgaattgaacagatatgccgatgctcgcgttcatacaattcttgcgcaatacctggatggaatgaaagacgctcgaggccgctatgatgcataccttcaaagaaaggcaactcacaacgttgttaatctcggcttagaagagattaaaaagttagaaattgaaaaatacgctcttatcagaaacctcattaaggatgctttgcgtaataaattaaattgggcagagagagactggcaagatttaatgattacttttctgcttcttctttttccaaagtacatcaaggtcctaaagaacgtcaccatccatgattactacagcaatccggttaagaagacggaccgatacatcgacatcgccctggtggatgccaatggcaatattgatgttatagaaatcaagaaacctttcgatgacaaaatactacgcaaaggtgagtacagaggaaacagcatccctacagccgaattgagcggcagcatcatgcaggcagaaaagtacctatttcacttgtcaaaatgggggatcaaaggcgaacaagctcttacgaaacggtatgaatcaatgttgccaccaggcatgagtattcatatatccaatccaaaagctattatcattgttgggcgagatcagattggcgatgccgatatgacgcctcagcaacaactcgatttcgaggtcatcaaacgaaagtatgcaaatatgatggatatcattacttacgatgaccttttgagaagactcgataacactattttagctcttgaaggctaa

SEQ ID NO: 62430 - DNA, 1260 bp, Erwinia sp. Leaf53
atgaatttgaatgagttttcagtgctctgcgagacaatgctaaataagtattttagatttattgagaaaaaacacgaagaaggaagaataatagatggcaatggggtaagggtgaagatatgttatccaaccatgttattgtgtgtggagtcagaggaaaagattttctcagtggaatttcttggggtaactaaaaagtttagccctctaaaggttaagaaaagaagctatggtaatttaaaggatttaactttattgagtcatggagactttccctcacaggcaattatttcgatgtctgacgataattctttcagaggtttccttttctcaaatgaaaaaacgttagatttttacgatgtacaaaggcacccaataatcgatgaattcaaaacgcaattttgtttcaaaggagaggctactcatgcgttcgatttcacagatgactttggttctggtttaatttcaaatgtggtgcttgcatctcgaagtggtgtgttttttagggcgaaatatatatcatttcagcttttttttagtaataaatcgactgagtcttttatcgtccagagagttaatgatttgattgctaataatgatgggttcatttttggcgtgcagaattttacgaatagcttgaatgaatcttgggtcagagcatcgcaccttattaatcttgtacttaacgataagatccttgaaacaacaattggtgattacattaatgccaatcctgaaattatattggattctttaggttataaaggtatggtttatgagccgttacttcgttgggttgagaaaacacctgacaacgaagatgaggcaatcaatcctgatgctctcttgaaaagagcagatgggttttatgatatatgtgactttaaacgaggtcttttaaataggaagaaagttactaaggcggacagaaataggcgtagatttatcgatgatgttaatgaaggtatcgctcagctagataattatgcggagtatttctcttttcccggcaacaaccaacatgctttggaaagatataatgttcgggtttttaacccaaaaaaaattttgatagtaggcaaccttgaaaacactgacaggattcaagtgcagcaggctttgcgttgtaggcctgacatcatagtggttgattatgataccttgatatcaaactattatgcttctattaaaccaaacaaacttttactacgacaaaaaatcttaaatattttatatggaaaagtgcatttacatgcatga

SEQ ID NO: 62431 - DNA, 450 bp, Rhizobium sp. Leaf68; identical to SEQ ID NO: 62426

SEQ ID NO: 62432 - DNA, 876 bp, Bacillus sp. Leaf75
atgtctatttacaagaaggcctatgaattaattgatgatgctcccaaagcattggattgggatgtttacgaaaacatagcaatagaagaatatcaaaaattattgaaacaaaatgggcatgaagaaattgtgtttcaagaattttttgagagaaaccctgcatttttaccgggcgcttttggtatatatggtgaatcgggtcatccaccatataataatgccttaatcactcagccagtattacaaggtttgatgtctaaggtaccagattttttatggattgcttcagatagtggaactatctatccaattttcatagaaatagaaacacctaacaagagatggtttagaaaaaacggtgtaccaacagcagactttactcaagcgcagaatcaacttagtgattggaaaatctggttatcaaaccctgtacatcaaaatcttttttatcaatattatgatattgacagagaaataactagtggtaaagctgttagaccacaatttgttttaatatttggatctagaagtgaatttgatgggaatccagaactaaatcaaaaaagaggacagttggttcgagaaaacgaaatatatatgaccttcgataggctattacctaatattaaagctagaaatagcattacctgtaaggttagaaacagaaaatatactgctaaatttatttcgccatcctttagattaggtccagtatatgcagaggaattgagtaaaatagataataaagaggaagcgattaataattctaaaattgatgatattagaaaagattttatactttctagactcccctattgggaagaatttggccggagacaaccaagaggagtgagaaatacaggagattgggaataa

SEQ ID NO: 62433 - DNA, 642 bp, Methylobacterium sp. Leaf99
atggcgaagccctacttcgacgcgcacgtgtttcgcctgatcgatgccgaagccgagctcgtcgaattcaagaccctcctcgagactaatgtcgatctcgccgagcgtgagcaggtgcttgcgcgtttcaggacgtgccccaatctctgcgcgatgatgggacagtacaatgtccgcctggggatcggcgatctgatcaagcgcgagtttcggattctcccgcatttccggaccgatctcaccgtccgccgcgccggcaccgacaacatctgcctgatcgagttcgagggtgcgtccgaacggcatatcttcgaagacagccagcgcggcgtcgacacgtgggcgcgcgcgttcgaaaaggggttcagtcaggtcgtcgactggacgtgggcgctcgaccattaccgcaagaccggagattacgtggacgccttcggcggcgaccgacccaatatcgtcggcgtgcttgtcatcggacgctccaccgcgctgtcgacgacggtccgcaaggatcggtgggagtggcgtcgaaacaaggtcaaggccgacagcttcaccctgaccctggtgaccttcgacgaactctatcgggacttcgaaatgtggctcggcctgagaaggatggatgccgcggcctcctga

SEQ ID NO: 62434 - DNA, 579 bp, Methylobacterium sp. Leaf99
ttgctctccttcaaggcgtggcttgccgggcggaccttcttcggcgaggccgaggtggtcgcgcagatcagggcgcgcgcacaaatgtgctgccttctggcgtcccatgccggaatcagggcgcccgatctgatccggttcgaattggccctcaagggtctgttccggacggatctggtcctggggaacgatcacttccggcagttcgccctgatcgagttcgaggatgcccaggccgacagcctgtttgccggcggaacccgacagtaccggcactggtcgcggcggctcgaacacggcttcgggcaggtgctggactgggcgtggattcgcaacgatcaccccaacgatacggtgctgaccgccgcgttcggcggcccgatccatgacagtgcctacctcgtcgtgtgcggacgcgatgcgagcctggtcgatgagatggaacgcaagcgcttcgaacaccgacgcttcaagacccggatcgagggaacgccggtggcgttcctgacctacgacgacatggtcaaggggatggagttgagcttggagaacgccaagagcttcgccatcctcggataa

SEQ ID NO: 62435 - DNA, 1191 bp, Microbacterium sp. Leaf151
atgtcgttcgccgaatggatcaagcagatcgacgatctgcacacctgggacatgtcgaagggggacctcacgaccctcgagattcgacccgggaccgacgcgttccactacttttacgacccgctcgaaaaccgcctcatcaaagactttctcctcgatgaccgccctcgagtttctcttcattgcgaagttcgcctgattgaccacggagggaagtattctccgcgggttcgtctgtggaaacgcgatagaagcaagaaagccacccaactgtgggaaaccggcgaaattcctggcagccacatcgtgaaagcgctcgtcgataccggagatggtcacgagcatttcctcaccctcatggcttaccttgtggaactgtctggggtgaccgtcggcgaccgggcagttcgagtggtcgatgcgacggatgctgacattgtcagtgcgctccgggctcgcagccgagccgacgtcgttccaatgatcgagtccgtactggactcgcccctaaacggcgccgaaatcgccgcactcagcgggcggaagagtgaccttgaggagttcgagacgctactgacggacaacgcgcatttcgagcgagaggccgccgatggctcgcgcgaagctgtctggcagcgcttctttgagagagcgacgtggatcttcggctacggcttgaaccttgtttcccacgcagcgatggacgacggcaagctcgagagaatcaccgtagggaacaacatcttcaccggcgctggcaagcgtagtgacgcgatcatgaggacacgagcactcatcagcacccttctattctgcgagatcaaaaaacacgacacacccctcctctccccgggccgtccctatcgtgagccggacgtatactcgccatccgccgaattggttggaggtacggctcaactacagaaaaccgtccgcaaggcgtacagactcatgatcaaccaggtcgagaagcatacgactccggacggaacccccacagggctcgacttctcgaccactcgcccgcgacaagtcctgctggtcgggagtctcgacgagttccgtaccgatgcaggcgtcaacgcagagaagatggagtccttcgagttataccgaagggctcaggcagaagtcgaaatcatcaccttcgatgagctactagagcgtgcacgtttcattgtggccgggtga

SEQ ID NO: 62436 - DNA, 1515 bp, Rhizobium sp. Leaf311
atggttccgttagaagagccgacggtgaagcaagtccaggttagaacagaagatggctcggccatatcgctttaccagtacggcgatggccgtcaggtgctaaagatcaaggttaccgataaagttcggaagcacgttttcgatcaagaaaattcgcacgtctttcagtccggcactcacgaaatacttctcgctgagtacgagccgaaacatgagttgctcatcacttatccgacaacactcctcccccaaagcccatacttcggcacagataagtatctgctggtgcagcgtatctcattagagcgtgcgcgtccgctttgggaccacgaagaggacaatagtattgttggaagtttgcatcgacagttcccatctggatttgtctgtgatcccttcgatggcttcggcctcattttcatgcttcgatttatcgtcgatgccattgaggagatcacggaagtggaggaaattcggctatgcaaagataagactacttcctttagtaatggaatttttcggttaccaatatcgatgtatgagcggatgcggaagactttaaatcgcacgcacagggctgcggttgaatttgcaaacgaggagaaacgcgcgttccttcgctccgatcttgtcttgccctaccttccggatcacagtgggaagcctgtgttcaggagaacgaaagcggacctgaaggctgtactcggtagtgccattaattctcccggaaggcgctcacaaacacatccaaccaatgagtctgcggcggtcagggttgtgaagtcctcagctaaagagctgattgcagagaaccgtgaggaaatcctcgaactaaatcgagagatagaactggtgaccttagaggacgtgattagcaagtttgaggctcgattggcagatcgtagcttgaaagaaggtagctggcaaaaattcctctcggtgaacccattcattttgcgtcttgcattcggtttgccagcagtcgtttttaaagaacagatgcctgtgggtggatgggactttgacaacaaaggcggtaagctggctgacttcgtaatgaagagcggcgctgttggtaatttggctatcgttgagatcaaaaccccagaggcgaagttactgggaaagacagcttatagaggcggaattcatgcgccatcttccggcatcgcgggtgcggttacacaggtactcgatcaacgttatctgctacaggaccacatttcacaactcttgagaaattcgcaagaggaagcgcatacttatgccgttggatgcatagtaattatcggaaccacccctactgttgaatcctataaaaaatccttcgaactgtatcggaacaacctcaacggcgttgtggtcatcaccttcgacgagttgcttgacaagctcaaggcacttcacgccttcctagttgaacctcctattgaggacgcagctgaagatgacgatgtcagcgagataaatcactatgacttcgacttagacgaggatgaggatggcgacgaatag

SEQ ID NO: 62437 - DNA, 771 bp, Modestobacter sp. Leaf380
gtgcaggagttcctggaggcccacccatccctgctcccaggtggcaccggggacatcgggcccggtggccaccacggatccacatggggtgcagtcatcactcagccgagcctggagggagtcgagcgggaccgccgacccgacttcatgtgggtgaccaggtcaacgagcttgatcacgccgatctgcatcgagatcgagaagcccggcaaacgctggttcacgcagaacggccgtcccaccgcacatctgacccaagctctcgatcaactgaccgattggaaagtctggttctcggagccggagaacgagctgcttttccgacgcacttacctgatcggcgacgagtggagacacaggcaacttctacctcagtgcgttctgatctttggtcgtcggcatgaattcgagaaccccgacgcacgcgccaacgcgggccgactgcggcgcaagcgtgacttcatgcttcgatcgaacgagtcgttcatgacgttcgactcgctctcgccgaacgaacgacactgcgacgcgcttacgctcaaggtggactcgaacggccccaagctgtggaggctgccgccctccttcacgctcggtccggttgccggcaaggcggctgccgctctcggcgacccgcttgatgcggtcaagaagaccgagctgtggagcgaagcccggaggaagtacgtgcgcgatcgctggaactactgggcgaaggcgttctacgcgccccgggaggtccgcacctacgatccgagccgcggcgagtag

SEQ ID NO: 62438 - DNA, 1404 bp, Rhizobium sp. Leaf391
ttggtgaaaagcgttaacagcttctacaatcagccggatgtcaacgaaccgaccctgctgtttaccattgacctcgacaagaaggtcgcaggcgttttcccgctcatcacctatcgaacaagcaatatctactcacagaagtacaaaaaaattcggtcgatctggttcgacctgccgccggacgattgggacgcgcccaccgatcaccacagtgcgatggaattcctgaagatctatttgccaggcggcttcgttcaggacccgacctacggacttggagtgacgaaggagctgcgccccatcatccatgccgtcgaagagatcgaaggcgtcagccgtattgtcatcggcggcagagagaccacgaggcacgagcattcggtcttctatttccgcgagagcgatttttccaacctgcgcatggtgttcggccgaacgacccgacgtcaccagcaggaaagcctaatggagcgcaatatcctcgcgcataacaacgttctgcatcacgtgtatccggaaaaataccggctgaaggaaccgccctatcgtccgggtaccatctacaagcttgtcggcgggcaggacgccgcgcaaacggtccttcagggaaaggaccgtaccgccttgcttaagaccgtcgtcggcaacgcggcggccatcgccgatcgcgatccgaaggaattcgttcaactgcaaaaggatctcgagctggtcagcctcgacaagctgatccgcacgtttgaaaagagcctgggcaggaaccacaacgaaagccattggcagaagatgctggagctgaatccgttcatcctgtcgatggtgttcggttacccgatcgtcatagtgcaggccggcgcctccgtcggcggcggctcgatcgccggcaacgggacgaagatcgccgacttcctgtcgaagaacagttccagtcataacgcagctatcgtcgagatcaaaacaccgcaaacaccggtctgcgggaccgagtatcggggcggggtgttcaagccttccaatcacctgatgggcgcggttgcacaggtgctggaccagcgtcagaaattcacggtcagcttgccgatgaccaagtacaactcacccgagctatcgagtctgcaggcctatgcagtggactgcgtgatcgtggtcgggacaatgccaacggaaattgcccaaatcagttcgttcgaaatggtgcgcagccagttcaaggatgtgcggatcgtgaccttcgacgaactgtttggaaagctgttgttgctgcgcgagatgctgacaggcgagcggtatgtatcgccgatcgacgacgaagaggatgaaggcgagccgccgttcgagatcgatgcggatgacgaggaagacgagtcggagttcgacgaggaagaaatcatcgtactgcgatga

SEQ ID NO: 62439 - DNA, 720 bp, Rhizobium sp. Leaf391
ttgaagttcacatccgaagaagacgtggaacgctattttgcagagcaagcggcactgtttaccggtgcccactatggctccattcgcaatgtcgagtcagctttggtcgttgagttgctaaatgctctggatgatgggcctgaagagtcgattcagcgggttctgacagcaaatccctatcttttccaatatgctatgccaaacaccggccatcacggcgtctgggttttcccaaagcggatgatccgtacgcagcaggccgacaaaacgccgggtttgatacccgactatctggttgcggccagcagctcgctcggattcacttggcacattgtcgaaataaaacgacgcgatacccagtttgcaagtccaaatggtaagtcgctaagcgccgctgggctaaaggcggtagttcagagcgcgacatatttgagtcactttcatcagtacatcgagacggttcggaataacgttggcatcgccgagatcatccagcctgaaaacgttatcgttctgatcggggattcatcgactgagacgcaggaacaagttgcccgtcgagcggagttcgaacagctagctccgcgggttaagatcgtgacctatgacagaataattcgtgggcttcggagcgacacgcacttctggactggcaccgataaggctgaccaacgggccgtcagtgttggaactgaactccaaaacggcgaaaccgtatga

SEQ ID NO: 62440 - DNA, 633 bp, Methylobacterium sp. Leaf456
ttgagcctgtttcagccgctggcctggagcctcgctcgggccgagacggaactcgacggcttccgaggctggctcgcgggccagaacttcgtcgcagagacgccgatcgtcgcgcagatcacggcgcgtccgcacctgtgcggtctgctggcagcgatcgctggcttcagcgcacccgacctgatccggttcgaactctcgctcaagggcctgttccgtactgacctcgtcctcgggaacgatgcggcccgtcagttcgctctcgtcgagttcgagccggcggaggcgacgagcctcttctccggtcgatcgacccagcaataccgcccctggtcgcgccatctggagcacggcttcggccaagtcgtcgattgggcctggatcaggagcgaccatccgcatgacatcgcgctgacgaacgcgttcggcggccccgtgcagatcagcgcgttcctcgtcatctgcgggcgcgacgccggaatgcgagatgagatggagcggcggcgcttcagccatcgcggcggcagcgtgcggatcgacggcgtgtcggcccgcatccttacctatgacgggatggtccgggaaatggagcgcaacctcgccgtcgcgaagagtttcgcgacgcttccctga

SEQ ID NO: 62441 - DNA, 1044 bp, Nocardioides sp. Soil777
atggatgtcgacgactacgtagggcgtgatgggatgctcgccttctttgacgactgtcgccaactggcggagcagggaaagatcgacgagctggtgcaggggctagccacgaaggcggggagaacccaagagaaacctgaagtcgctcggattgctgctggcgcgctggtgttggccggtcaacccgggatcgcggcaatcggacggtttctggaagaagccgatgttggcgggcttcgtgcgagcgctgcgctaagggcgctatggctcgcgtcacagggcctcccgccaatcgtgagttcggttggcatctcgtacaccgtcgagccagtcagcccggcacttcaagcgcaggcgcgggtgattctcgacgacttcatcgcggcggcggcaacgagcgcagagcattcgcgggtactgctagccctgcagcacgaggagtcgttcctgagcccagacggaccgcttccaccgtttgcagcccacatcctcagcgtcacccgcgagtcttcgatcgtcttgactatcgcattaattgaagagtgggaagcgctcgtcgagcaagacctcccagagaagaagtaccaggactttctggaagagcatcccgtttttgtggatccgcttgccgccgaggtgttgaaccggaaacggctcggggtcgaactagtcacggactttgtcgtccgccgtcacgacttccgctacgtcgtggtcgagatcgagaagccacacgatcggatcttcacccaggccaacgacttcgggtcgtcattcagtcacgccgtgggtcaggtgcttgacttccaagggtggatcgcggagaacgttgcctatgcccagcggcacctgcctgcagtggagaacccccacggagtcctcatcatggggcgccgtagcgagatgacgactcatcagcaatcgaagctgaggcgctggctccataacagcaagaacatcgaggtcctcacctttgatgacctcagccaacgcgcacgagcgcttcacgccagtctccgggccggcgtgggttcacctccctga

SEQ ID NO: 62442 - DNA, 1233 bp, Streptomyces sp. Root1295
atgactgtcagatctgactttgcactggaattgcagttggggcaggtcgccgcacgggccggggattcccgtgtcaaggacgcgctcacggccgtgtcccggcacatgaacgccgggacgggccgtaaccgcaaagggggccgagcactcgtcggcctactggaggaagtgcgctcggcagcggcggtggcgaacgagtggcaggtggtgcgactcgtacaggactccctcgactacgccgaagggcgaatcctgcggcctgatttcgaggaacggtacgagctgttcgagcggtcgacgaaaccgctgagctcacaccaggactttgcggctcggacactgtcctcggccctcagcttcttctcgcagctgggcgacaactacctcgtggagcatcccggggcaacagccgacgaggtgctggcgcacgtcgcggccatcagccgggacgcccgctacatgcagcagtcacaggagcgcagagggcgctatcagatccttcgcggcagtgcggaggtggcagcgtggttcgagcaggtgttcacggagcggctcgacgtggaggaccccgagagagctgcccgccgtatcgtgatgtcccccgagtccctggagatcctggcagcggacagggagggacaactgctgctccaagccgcagagttgcagcgccgtcggcgcggtctcagaacactccgcgccgtggtggaggactccggggcgagcgagagcgacgtgcaacggggtctggacggccagcattggatcttcggcgggcagttcgtcggccaagccgtacaacgcaggctggtaccgggggatgaaatcgacattcccctgatacgcggcgacggcgcactgcacatcgttgaactgaagcgctccatgagtctccacggctccctcgtcaagaagcaccgggggtgctgggtgccaacggccgaagtgcacgacgcggtgagccaggcagtgaactacctggtcggcctggacgaacaccggcttcggatccgacgggaattgggcatcgaaacgcggcgtgccagcgctgtcgtcctgatcggacaccccgccctgcagccggacgtggccgaagaacagatcaacgaagcactgcgtaccctcaacacgcacatgagccgcgtcgaagtgatgacctacaaggaactgatcgacaacgccgaacgagccctgggggccgacgccagcgcaccctcgactgggtggccctaa

SEQ ID NO: 62443 - DNA, 1176 bp, Sphingopyxis sp. Root1497
atgaccgacaaccatgagttctttaaattgcggcgcgaggggaagacctacatctcaaaggttttcacttatacccgcaacagcgagcccatgcgaaatgttatcatcgtattagagggctccgacgttctgcatctcggtgagatagaaggtgcgctgcgtctccggatgtcgggcacaaagcgcaaaacacaggttacggccgtggtctcgcaagacgacaaatctatacgtcgtgtgacgctacaaaccttccagtctcgcggaaatgaggattggtatcagggatatgatgaacatagcttcacgttgaggcaggatgagtatcagcgcttaacgaacttcctaaacgaagtggacttcatcgacctgtccaacccggacgggtttcatatcgaggatatgtctgggggcgctcgtcgtagggctattgtagacgctgttgacggaaatctgatcgagcaagtccgttcgatgaactccgccgaccgagccgcacttttgggcgcgttgaggaatacacttacgcctgacgagatcaatgtgctcctcgggcgtcgagcggcgctcgaagagttcgaaagggaaatgagggcaggggagtggcccgaactccaatggcaggaatttttcgaacgccagccgtgggtattcggttacgggcttcactaccgggtgatgcggccctttgaccgcgagatgaccgtctccaccggaggtgtcgacaatcgggaaaagagtgtcatcgacttccttatgcagttcaccgattacacggtgctggtagagatcaagaggcctgacacgcccattttcaaggcagtgagaggaagcgagagccgctccggcacacatgtgttcagcgacaagttcacaggagcaatttctcagatacttgagcagaaagccgagtggctgagctttgcggagatgggcagccattattctcgtgacggcacgaagccgctcatgacaagaacgcgcaatgccaagacaatcctcgtcattggctcgcgtgacgaatttgcaaaagcacccagcattcgggataagcggatcatgcaagacacttttgaactgtatagacaggacctgcggtctatcgagatcattacctttgatgaactgctcgaccgggcgcagtttattattcgcgacacgtctgcgcctgaatga

SEQ ID NO: 62444 - DNA, 1272 bp, Hydrogenophaga sp. Root209
atgaccaaacttgccgtcgaattcgaagtctccgacaaagagctctttctcatctaccgcccacgcgatgacaccagttgggttcgcgataggttcgaacgcgacgaagatctgctggtaaaaggcacgttccacctcacgtccaaggaccttgtggaggacgcagccgaagaagcggccaatgctgccggggatgaggagagcgtcctgtggattgacgacgatagattggtgttctccatcgcggcggcagaaggcgagtacttccgattcaagccccaggtccttggttttgagacgccggtcttgctccatcgggacgcgcggcccaactggaaatggttcagcgccgaacgcaaggtgtccatcctcagcatcgtccaaagcctcggccttgagcgcatcgttatcggcggctcggatccggacgcaatcccgatccccgaatacgagcggttgctggaccagctcccgacgccatacgagctgcgtcgctatgtccaggcgcgtgtcggcactgtggttcgtcagtacaccgcgccggcaatcgacgccgaagcgcttctaaatgcttatgtcgacaggcgcaccacggcaaccgcgccaaacctagaagccccctttcgccagttcgacgttgtcaaatacgccttcgctctggagcggctgcaggccatgctggccaacgagaccgggacttccgaggcgcagtggcagttggagatcgtggagatcatcctgctgctgaaccccaggtacatcaaggctttcaccgaggtcaggctttgggacgccgacgcctccacctggcggcgcatcgacatactcttggtcgatgcatccggcaacgtcgacgtcatcgagatcaagaagccgatgggcaagcccatcatgctgccggtgcgctatcgcgaccaccacctaccgatgcgcgacttggtcggtgcgatgggtcaagtcactcattacctgaggcatctgagccgttgggggccggctggagaggactacttgacccagctgttgagcaccgacctgccagcgggcttcaagatccggatcatcaacccctcgggcattgtgatcatggggcgcagcaacacgctgtccgatgcgcagcggcgcgagttcgaagttctacgtcgcgattccaaaggcatcgtcgacatagtcacctacgatgacctactggcgcgggttcaagcggtgctcgatcagttgcgcaacggaccggctctcagggtgtcaccagcgtctccgacggccggatag

SEQ ID NO: 62445 - DNA, 306 bp, Caulobacter sp. Root487D2Y
gtgagtagcgaggtgtccaacgcggtcacgcaggtgcagaagaccaccttcgattttacccgacgccgcttccgtgacgtgttgaaggatgctgctggaaacgacacggccgaattggcctatgcggttgagccacgcagcttcctcgtggttggaaactcggctgagctttcaggcaacgacgacaagatcgcttgcttcgagctgtatcggaggaacgtgcgctcgccggaaatcctgacgtttgacgagctactctttcgagcgcgcttcatcgtgcagaacctcggcggtcagaccaaatga

SEQ ID NO: 62446 - DNA, 1158 bp, Ensifer sp. Root558
atggtcgacgacaacgcgaagttctttgaacttcgaaaggaaggcagggcctaccttacgcgggtcttcatgcagggagcgatcaatcccgagaagcgacgtctagttcgatcggtaatagaaggaaccgagagggtcttgataggggaactcgagggcgcgatgtgccttcgactaacgggcgagaaacgcaagacgcaggtcaccgccttggtcagtcaagacgatggtggtgtcagacgcatcaccctggaaaccttccagtctcgtgccggggattggtaccagggttacgagaaagattcctttacattcaggtccgatgagttcgcaaagctgctggctttcctcgaaagcataaagttcatcgaccgctcgaacgaagaacggttcgaggtacgcgacgtctcggtcggcaacggcccgaagataatcacagatgcgtccgaccatgcgatgttaacgaggatcaagaagctcgatccccgcgaacgggagcgcctcttccgcgggtttcacgccgacctcagccagaaagaaataaacctccttctggggcgtcgccaggcacttgaagaattcgaatgtcagctagccgcagagcagtgggtggaaaggagctggcaggatttctttgaacggcaaagctgggtgtttggctatggcctcgattacaggatcatgcggccgttcgaccgcgaaatgatggtcggcgcggggggcactgacaatcgggagcgacccaccgtcgactacttgatgaacttcactgactactctgtcctcgtggagatcaaacggcccgacactccgatcttccagcagaggcgatcaggacgctccggcacctggaggttcagtaatgaattcatggacgctgtttcgcaggttctggaacaaaaggcggaatggttggtgcaggcgcacaccggtctgaactatgacaagtccggaacgcgccggatgacggcgcgctctcgcgatccgaaagcaattctcgtgataggccgcggcagcgagatagagggctgcggtggcgcccgcgacgccgaagtgagacgcgacacattcgagcttttcagacgagacactcgtaacgtggatattgtaactttcgacgaacttctcgaccgtgcacgatttatcacaagagactaa

SEQ ID NO: 62447 - DNA, 1434 bp, Acidovorax sp. Root568
atggaaaccgaggtgggagcgatagccgaggggcagcagattctcagtggcaatgacgtgatggaggcgcagttcaagttgcaagaagcgaccgagaacggcgagcccgctcagaagctgtatttgaagacgttccaacccatcgaccgggacatgcagatatggcaagcaagacccgaatcggaatggcccttgctggctaccatcctggcaaacaggatcatcatgtatccaatacatgcgaatccacacacaaagcgctacctgaagccaaagcatggacgcttcacgaccgttatttacgaagatggcgcccgtagcgatttgccaagcgacccgcaggacgcagcagctcacgtcgcattgagactggcatcgagcatttttgatctgcctggtgacgggcttggccttatcaaagatctcgacatggtttggcgggtcctgtcgctggtacagcaagcagacattcttgccattgggaaaaaaacagaaatgcgcctggatgggcgcacggtgtttatcgaccagagtgaactggacagcctgcgccgcgccttcaaccggaccaagacccgtgggcgaagcctgatccaaaggatccagcagggcctcgtttatgacgacgtgctcacgagaatcaatcccgagaagttccaacggatcgagcgggttgctccacctttggtgcgggtacgacgcgaaagcgccgcgcagacctccagtcgcgagcgcgcggagcgtcgagccaatgttcagacagtacgaaagcaggtcgatgagttggcggccgaggcacctgccgagctattgaaactacacgcggaaatcgagcgagccacgcttacagcgatgattggcaagtaccgagatatgctggagaagaagctcagtgaactcctctggcaacgtttctttgagcagcataaattcgtcttgagtttggcttttgctcgacctgtcgaactgtctcacacgcagtttcatgctcaaggatcaggcctgacagggtcgggcgcgcagattggggacttcctcttcaaggagcaaggtcaagcgcttgccattgtggaaatcaaaaccccggatgcacccttgatgcttgccacgccgtacaggaaaccgcatgttttcggccctcattcagaactgagtggtgctatcacccaggtgctgcatcaacaaagtgagttgcgcacgcggtggcagacacatgttttcgataacccgtccctgcgccgctcccgggcggacgtcgtcaaatgcgttgtgcttgctggacgacgtcctattgaagagcatgaactgcgttgttttgaggttttccgcaacgcctgcaaggacgtggaggtgattacctttgacgaactattggtcaaactcgaatacctgcagcagcacctgcaagcagttcccggtgaggtacctttttaa

SEQ ID NO: 62448 - DNA, 1233 bp, Streptomyces sp. Root63; identical to SEQ ID NO: 62442

SEQ ID NO: 62449 - DNA, 1203 bp, Lysobacter sp. Root667
atgtccgacgatgagtattacgttgggaacaaaattccagggaggatttacggatccaaatcgttcgaaatcaaggaacaacctctggctgaggggcggactgagcggcctcctagacgggcgcgatatctggaccgggtgtttcccgacgtcgaaggagaagttctcgcagtcgtgaagcacgagctcgtgcttcggacgaccacgacgggcaagcggcagatcaagttgtacgtagtcgaagaccctcggggcatacgctccctagtgctacaaaatttcaatatgggtgatgggggcgacacccccagtaggaacacccacttttcgctctttggtcaggaaatagacgaccttttagagatcgcctcattagcccgcgaaggagacttccaagtcagcggcaagtttcgtatcggcgtgaatcagttgcagcgtctcgatatcacacccgaagccgttcgcgctctcgttgggtcagatacaggactcttggaaaacgttctgcgaaacgaggtgacagagaaagatgtcgtcgccgtggcctaccgaaagcaacaggtcaagcgcttcgaatcgcttctccgagatcccgtgtacttcaaagaagagcaagagagagccgccggtaacggtgccgaagccgtttggcaaagcttcttcgaagagaatcactggatcttcggcggaactctatttctgacctcagccggatcaatcgacagcggtaagttggagcgtgctgtagcaggtgcctcagtagctggctatggcaagcgaaccgatgcgttgctcaggacgcgcgggcgcattggagcattgtgcttcgtggagattaagtgccacaccacgccattgctcaagtccacacaatatcggccgggggtttgggcgccttccgaacagatagttggtgcgatatcgcaagtccagcgcaccatccaactggcagagcgcaccatcgagaagtcattgcggccgaccgacagcaatggcaacccgatcagcgatgacgcgtatctcatacggccgcgttccgtccttatttgtggagacttagaacaatttgttacgccacttggcgtaaatgaagataagtacacgagcttcgagttgttccggcgccacttacagggacctgagatcgtgactttcgatgagttgctcgaaagggcaaagcttatggttgagacctcagattga

SEQ ID NO: 62450 - DNA, 1041 bp, Pseudomonas sp. Root9
atggtggaaggaaaggcagtcggtaagcctagttattttggcttggagaacagtgatgagattcctgctcgtctgctgagaaagctgtatggcgaggtcgaagctgacgggctgatggactatgtaactgccggttgggactcggtaatcgaaaacagcgaggcttacctacagatcgtcaccttcgtgcaggcaaatttggttgaggctttccgctctacacacggtatggaaatgcggatggcgcatgctcgcttgcaaaaagcggtcgccggccgattggaaaaactgccccagcacaagcgcgagtttgcagatcgagcaatcaagaaggttttgaaaaagtattacgacgaacctgcccacaaggtacaggctctcgcatttgtcgttcttgaggccgtagaacgtaccgaataccgctctatcatcgagcatctcgctgaagcaaatcgcggcgatatcgttaaccttgctgatgcgctggagagctttggccttgccgacatggccgttctggtcgaccaagctaaagccagactgcagttcttggatgacttggagcgcctagtccgaaatgaaggctgccttgagtcaacggtacacaaagctatagaagtaaatctttggattttgggtgctgcattcacgatctttagttccaatatcactttgaaacggcagattgaggagctgctgaaacagaagtactccggagcgctaggcacgacccgtccagacttgctgttgaatgaaagcctgctgggggagttcttactgatcgagtttaagcgtccctcgcatcctttgagctttgcggattaccagcaagcaactcggtatcggcatgagcttaccgggtatagcgctaagccaataaaaattctagtaataggagggcggattgatggcttcccgacccgagagcttgagcctggagtcagctgcctattgtttacagatattatttccacagcacgccgacaaattgaatggcagcttcaacgtgcaccgggttttcctggcgcactgctgatgtag

SEQ ID NO: 62451 - DNA, 819 bp, Pedobacter sp. Hv1
atgctctaccaaaggaactattttgaactaagcccaaacgaaattagtcagctcgataaagcagaaaagtattacaagaaagcgcttaaaaaaaatgatggtgggttagatggtgcagagtttatccgctatcacgaaatgttgccaaatgcctattacaattatagttcgttgtttcccaacaaccatattctgtttgattttgagaagcatggcaaggtcatcgggcaaaagcttgaaggttttgcagcgttggtagaggctgaagaaacgaccgaacgtgatatactgaactatatccgcacaaccgaaagctactttatactcgaaagcctgcttatggatttctataccggaaaccatgaagcctacctgttccgggaatttgcacttcctcccaactacattgtcgattttctattagtgggcaaaaactctggtggttatgagtttatctttatcgagttcgaaagccccaatgccgatataacattaaaggatggcaatttgggtgtggcatttcgcaacggtattaaacagattgaagattgggacctatggcttgagagtaatttttcgagcttaaagaacgtgtttaagaaatacaaaaacccagacgttgatttgcccgaagagttttacgaactggacaagacaaggatacattatattgtagtggcaggaaagagaaaggattttacgcccaagacttatagactgaagagaaaaaacataaatggtgtaaaaatattgcactacgataatgttcttgaccaggcaaatttttacgtgtaccataggcataaaatacaaccatga

SEQ ID NO: 62452 - DNA, 1194 bp, Frankia sp. DSM 45899
atggcttctgatgtagacgcgcatttcgctgctcagcgcaggcctgggcgcctctatttcaccaagcgtttttctcaagagggtgctgaagtagacccaaatgggcaaattccgcttcaacagcggatggcttttcaggttcacgatacgagcgacgatgttcgattcgtccgaaatggtggaatcgaagaagtgctccgcgaaacccgacatcgccgtgaccagcttaaggcggtctttttcgaggatgatcgtcgaatatcccagctagtcttccagaagttcagcgtaaatggaattcctcgccgggagaagacgttctcgctaaacggtgaagaggtggaggcgctaaagagatttctggcgctgattgcatccactccgatgggctcgacagagggaagtcgtctcgattctgatcttattcgggaagttctcgattccccggagatcgtcgctcagctgtactcttctcgaaaagacgacattaccaaaatcattcaggaagacgagactgcggtagatgtgatcgccgtaaggcgcagaagatctgctgttaagctattcgagaatcttcttgaggacgccgattactttcggcggcaccagcaagagctagggaagtcgcgcccggaggacgtgtggcaacacttcttcgaggaaaatcgatggatctttgggataggactttccgcgcaagttttcttgccgtgggacctaggtcgtctgagtcaggcggtcgccggagcgtcgattgagggggccggtaagaggccggatgcccttatgcgcactgctggaacgatcggttcatttgtcttcgtcgaaataaaacggcctgatacccagcttgttcgagcatctacttacagatctgcaacctggcctccggacagtgagattgtcggcgcagtagcccaatgtcatgcgacggtggattctgctataggtaggtggcagtcacagcggcggcgcgactcggatggttacgatataggttttgatgttcactactgtcgacctcgttcgtacctgattgccggccatctcggacaatttgtgcgcgaggggagctgcaataatgaaaagtttcgctctttcgagaactaccggcgtaatctgactgatccggaaattatcaccttcgacgaactgtacatgcgtgcgcgatgtgcagttatggatcttagctag

SEQ ID NO: 62453 - DNA, 1002 bp, Rhizobium sp. BR10423
atgcccctcaatccttaccgaaccggttttgttgcaagcgcggaagagggtgctcggcttctttttcgagcgcctggaaaggaatcgtggcgtctggactacagccctgcccccagagcaaccgatgtcgctgaaaaattgaaccctgccttttacaatcagcagcgctacacgatcatcgagtgccagagagagctcgacgtagcgaggacctttcctttgaatgtggctgcttccagccccggattcatgcagggaaaatatgacacactgcgctcgattacgctggagggcttcaaactcgcagattgccaaaacgttgaagatgttcttgaagccctccaggctttgccaagcggtttcgtaaaagacccttatttcggactggggatcaattttgacatccgctatataatcgaaagcattgaaagaatggacggcgtgtccgatctgcgcgttcgtaagggacgccgaacgggattgcccaaggtcgaaatgggtacctacgcaatctcagcggcatcgtttgatgagattaggaaacgcttacgccgcatacacgccaaagcgctagatgttgccgctgacgagaagtttgttctaaccaacaacgaactccttcacgccgtggaccctcagactttcccggttgtcaagcgacgctacaggaaggacgccctgtcagaggcattaggagacggtctgacgaagacggcaggcctcactgcgggagaccgtaagaccgcggcccggacaacctcagcggtcgccaaaaccatgagccaacgagagccgacgaccttgttggctctaagcaggacgatcgagaccgttacgctcgaagaattaattgtgaagatgaaagccatgctttcgaagcgggtaagcgaaagtggctggcaggttttttttcaaggacaatccctttgtcctgaagatggcgttcggttatccggtcatgcttattggggatcagttttcggtaggggggcggcaatttag

SEQ ID NO: 62454 - DNA, 582 bp, Rhizobium sp. BR10423
atgcttattggggatcagttttcggtaggggggcggcaatttagcgggaagggcgacaagatttcggattttgccgtgaaggcggccgcgagcggcaatttggcccttgtcgaaatcaaaaccccacatacagatcttttagaagcaaaaccatacaggggcgggttgtttggcccggaccgtgaaatcacgggcgcagtcaatcagatactggaccaacgatttcaactgcagcgcagccttcctattatgaaggatgcgtcgggaatctatgacgtcgaatcctacgcgatccaaggactgatcattgcaggaatgattccgacgggaagggacaatctaaagtctttcgagctattccgaaacggtctcaagtccgtctccattgttacctatgacgaaatgctagcgaagctagaattcctctacgaggtttttcgcggcgactctgagcaggaggttcagtcgggggcggcagctacaactgatgccaatggtcccgaagacgaaatcgatctggagctggagactgatctggaggctgatatcgacccggaagcggacaacgagagcaggttttag

SEQ ID NO: 62455 - DNA, 726 bp, Sphingopyxis sp. H005
atgcccactctattcgagatatccaaaccggaaaatcaggcgcggtttcataaggaacttgcggagcattttccggacgcactgtacggttcgagacgggatttcagcgcgaagctcgccggagaattcgacgcggcgttggcgctagggtcggaagagacgatgcaaaagctgatcgaagcgcatccctatctgttgcaatatgcattcaaaacgactggccatcacgggacatgggcatattcgaagcgatggatccggaccaatcaggtgaacggtctgcccggcctcattcccgactttatcgcagccatgcaaaactcgcttggatatagctggcagattatcgagctaaaacgaccagacgttcagttttcgaacaagcgcggcgacggcctcagcacggaagctcataaagcgctggctcagtgcggcgagtacatgagccatttcgcgaactacatcgagaatgtccgcgtgaatgtcgggaatgagcgcataaagcagcccgacggcgtcacgatcgtaatcggggattcccgcttcgagagtgaagcacagcgaagggtaagggcaggattccaggacctaagtccaaagatatcgatcgccacctacgaccgtctgcgacgaggcctattgaacgatgtgttgccttcggcgctcgagacgccggcttatgacggagcgcaaacccccgattttctgagcggcggacccgcctga

SEQ ID NO: 62456 - DNA, 726 bp, Sphingopyxis sp. H012; identical to SEQ ID NO: 62455

SEQ ID NO: 62457 - DNA, 726 bp, Sphingopyxis sp. H038; identical to SEQ ID NO: 62455

SEQ ID NO: 62458 - DNA, 726 bp, Sphingopyxis sp. H053; identical to SEQ ID NO: 62455

SEQ ID NO: 62459 - DNA, 726 bp, Sphingopyxis sp. H077; identical to SEQ ID NO: 62455

SEQ ID NO: 62460 - DNA, 726 bp, Sphingopyxis sp. H080; identical to SEQ ID NO: 62455

SEQ ID NO: 62461 - DNA, 726 bp, Sphingopyxis sp. H085; identical to SEQ ID NO: 62455

SEQ ID NO: 62462 - DNA, 726 bp, Sphingopyxis sp. H093; identical to SEQ ID NO: 62455

SEQ ID NO: 62463 - DNA, 1371 bp, Sphingopyxis sp. HIX
atggccgatccgaagctgaaacgaagcgatcctctcccgacccgccgactctttgatattcacgtcggagaggatcaactcgtcacctatcctacttttacgcggccgaccgaccgctttctgaccggcaaatacgcacccctgcagtcgatcagcttcgaactcaccgagccattttcgctgccggacacgcaggaagacgcggtcgcctttcttgacgaccggctgccgccgatgttcatccgcgaccccgcctttggcctcggcgtgaccaccctcatcgccccgctgataaatgtcatctgcgagatcggcacgatcatttacttggccctgggctcggacgagacacatatcgaaggcaagacattccatctgaattacgacgactatgaagatcttcgcctgaactttggccggatcgctcgcaaatatcagaatgagagcaagatagaccgcacgatcgccgccaacgatatgctgcttcatgatctagaccccgagcgctttcctctgcgcggacggccctaccagacgggttcgattcacaagttgctcgggggccccaatcttcaaaagacacaactcaaaggcaaggatcgggtcggcgtagcccaagcagcctccgccaatgcgaagacattggcccgaaaggaaccgctcgaattcgctgccctgcaacgcgacatcgaactggtgagtctcgataccctgatcgaacggttcgacgccttgatgaaggccaatgcatccgagtctcgttggcagaaactgctcgacgccaatccctttatattgtccatggtgttcggctatccggtcgtcctcgttgccagcagttcccccgtgggcggcatccgcttcggcggaaatggccagaagatcgccgatttcctctacaaaaatgatcggacacagaatgctgccctggtcgagatcaaaaggcccgacaccgacctgatcggtgcagtctatcgcggcgaggtctggccgccccattggaaattgaccggcgcgataacccaggtgctcgaccagcgcgccaagttcatcaaatcgctgccggcgctcaaggagagttcggaatattatgcgatcgaggcgaatgcggtcgattgcgtgatcgtcgccggaacgacgcccgaagaccgcgacaagcgcgccagcttcgaattgttccgggcgcaaatgaaagatgtccggatcgtcaccttcgacgagttgcacgccaaactggtgatgctgcgcgaactcctcgccgcaccggtcggccccgacgatggcggtgcgatcggtgctgcggatgagcgggcagaactcgacgaagcccatcttgatgatgcggatccgcgccaggattacgacctgtag

SEQ ID NO: 62464 - DNA, 1371 bp, Sphingopyxis sp. HXXIV; identical to SEQ ID NO: 62463

SEQ ID NO: 62465 - DNA, 924 bp, Vibrio sp. 1048-83
atggaaaaaagacgaactccaactcaacaagtgaaaaagaagctcatggctttaagtggaagcaagtgcgcatttcctggttgtggggaaaatttgactacggaaagtggaaacataattggtcacattgcattaattgagtccatgtctccaggagcaccaaggtttaaccccgcgaagtcatctagtgaattattagatgcagataattatatattgctatgtccaaatcaccattacttgatagataaagagcccgaaaagtactctattgattggttaaaggctgcacgggaacagcacctaaaaaatataacgaagcttctatctcagcctgagtatgaacataaagccacaactagcatatctttatcgaaagcacttaatgaatgggagcgtgaacgagaaaactcatcagaagagttttggcaaaggttatttgaaagttgccctccactaatttctcaagcttttcctaaaagtatgtatcagttaggtagtaaatgttatgtcggtggtaaatcttggactaatagtggaggaaacttagtcgatttcatctaccttaacaaatttactggtaatattgttctggtcgaaattaaaacgccaaaaacaaagttgctagggaaaaagtatcgcaataacgcatattcaataagtgaagaactatcaggctcagtggtacaagtattaaactataaagaacagttgatgaaagaactctatcaactaaaagatgagacatttaatgcttttaatcctaaatgcctagttatagctggtagtcttgagagtgagttcaataatgaaacacaatacaaatcattcgaactatttcgaaataacagtgccggagtagaaatactcacctatgatgagctttttcaaaagtctaaagatactttggctatagcaaattaa

SEQ ID NO: 62466 - DNA, 1410 bp, Rheinheimera sp. F8
atggcatctatcagaccttcagcattcaatcaacgggaacgtttggacggcggccccttccttatcatcgaagcagccgaaccggaaggtgaaggcattaacgttttcttcactgatattcccgcagcggagcgcaagccagattcaccgatagcgttactgctcaatgtctgtcccgacagaatgaccatttggcctcttaatgttcgagaagatcgggatgattacctgcaacctaaatacggcacccttgaacgcatcgtcgtcgctcggcctgtaatcgagccctacatactgccagagaccactgacgatgtcgtcgggcttcttgagcagctgccggatgggtttgccaaagattttcgattcggtttggggctactgtgggaataccgacaaatttgcgaaacagccgccagcttagagaacgtaagcatactcattgtccaccaaggaaatgacgcgaaaattgattcgccgttctttattcttggcataaaaagatttcatgaattaagaaaagaattaaatcgcatcgcgtctcgccatcagcgagacgcgcgcaaggacaagcaatttcatgtctaccagaccttattacatgctgcggattcagcacaatttcccgctcttaagaagagcgtgagacctgatgcactaacggaaatgaccgatggtgggcggcagcatgtgacgctttccaagcgtgatcggcgcgccgctgttcgcatggttcaagacaatatgaaagcattggcggtatctgagccgcacacgctgctggcattaaagaatgatattgagctcatcacactgaatcaattgattgagcgataccaagacatgcttggaaaaggactggcggaaagcaagtggcaaagcttctttctggaaaatcctttcatacttagtcttgcatttgccgttccagcaatgctggttcaggggcaagcttatgcaggtggcaaacgacttaacgggtccggcggaaaattttcagattttctgtgcgcatccgcttcaacgggaaatcttggcctcattgagataaaaaagccgcaaaccgaactgctaggcaaatcgccctatcgtggagatgacgtttttggtccatcgacagaattgggtggggcgattgctcaaattctcgatcagcgtttcaaattgcagagtgagctacccgtcataaaaaataacatgaacagatacgatctccacagttatgcggttcgctgcatagttgtcgctggtatgacgccacaagagcatcaccaaagaaagtcattcgagctcgttcgaaatgcgtttgcagagatcgtgatcgtgactttcgacgaactacttgcaaggctaaccgagattaaaaatgcgctccaacctattcctaccgtagacacggtgctgttctga

SEQ ID NO: 62467 - DNA, 1218 bp, Streptomyces silvensis
gtgacgacatttcgatccggctccaccctctggcaactggtcggggcagcaagaaaactgactgaggatgcgcgcatccgggaccgcgtcgacgcggtgttgcacatcatgggcggcctcggcgggacgtacggcaaaggcagaccgttggtgaacgccttggaggacgtggcccaagaggccatcctccaaagcgacttcgcgttcgcccagcgcttccagcgcttcgccgcctatgccaaaggcgaactgttccttgacatccttgagaactactacgacgacgaagcccgacagcgtagcgagcaatacatgcgcaggatggccgcgctgggtgcagacagggcggtcgccgtgctggacgtcctgtgccgcgacaagccgggcgcaagcgctgccgacgcccgcgacctctttcgcggcgtagcccagtccgtcgactacctgggtctcggagatggggagggcgggatccgactctccaccaaggaggtgaggcgactccaggaatacggacacatggagatggtcctccgtaacctgccccggcccgcctccgccgaggcggcccggatgatgagcgacgtcctggctgatgtcgacgccggcatgctggcccagttgctcgaattgcgggccaggcaggtcggcctggcggccctgcgcactgcggtggaggacccggacagctccgagagtgccctccacggctgtctgaaaaaccaggactggatcttcggtggggccttcgtggccgagttggcacgtcggcagtacaccccggacgccatcctcgacatcccgctcctgcgcggcgacggctccctgcatgtggtggagctcaaacgcgccaacatcaaggacctggtcatacgacgctccggccacctcatgctgggtgccccggcgcaccgcgcggtctcccaggcgcagaactacctccgggtcatggacgagaaccgcccgagcatcctgaccaagcacggagtcgacacccgccgggcgtcggcgacggtcgtgatcggacacccgcggtacgtgtcgggggacgtcacctctcaggagatcgtggagacgctgcgaacctacaacacgcaccaggcgcgcatagaagtgatcacatacgagatcctgctggattcagcctctcgcatgctagctctgtcatcggcacggcaggacgtagaccccgaaccggatgaggagtccgccgcatga

SEQ ID NO: 62468 - DNA, 1209 bp, Halothiobacillus sp. XI15
atgatcaacttttacaaggaagaggaacgagtcctcctattttacgatggagcctatggggacgccacctggatagaggacagcttagaggaacacggccaagttacaatagcgaaaacatttactttcactaaaaatgacgtaataaacgaaccctccaactacgacgaacctgcagtgtttcaagcagcgacgcttgaggaagattattaccgattcccggggcgaacactgtcagtagacagtgacgtatacattcacaaggacatcacactaaaacgaaacaagtttatagccgaacggtcaatatcaatattcggaaaactagacaaagtcactcaagggccgatctatattggcggaaaaaggaatgacgctattccaaaatcaacatacgagcaccttgtaaagaacttccccaacaaacacgagcttgacaaatacacctcagcaaggataagcagcacaatatcgtcttatatcgaaacaaaagacgattttgaggaagacttccatcgctacatgaacaaaaaacaaagtcgcgtcggaaacgatcttcacagcagcctgtcagaattcgagaccaccaaatacgaaagaatcctcaaaaaactacaaggcatgcttaatcaagagcaaacatattcagagaaacaatggcaaaaagagataatacaaattatactcctgctttaccccaaatacctatatgtattcagtgaaagccccgtcaaagacttctacaagaacaaaaaccgaagcatagactacttacttgtagactcatccggctacacagacattattgaaataaaaaaaccattcgacaagagcatcattacagagcggacataccgcgacaatcacatcccgctccgggagctaacaggaacaataatgcaaattgaaaaatacatattccacctaaacaagtggggaataaaaggcgaacaaaaactaaccgaacgctttagaagcgaactacccaaagatttccagataaaaataaccaaccccggtgcgataataataatggggcgaacgaagggaatgtctaacgagcaaaatcaggactttgaaataataagaaggaagtttaaaaatgtgatcgacatattgacgtatgacgacctgatcgaccgactaaaatttacgatagcccaatggaaaaaacgcatccccgatcaaagaactagggcacagcattga

SEQ ID NO: 62469 - DNA, 1455 bp, Paucibacter sp. KCTC 42545
atggcgacaaaatcagtctggcaggcgctgggcattcaggaccagttggcagatcgaatcaccttcgactgcgagaagtgcgcagaaggcggaaccgacgtctatttccatctgatgccgccgccaaaccaccttatggacatggttcgccggtggcgacttatgaccgtggcggatggcttgctcaccatctatccgttcaagagcacggtcaacggatacgaacccaaatatgaaggcatcgatcggatagtcatcggccggcgtcgccatgacgcctgggaagagccggagggcgacggtgacgtgcaaagcctgctcgaacgccttcccgaggggttggagaccaatccgctgaacgggctgggcttcaccagtctcgatcggtcgatcccccagtccatcgctgccgcggcaagcggagtactaatcttcatccaaggcggggacaagccgccgtatctcaaagatgacctctacgtcatcagcgagctgtacttgaagcgccttgtgcgtggaatgagatcaatttcgtcgcggcatcagcgacaggcgagaacagagaagctgattcttgcccacaactcgctgctgtcggcgatggacgaaaataagtttccgccacgccagaagaagctcagccccgaggccatgtacgaattggtccaggtcgggcgaaactacgcaggcatcccgaagacgtcgcagcgcagtgtcgtgggaatggtctccgagaacgctcaggccatcgcaaaaaatgcaccggatgtcttgtacgagctggctgccaagatcgagcgcgtgacgctgcaggagatgatcgccaagtatgaggacatgctgaccaagggtctgaaagagactaagtggcagcgcttcttcgaggcgaacaccttcatcctctcgctcgtgttcacggtacctacggtgttcgtgcaggagacgccatatgtgcacggaaagagggtcgacggcaagggcggcagattttctgacttcctcatgcgtgggcaaggcaccggcaatgttgcgctcattgagatcaagtcgccggagacggatctgctgacggcgtatcgcgccgagcagccgtgcccatccacggagctggtgggctctatcacccaggtgctgggtcagcgtcggcggctcaccactggttggcacaacctcaagggcgaggacaatggggcgctgtcaaacgccgagttgtactcgccgcaggccgtcgttttgatcggcaagacgccgacggccaaggcagaacgggaagcgttcgaagcctttaggaacgtcgtgaaggacgtcgccgtgatcacattcgacgaattgctactgcggcttcagtatttatacgaggccctggccgctcagcctgcacctccgccgctggacgtggcgccgccttcgcccgatgcgaccgagggcggcgacgagagcactgatctgttttga

SEQ ID NO: 62470 - DNA, 1521 bp, Bosea sp. PAMC 26642
atgtcgaacaagcaggtgatctttcatggcgtccggaatgaggacagcgccacttggacattgacccaagaccaggcgggctttcaggagctcacctttgaagccaatctgatccacaacggcgctgctgacctattcggcgccggaaattccaagccagcgcgcaagaaacatctgctggctgactacgccccccagacccgccttctcagaacctacccaatttttactaaggcgggcagtgtctacatgctcgatgcgaagtatggggacatagagaaactggcgattgaaaaccaacgctccatcaaagagcaaatcgatgacgacgaaacgcagacctcatccgcgtctgacctcatagatcttccctcgggcttccaacgctcaatgaatgaagggttcggcctgatatacccgttacggtatatcatcgaagccttcgacggcattgaaggtgtaagcggcatcgtattctgccgcgataccgagatcagccgagacggcgccgacattcgcctcccgttggcccattaccacgaggtccgaagggcgatgaagcgcgcacacgatgccgcgctcgcattcgccgcaagggacaaggccgcctatgtgacctcggaactgaccgacaaggtcctcaagactgtatccgctgatgcgtttcgccaagggacggatgtgctgcgggagaaggttgcacatgcgctgagtgggaagcgctcgcgtgctcgcaaaacagccaacgctgaatccgccgtcaaaaccgtgcgggcggccgccaaggacctcgccaccgacgctccggaagagttgtacaaactcaacagagagatagagctggttagcctgacgaggctgatcgaggtctttaaggagaagatcagcaagcagctcagcgagagccactggcagaagttccttacggctaaccccttcatcctgaagcttgctttcggatatccggtatcgattttcggcgagcaggtctcggtcggcggtgggaaattcaaactgtccacgggcaagatcgccgactacctcgttcgttccggtctgctgggcaacgtctcgctgatcgagatcaaaaagccttccaccaaacttctcgacaaggccgcgtaccgcggagaggtgtactcgccctcaaaggagctctcgggctccgtcacgcagatactcgaccaaagatatcgcctacagcaggaaataacccagaaaaaagagaatgaggatattcgagatatctgggcttacgccgtccaatgcactgtgattgcaggcaggattccagatgcgaaacacgaaaggaaatcgttggaattgtatcgaagcaatctgagggacgtcgccgtcgtcaccttcgatgagcttctcgaaaagctgaactcgctacatgagttcctgtcgagcaattccaacgcgagcacaatcgagccggtccttctcgacgatgaggatagctccgatgagcccgatgccgattgggaggacgtcaactgggaggaagacgacgcatag

SEQ ID NO: 62471 - DNA, 609 bp, Grimontia sp. 96-237
atgaacgatttaataaaccttgtagataaagaacctttagaacagcctgtacaagaattccttgaaaagtgcccatccgcaatttgtggaacaaaatatataatggggaactgtgtaatttcaaagctaccgcttggtaatgaatacaaaactgattttgcttatataaatccccaatcaggctatacatttctacaccttgttgagatagaaaaaccaggaaagtcaatattcacacaaagtgatgaattcactaaagaattcaatcaagctcttcagcaagttaatgactggatttattggtgttctaataactcaggatatctatataacttactcgaacctctgagacaaaggtcaggtgattccgtagggtactataatgctcgagggctattgatttatggcagaagctcagaaataaacaatattcgaagaaaagaacgatgggcccaaaaaaccacggaaaataacttcatagagataagaacatatgatggatttgcgagggaaatgaattcctttttgcctccaaacaatttgtacaatgaagtgattgacacatatcattatgttcaaagagaattcaaattaaaacgaaacccatag

SEQ ID NO: 62472 - DNA, 840 bp, Achromobacter sp. 2789STDY5608630
gtggtcgccttcgaacagtcgcttatcgataactttgaacttgttctggccaatccagctccgcccgggcggcaaaaagaacaagtggtacaagattttctagaaaatcacagcgcgctcattccgacaccgaatcttctacatcacggcctccattttgaattgattttgtcgaaatttccaattagcacagagctaattactgattacgtttatataaccaagagctccgatacttggcgtattaccctagtcgagcttgaaagcccagacaaaaaaattttcaccaacaacctaaaaggggccaccctgtcggcagcatttaatgctgctcttgcgcaagttagaagttggaagatatttctcgcaaatgacaagcaagagttaattcgccgacttaaaccactcctgcagcccttagggatgtccggcaaccctattgaatttaattaccaacttataatcggacgctctgcagagaaaaaccttgcggccgatagaaaaaaaatctttcgcgaggtaattaatgagtccggaattgaaataatgacatacgatcagatcattgctcggtacaaaactgatcggaggcatgagaagcttgtggctagaatatctggaagccaattctggctctcacacatgcctttttcaccaaaccagatactcgcataccttggtcctgcggatttaaaattaacccaggagcagatcgaccatttgaatgcagacgggtacgagatggacaaatggaaaggaggggaactgcttacgttgaactggaaatatgccccttctagcgacgattttgacccgctcggcggtttgatcaagtcctaa

SEQ ID NO: 62473 - DNA, 1410 bp, Enterobacter cloacae 'Hoffmann cluster IV' MGH 34; identical to SEQ ID NO: 61283

SEQ ID NO: 62474 - DNA, 786 bp, Chryseobacterium sp. GSE06
atgtatcattttgacgagcttactttcgaacaaaaagaaaaatttaaagaatttaaaaaaataactagctcctttgaaattgatgttgaggcgtggtgtaaaataactgatgaaaacccatacttatggcatactgattcatatttccctgataattttcttgatgattatattcttagaaataattataatgaatgtaatggatatattaatgaattaaaattattaattgaaaataggagctgtacagaaagagaaatcttaaactttatttctaatgataaactttttatagccgcagctatcctgaaaagttttactttgtttggacatcacgacggatatatttttaaagaattcgaattacccccacattacgtctgcgattatttaattgttgggaaaaattctgatggttaccattttctcttaattgaatttgaaaatatatataataatataacaatttctgatggagattttggaacaacaatcagaaaagggttgaatcaaatcgatgattggaaaagctggatggacaagaatttcctaacattttcgagtaatttaaaacgatttaaaaataaacgagaaactttacctgatgaatttaacgattatgattcgaccagatttacatattgtgttgttgcaggcagaagagaagattataaagaaaaaacatatcgtaaagttagagaattgtccaaacaaaatattatattaactcattatgacaagctattggaagaagcagaatttctattaaattctggaagttattaa

SEQ ID NO: 62475 - DNA, 1218 bp, Methanosaeta concilii GP6
atggaattcaacgaattcataactttaaatatagaatattggaataaatatttcaaaaatctgtatacaaaaataaagaaaaaggaaattaatctagaagaaggcatgctattgtatccaaatatcatgcttttcacagagactgacaagcatttcatccttgaactatttggcgcacaacgtgattttaagggtttaaaatctaaaacaaacaaaaaaaagggaatatcaaccaatatatatttgtgtcaattcgatataagggatcatgaggaacctttcttaaatcttgcggatacacgtggttctcattttaggaacttatggctttccagagaaattgattacgaatcccttaataagagattcatttttcgtgacatatggccaacaaaattgattcaaaaaagcgagaagaacggttccctatttgcatttggggaaaattttagatcctgctatatagataattgtattatcgtgaatagacttgaagaaatctatcgtattaaatatgttttgcacctcacaataatcggaaaatcgttttcgaaatgcgaatatttgaaggatattagccgtaatcttgaatctccattagaaacgtcagatgatctaacaggtattcattacatcaaaaatgaatcagaagaagatcatatgttggccggacaatttgcaaatctatttcttgttcctggattgagagaaacaactattggagattttcttgaaaaaaatccggatttcctaagaagggcctttcgaactttgtcttgtagagatgttttgtatcaaaaggaactcaaatggattgagggaaatccatacccggaaaaatcaataaaaccggatttattatttgaaagaaatgatggttgctttgatattggtgatttaaagacaccattgttagataaaggcaaaattactaaaagcgatcataggcggagaagatttactgatgacgtgaacgaaggagtagcccaactggcaaattacagagaatattttagttttcaaaaaaatagagcatatgctgaatccaaatatggcataaaagtttcagaacctaaattaatactcatcgttggaagctatgaaaacgttattcaaaacgaggttaacgaagcttcaaggacgcttcccctcaattgtatggtcatcgattatgataccttaaacctaatgtacttatcatcatttgatgctagatga

SEQ ID NO: 62476 - DNA, 1053 bp, Haloarcula vallismortis ATCC 29715
atggaaattgagcagacgtttgacggggagatatatgagattgaagtccctcttgaggacaaagatagacttcgtcatgtcgctcactatccgattaaggatggtccaaggacgttcaaatcagttaacgtttttgaggtgattgcctctgactccggcaagaaggtcatttcattctggaagtctcgtctcaccgacagcaggatcgaagtcgaagaggagacgatcttccgatgtcagcctgatgaattacagcgattaattgctctactggataatctcgaggatatcgcaaatctggaaagggggaatcacgtaattctcgcaaaggatgccccatcagttgaggcagcaaaagcagctattgagagtatcgaatctacagataccgaagaatctgaagaattagctgttgaactcatcaagagcgtcagtgaaattgaacctgctattgatgatatcgagggatttgctgatgagttaccagaggacgttgttaatgtagaatatctcattagtagggctcgagcacgtaatgcaatcgatgaatttcgagaactgatccaatcgagagaacctgaacgagaatatcaggagttcttagagagccacccttggatatttggtgccagatatgttgataaccgtgacgagcgagagctaacgcgggatgaagaggtcgatttttgtctcgaaactgtgaatggatattacgacatttttgagatcaagaaaccagatcacacagtaatggttgaagaccggtctcacgacaattatcggccgagtgcagatctctcagaagctgtttcacaagtggaaaactacatcaatgaaatcgaagcgagccgcgatggaatcctccgacgagatgggttagatatgttgaaaccccggggtactgtggttatcggggcagacctaaattcggatgaacgggagggacttcgcgtctataacagctttctcaaccggattgacgtagtgacgtatagcgaacttgcaagaaagggggagcggttggtcgaagcgtaccagacaaagctcgattga

SEQ ID NO: 62477 - DNA, 501 bp, Methanococcoides burtonii DSM 6242
atgttagaagatggggaagagacagaacatagatatcaagaatggattgaaaaatatccttggatattgggcttacaatatagtcttgtgcaacgccacacacaatttgataatgaaaatatacctgattttactgctgttcgtgtccatgacaattctagagatattttcgaaataaaacaaccttttttgaatctctttcgtaaaaatggggtattctcatctgagttcaacgattcttggaatcaaattgaaagatacttagattttgcaagggagaataaggattatttaagacgtagcaaaggactaaacattgaaaatccaaaatgctatttacttattggatataatctaacacacgaagagagagataaaattcgaagaaaggaaaagttgaattcctcgataataattctaacgtataatgacttaattcaatttgcggaaaataccgtgggttttctaaaatctagattagaaaccaatgatgaagaatga

SEQ ID NO: 62478 - DNA, 1308 bp, Methanococcus maripaludis S2
atgaaagatattattgaactaaagcgtgaagaaaggggaaatggggatattttattagaattaaaggatgttaaaaagaatcaaattattaaacagtatttaaaatccggtgaagaaaaaccccatataatctataaactcgatatttctaaaaaaaagatggtatattatatacgggacagaaatttaccggatgaacttaaaactatattcgtaaatggttattcaaaaaggccagatggattcaaaaaatatggtcagggatttacgggtggaaattacttattatatgtgttggatgaaaaatttaaagacaaaatatcaaaaataacaatttctaaagacgataaaacaaaattttctaaaaaaaaggataaatacgaatttactattaattataaagattttaaactgataaatactaatttgtggaatatatccttagaaagggccccccgttcaaaaaatgcaattattaatcatcttcataacgtattaccagagtattttgatgaaaaaatgcttgaagatggattcacctataaaaaaggggaactttcaaaaattttggaaaaaaataaaattttggaaaatctggataaaaacgacattgaagcaattaataaattttacatggagtttatacactccggccaaatgataaacgacaaagaaaaaataatccaaatcacgtccaataaaaccgaatgggtaaaaatagagttagaagaattaattaaaacttttgaaaaaaatatggatgattgtttaaaaaataagaaaaaattagaaagtttttggcagacgtttctgaaacagtatattatattacttaccaaaaagtaccgaaaaataattgaaaaaaacaatattaaaacagggaaaacgaaaatccctgatttcatgttagttgatatttacaattatattgacatttatgaaataaaaacccccataacgtcggtgcttgcaaaattacctgataaaggcagggggaattactacttttcaacagaaatttctaaagctatttcccaagttgaaaattatatttacgaattaacaataaacgcacatgcaaaacagaatgaatttcgaaacgaatacgggattgatgcaaaaattatcaaaccgcgtggatatattattgccggagctcgttcccagttaaagaataggaaaatggaagatgatttcagattattaaataacggtcttaaaaacgttgaaattatattctatgatgatttattagccaatttaaaacattttttagaaagattgggcgataaatctaaaaaagaataa

SEQ ID NO: 62479 - DNA, 684 bp, Thermoplasmatales archaeon DG-70-1
ttgagattaagcagtcaatatgaggttgattttgtcgttctaactgaccagtacagccttggaattgggtatgaactcatagagattgagacccctcatatgaagttattcacttctaggtctgatccttcagcaagactcacacattccattagacaggtgctggactggaaaaactgggtggaagaaaatcctaacgaagttaagaagttgtttcctgctagtttgattgatcgagctgggaaaccgaattttaagcttacggtaattgttggtaaaaggtcaaatatcagagaattacttcctttcagaaataaatacgcagataacctgggaatccatattcgttcctttgattacttgggagatttgttaagaaacaaacattttaatccatttccaacaataacttctccgcaaatgaggagtctcagtcctcaagtgttaaatcaactagcaaatccgtttttcaaagcatatggagacagagagtggaggaatatagcccagagcgacacattcaacccttatcatgtaatagcttgcaatgcagatttgttattggaacatcgtgagtacaatggccttctcttcaataaatttgtctccttttggaatagcttgcctgataccaggaaaaatcaagtaagggaagacttacatactatggtaggagctttttga

SEQ ID NO: 62480 - protein, 665 aa, Pseudomonas aeruginosa PAO1
MLALRIFLLSPTRLNLRDVTIANWTKIDLLGSEWEAGAEPTVDLDSLLPSLDVWLDVPLREIQHVVDILPTLDWSGGLLGVRLAFRIKNLDKLKSEYIAQRTAARDAAIVGPNGESIKIAVWPRNLTDFLERRLRAHLELLAYPLDPAAVVPPGRSGLATPQRLPASALAFEHPPFKKLIKIDEIAAQRDFADASSSDGGEDKGEANNRRFKRRLSDQLRSYYDRHLDPTKTPSDKDYEALGAIQAAERSFDARLEEGFSAAFQELEDLGYPGMSNPKLKISTLLRGTDGLKHGSSVQYQVADPSGDGSNTLQLPEDYSGLGYQNLIAMVFMLMGFRDEWMRVEKAGILEGADVSHEIQPLHLVLVEEPEAHLHAQVQQVFINKAYTLLRKHADLGVAENYCTQLIVSTHSSHVAHEADFANLRYFRRRPAASMGETPTTTVANLSYIFGDGDETKRFVKRYLKATHCDLFFADGVIFVEGQAERILVPHFIRHHFPELSRRYVTLLELGGSHVHSFRNLVDALGIATLIIGDLDATTAVKIIDKNMRETTRWKSARPEQGKAQQTANSVLKDWHPGKKLIDELVALPPDGHISTAGGDYELYVAYQKPVNVKGASEDSDLIIPRTFEDALILENLAVAGKIEGSITSAKVRGIVAQDLSGDEGR

SEQ ID NO: 62481 - protein, 234 aa, Pseudomonas aeruginosa PAO1
MMAQLRATSPLLQRAAIARLAHTDDPLLPIRAAVEALLTLDTDGQETTFLAVLECVAKHRLFEIPDALRPFVANGAEENDVELAGDESAPGEEDAPEERSPASLEAWRAFLETPYRQSIPFAEYVSDKGPLGTHQGVKGLEFERVLVILDDSDARGFLFSYDKLFEATPATGASRKTPADTAEEGTVRTRRLLYVTCTRAQKSLALVAYTKDPEALIAAALRNNWFRAEEIERL

SEQ ID NO: 62482 - protein, 560 aa, Xanthomonas axonopodis pv. citri str. 306
MGGLPLDSDDIHRPKTGSPSGSIVFKYIFRGLCSDDEADFMSALKPAKDGQMEAHITISFSEADKTGRLRAKRWCGDHDDVGLTADMMENLRGVYLQPLRDASQALRPGRMSQLSRLFQLLVDDNGKIEINGALKLLDDELKKKAPIVSTHKAITTRHSEMLGPQLSQLLELGVSVSDFQRLASRLSLTVDLFELEQNGLGFNNLIFMAVVLSELTKNPQASYRGLIIEEPEAHLHPQLQAVLLGYFETIKAVDKEKPVQLFVTSHSPNFASIANLDSLTCLVDTGIKVETFFPRDIKFAVGKREKLERYLDVTRAELFFARRAILVEGAAELVLVSVLAEKCGHDLRKHGVSLISVEGLNFDSFIPLFGENALKIPVSVLTDADPTGPSEEDEEAGSDGSVVADDLASTDDASGGKKKAAPVYPSIGDKVQLSANTLSMIKFEDSYLKVFHGLKTLEYDLALYACNRKMMLAALSELHPKISASLAKKVDAATGETEKARVLFSGMFERKNGNVQKGRFAQALAHLIAKAKAEDFIVPGYIKSAVEHACQPGPKKGEDE

SEQ ID NO: 62483 - protein, 609 aa, Xanthomonas axonopodis pv. citri str. 306
MPAWPEEGRGRMSTDTPSLEQGAIITAPLQPMSVIACAGSGKTFTAVRRLAHIRRCLGDHRGRVALLSFSNIAVETFRREYQALAVGSLKIPSHQRVEIDTLDGFITTNILRPHAHRTMGCTTTPFLLSGSESFLLGKDYRFWVESPRTGNYPVPQAHIHRVVIGPSGAGTDFFYQNSGMLTRINNGPKAAAALGKLGAYTHELARYWADLTLREQPEILRVLARRYPHILIDEAQDIGILHQLIIERLSQAGSQISLIGDPNQGIYEFMGATGSFLSSYHSKPGVAPAALTRNYRSVPAVLDLANAISARTDEPDRHAPLTLHGAYFVPYTTTSTQNVLAAFQATLMSAGLDPGRSAVLCRARKWANELAGSEGAPGVGTTKMLAQAAMVRDIHSDYSTAFRLVATAIIGLTDNAPKGIVARLTQPARYPEERALRRAVWAFTRDSVAGLPSASLPAVSDWQPTLLQRVRVLMTNLSTAHGLNHTSSKLGSRLSKKSLSSSPLMSPPDLGADQPLRIRISTVHQVKGESLDAVLYMATKAHVSALLDGGSTEDGRIGYVAVTRARDLLWLGVPATALKILRADLEAKGFKDATAKIAAPPAGHGIGTP

SEQ ID NO: 62484 - protein, 613 aa, Methanosarcina acetivorans C2A
MHVKNFRCIKEINLELNSGLNVIIGANNSGKTSILDSLRLALGIGSYSRSIYVSNEDFFVDEFGQKAQTIEIDLTFSELTPEDRGVFIEMLKVNGDGNHELEFHVRYKIEKKNGIEKIRVRYWGGEKEANTIPIEVMELFHIVYLEALRDSENYLKPNRGNKLGQLFLKLVPDETAQEKHAQQIYESITANEDWNELITDARKKINEHLENTTLEHDTLSIDIDFAPVDFTKIAERLKIYIPILKKIKREMIENIFEEEGWEKYFEYPHSDELILKKDIKDLLKNEANSELKFKISKLEKFIQKFEIYQNGLGYNNLIYIATIIGDLIERVNRKSENYIALLIEEPEAHLHPQLQNILFNYFKNIESKNIQIFLTSHSPTITAKTDIDTVILMENSFNVDILPLKDIEFEDETDKKYLQRFLDVTKSQLFFANGVIFVEGISEAMLLHIFSKILGIDLEKNGIEVVNIGGVAFKPFAKLFNSEHMDKKIKVRAAILSDDDESDGEVSSRARNLDELNSENLKVFLGKKTFEYELFLLNEDLLTNLYKKLHPRFNPHENTEKNADDLVKKLKSNKDKGEFSQFLMMELIEKEDVRNKFRVPEYIEECVKWVVGY

SEQ ID NO: 62485 - protein, 418 aa, Methanosarcina acetivorans C2A
MMKLLEKYPDIAKAIVYRFPIFLIDEAQDTSDVQMKIFELLLENGLERLMLIGDPNQAIYEWRTANPEVFTRKEIEWETLNLYENWRSSKEICAFTDKIVSTDYVSTACNEEIKDFNFKPEIWGYDVNKSLNLETNRLIEEFIRICIIKGISISKEKVAILVRGKDILTEIRNQGDFVRKEPWKEQIRNNGKQEMDVNRIHYRNISKSKYLFDKKDYKESFRLLEKTIFAIKNGKEYVSNDELKEFIEQIDFKKWRIGLFDLLARLPSTDVSLKEWVDLANEVIRGDCFFGISDFEIKIKKGTNEIKFGQIFVDKEVETENYTLGTVHSVKGRTFEAVLLILKEKAYRNKKYVDLINENINENEEKRIIYVGTTRPQKILVIAVPESDKKVWECKFYGNNGCKQKQLDLSAFTCANLS

SEQ ID NO: 62486 - protein, 689 aa, Methanosarcina acetivorans C2A
MYQIFTKEDVLMYISKIRMQNFRCFCDTSVEFYEGLNVFIGENNSGKTTVLKALQLIFDNSVSKKLSIDDFYKGISSFDEPPQITITISIQETESEKIEDKAVVATWLTKLNSPCEATLTYKYFLPETDLEEYKKELNERDQSLISEWDILERFLQRYVSRIYAGNPISKNRVESEYLEKFDCTFLDALRNVENSIYNGKNSLLKNVLNYFLDYNLKSSIKKLEQDLEDTDSKAKLDECLTKLECCRNEFRGQSKDLLDSIRGRLDTGHILSLVESTGASVCGKPDIEGELSESDILSTLKLIIKSNSGMQIPIFNNGLGYNNLIYISLVLSNLEIITSDHFGENAKIFPILLIEEPEAHLHPALQYNFLRFLKEEIKNKNISRQIFVTTHSTHITAAVGLDSIICMESHKDHILARYPSLVFSDKPDDIESKKYIERYLDATKSNMLFSKGVIFVEGLAEQLLVPRLAEYRSLPLDKCHIAVVGVGGSTFKHFIKLFGGGIDENNKNYTLSKRVSCIVDVDPQKIPIEGRNRRWKKCWPFEVGQNLDSYEYKPISSVITNLEEALSKSNTENVKIFYNKTQKGKTLEYDLAFENKDSPLLVSGSVEISKDVSALIESSSLTPEDKSKAIFAAFYLESVEDTKGSMAFELANNLINNFNLSEGSLEFNLPLHIKNAISWVCRGVCNEPQ

SEQ ID NO: 62487 - protein, 612 aa, Methanosarcina acetivorans C2A
MNHSKSILISSGDVLDNFDHHFRVIAGPGAGKTYWLTNHVKNVVKHSSRLNPVSKVACITYTNIAAEQVLNNLGECVDKVEVSTIHSFFYKNIIKPYASHLYDELGNQLIAVEKIDGHEEHNPSFKKIESWIGEYNPDLKFLIYQENGKKISSALSHLTWEVESSGKCFLDVPKEYRLPKKLKKSYFDYKKLYWQEGRIHHEDVLYFSYRILCENPILLIFLSAKFPYIFLDEFQDTNPIQTMIVKMLAKSGSTIGVIGDPAQSIYSFQGAKREDFLDFYIQDIAYYEIQDNRRSTSKIIRLLNHMRKKGPVQQDCIRNEEGECVRVIIYQKIDDVFDNLTPESDFCVLTLKNSFVTKLKSTSQDNCLEIWDKFKNLDYNRQIFYYHLSVAIAYARQHRYENALNEFLHVFRPNHDGELREPLKGQIPSPLLSRSIAISVLEHVLDLEPFNLSLYRVNESLFSFLSDNGNKYGIFLKKIAKGNFKKFSESVLFSNLVSGVKLGEDLGYIRTIHKAKGAEFKTVFVYLHDESHLNCVLNPDLENEDDLHRIFYVAFSRAMDNLFILTPSLSPENWESLKGLNLEIEIYESIEAEHEYIPKINNRVNRSLLDFF

SEQ ID NO: 62488 - protein, 667 aa, Pseudomonas putida KT2440
MPPPHHYPRESVRAIRRNRKESHHMKLCSLRISGFQSFGQDITDITFDGVTYLLGPNGAGKTATLQALARMFGFEPGLRRLRRSDFHVPLNEQEVPAQRSLWIEADFTFDETLDDAEDDTVPPFFTQMTLQTADGVPRIRYRLEGILHPDGEVEERLHYVTRMDEHGQPTTLKPVAKRERDEIHVHYLPARRDPADHIAFGASALLGRLLRAVNWSDDRDSIKQLTEQITECLSENESIKTLSAGLSGAWQRLHKGDFFANPSLTFANSEIEAILRHLSISFTPGHGESNVDYARLSDGQKSMLYLSLVLTSLTIGREVRSGQNTSFDPLKLKPAAYTILAVEEPENSLSPHYLGRIVSSLKSSVGVDAQALIATQAPSMLRRVEPDQIRYLRLNSKRETDVSTIVLPDKHSDAYKFVREAVQAFPELYFARLVVLGEGDSEEIVLPRILQAKGAPVDEYAVAIAPLGGRHVNHFWRLLNALGTPHMTLLDLDVGRHQGGWGRVNYVRTQLDVFDPTRSIPDHWTRHSWDDAERPIRTHHWFDNGNETQSSLFQELESRDVFFSDPLDLDFAMLKAFPDAFGAELSAPTPHDHVTVLGKSHFNPGQYNAEEQQLFAAYHKLFKLSSKPAAHLDALGNLTDTELLASLPPSLNRLADRVKAKLEESPE

SEQ ID NO: 62489 - protein, 552 aa, Pseudomonas putida KT2440
MISHDQWAPSLGVRLEKNAWSVVRELDRSILLTAGPGAGKTEVLAQRADYLLRTNSCRFPKRILAVSFKTDASRNLKERIQLRCGWNFASRFDSVTFHGFAKRIIDKFLPILAEEGLSPDYAIGAETIPGKQITFKQLLPLAIKIIQRSEVARNAIRKTYAHVFLDEFQDCTADQYELIKLLFLGTGIHLTAVGDRKQMIMGWAGALEGIFKTYATDFDALPLHLYANFRSKSNLLRVQNEIIREIDPSAVTPAELISGDEGEVLAVHFQHSSQEATVLADSIFHWIEAGVPPREIAVLMPRQVDDYGSALMAELGNRGIASRNDSDLQDLLKEPAARLVIDYLTCLYGKGQSDAWARLMDLFTPYEEASRDHLHRLFETTYRAHVRQVKVASKTPSPYEDWWKLTSSFIRDVGYPILTALSGDYESKLRLHEVVREVRDRVGALLSSEKTIPGALARLSDDQAVRFLTIHKSKGLEFHTVIILGVETQAFWGKLAEERCVYFVGVSRAKERLLITTAEYRPKPKNAGRWTEHRTPHGEFVSQVTRHLTGRL

SEQ ID NO: 62490 - protein, 661 aa, Pseudomonas syringae pv. tomato str. DC3000
MLIESAVLSGFRCFAPRPISVTISPKITTIVGPNAAGKTALLHALAKLFGVTRAQRTVRRSDFHLGPDDDPTSLESKHLYIEVLIALPELIDGTATPETIAPSFRHMLIERPDDAPVCRLRLDAQWEDDGTVEGEVSQTLHWVDTLDDAPPEDKCHPVSVADRGLIQLYYTPASRDAAAQTRATAGALAARLLRAIEWSSDTEEAVHDATENLASAFEEEAAIAAITEALQTRWSALHDDVVDTNPRLSLVSRRFEEVVNKIAVMFEQGPDGQERGIEALSDGQQSLFYFALAAAVFDLEREVVAGSIEGFRSDALRIPALTIFALEEPENHLSPYFLARIIRQVRSLTTDGSAQAIVTSHSPAVLSRVNPTEVRYCRCDPKTRVSTVKRIKLPVNDVEASKFVRGAMLAYPELYFARFVLLVEGDSERIVLPRLAEALNLLIDPAFVAIVPLGGRHVQHFWRLLKHLGIPHATLLDLDLGRDGGGFGRVKTAIEKLIEFGAPKAEVLRITTGILSDADLANMHNWPDSVDHSGLLSWINNNLKAHGVYFSSPLDLDLAMLEAFPAAYAAIVPERGGSRMAADKAAEVVLGTAGPGLKAYTGPFVGYPPQFPSYRYHFLTNSKPATHLAALTHITKAQLVAHMPVVLASVLKHISASLRRD

SEQ ID NO: 62491 - protein, 634 aa, Pseudomonas syringae pv. tomato str. DC3000
MTLSSRRVSSENWKPVGVKSLEKHAFEVVCSHVNRSVIAGPGAGKTELLAQRAAYLLQTGAAPAPRRILAISFKRDAASNLASRVRKRCHPDHAGRLDSMTFDAFAKSLVDRFGQSLPERWRPRPDYEITSYYERDYKDFLFQDVGLPPTTIGTRADLRAVGPKIFERNYVLGQPLPIDGWLCPTVGQWAADLFWRASLHGGEKSVLSFPMIGRLAELLLRVNSMARDALRLTYSHLFMDEFQDTTQVQYDLVSTIFRGTDTVLTAVGDNKQQIMRWAMAMDDPFSEFDADFSAKRTSLYNNYRSSPDLVRIQHILAQALDIAAVEPISQTAGTINEESCTVFDFPSPHAEAHNLAVSVASNIASGKLTPRDFVLLVRQKAGEYAEVLEPAFTAQGLSLRNEAGLVGAIMLQELLVEEVSVLLVSLLRLSMTLRAGRYWSECQKWMASLRGVEFDDEIGHSKLTRELDACAIWLGANRSSLPTTLKAARSLVDEVMGFVGLGHLKSRHPAYAQGEWLEKVLDAAATHLFNCAIKCADWPSALDTYEGVNAIPLMTIHKSKGLEYHTVIFVGLDDGAWWSFSNDEIEATAGFFVAFTRAKQRVIFTYCAKRGGRTKIATLYHLLQTAGVQITQIS

SEQ ID NO: 62492 - protein, 578 aa, Lactobacillus johnsonii NCC 533
MLIYRVNIKGFRNYEDVDVYLNSSSLIIGSNNVGKTNFIYALRLLFDRNLSENDLDLLDSDFNAYSHSDKVEITAYLKDINEECLLSEFKGNINEGKLILKYTKEKNQDYILQAGFSEDTMQELKSRSYLRRLSMQYVDTNRNLYKYLRKERQNLLLNSQELLSEEQKNDDKTKTIEIQKNLNSINEKISSLNYIKNALENVNKELSSLSVENEDQNIQFVAGHNDAEKMLSDVALSYSSEEGPLTLGGDGRNNQIYLATWRARQELKAGPDHVTFYAIEEPEAHLHPHQQRKLAQYLTKSLKGQVIVTSHSPQIAEIFKAENIVRLYFHNKYTEAASGPNDAQIKNSFNAFNYRLNTLSAEVFFSYGVFLVEGVSEVIFYKALAKENGIDLDRLNISILAVEGIGFKPYINICNALSIPWVLRTDNDIFKNREEKYYAGIKRAVGIIKECKLDYKKPSECDKACEKWHCDTIPNDIKNNNEAMRKSLKNIGIYMAKVDLENDIANSNLSEALYAHYCIFDKDLKSLVSKMQKSKAKNMFDFVEEMHSKLQMLNDDELIEPIDSIVTKVKSQVQYNGK

SEQ ID NO: 62493 - protein, 531 aa, Lactobacillus johnsonii NCC 533
MESSDEQKEIIKDKNNLVIIARPGSGKTYTIVEKIQLILEDLYNYQGIIAISFTNKASEELRKRCIDKGLALNKSFFGTIDKFCFSEIIVPFCSHLSGRNQELKIKSLEENTRLRNLDKKNCKHVGKIIEEYLKQDTVFLEFLVETALYILKRVPDATKYLRARYREIFIDEYQDCGLNENKMFLYLVKQGITGMAVGDIHQAIYAFSGKKSVYLENLIKNPNFHYYKLSENFRCHPSIYQYALSLYGNSEEAAEDDKRVFRVKIDGNEKNIAQKIEENIPNIKRRYNLKSTSGFAILCRNNSTVDILNKSLTIPHKVYTKTKLDDDQSDVAHLFVQLIRGYFDENIYAFDITEQYFSERNKNNKYRSLLNATQKLFACPINKLAENITLFSHIAQIIYPDIGIEDMSEALSRLKDVLNDKHDYENYIPPKEDEISVMTIHKSKGLEFNVIFQMDMYDYIFPKESWQQGGSAESWKQDLNLHYVAITRAKVACYLMEGSQRYNRKGIQKSAKPSPFYDLPGLKKRRLDMKW

SEQ ID NO: 62494 - protein, 679 aa, Lactobacillus salivarius UCC118
MYLNEVKVKNYRSLKDVKLVLDKEKGTPNLSLIIGKNNSGKTSFLKIMKKMIAEDRKLSWDDFNIQYRREIHNILVSKEEGNEEDIEGIILDLYMEYDDNDDLNNILPLMLDLNMENNIVVLEFKCQPIIHKIEELRNLVNDTELKEYRKFSDFMQENLNKYFETNVYARGYDYESHELTDAIEKLDSSIVKKIINITGISAKRDTSNNEKDRTLSQIAAKYYENFSDEEDKIRSLREEVSKTDGILNKEYNKLFKDVIDDFRNFGNFPNGEEDVNIHSKMDVSKLLKGNTVFSYQYDKEDLPENYNGLGYMNLLGIIFEVKACFQKFRQDSNRSKINILYIEEPEAHTHPQLQYVFIKNIGKLIENEKDNLNVQTIITTHSSHIVSQCKFEDTNFFIKEKDNAQIKSYADLENLYKNEKEVFEFVKKYITLSRAEIFFADKLILIEGDTERILLPTMMERVDNNKNNGKDVPPLLSQNISVLVIGNHAHVLSKLISFLNLKTLVITDIDAKGIKGGKIKNPAEGKITTNGSLKKFFKGKSFKDLRNLGKDKKILSIEVKTEDRGKENVEYKEDPNGNLRIAYQIKEKNSKEESYQATSFEDSFIHLNLEFVQKLADEHGRNAGLKLVKKLKETKFTPYELSSNCIDSKTNFAIGILMYGNNRWQIPKYIEEGLEWIRK

SEQ ID NO: 62495 - protein, 563 aa, Lactobacillus salivarius UCC118
MDTKIEPEVQRAIECIRSKTNFIMEGGAGSGKTRSLSEVIGEIGQRYPDRRILCITYTNNAVNEIINRVNVKNIVVSTIHKFLWNLIKQFQDEIKWALNELIKEELINKNIPENFDARKLEKITYDDYVSWNRGVISHNEVLSIAKKLFDTKPKLSKIVEGIYSYIFIDEYQDTDKNVVEMFLKNLNNEKVVIGFFGDSMQAIYDRGIGDLNDYNLDRIEKKKNWRNPNAVIKVGNNLRIDKMQQESGKTNNIEGKALFFYGKSEELLKQHPRYQELKLSDDDFKRLQLTKKSIASAVGFPNLYELYNIDMVINLIKDVKEKNENVEDKTLKEVVKIYCKKRDSWKFKKESYKRFEHKNFKELINQKINRDSLLSFDGNLSNSNPNRDEILKYLDRIYEIITLYEDGKIGEFLTKSKMKIGSISDKNKISESMRKLLDGVNDDNICIGSVVELAKEELEIKTGDNFDKFIKEEGQYLWERIKEIPFKEYKKSIEYLEKKTPYATQHSVKGSEYDNVFVMLESSWQKYSFDGMMLEDGEEPSKRALKLFYVCCTRAQKNWLYNI

SEQ ID NO: 62496 - protein, 656 aa, Ralstonia eutropha H16
MHIESVTIAGFRCFGPNPTAIPFSQGLTAIVGPNASGKTAVLQALMRLFGVTRAQRTIVPSDFHVTPTETERLKSRTLTIDVRLSLPELVDGSATAATVAPVFRHVRIERPGGTPLCRLRLRARWDDDGTAEGAVSQDLNWINTADDVVRDDQASPVAPGDRGLIQLFYTPASRDAGTQIRATTGALAARLLRAIEWSAGTQATVHAATEQLLNAFGSENAIQAISESLSKRWEKLHDGDIDCNPELSLMSRRFEEVVARIGVMFKRGPAGEDRGLDALSDGQQSLFYFALAAAVFDVERAAVAGRIQGFRTEELNVPALTLFAVEEPENHLAPYYLSRILQQIRTLVETGAGQAIVSSHSPSVLGRVPPDDVRYCRRNQATGVSTVLPIPMPTSDVEAIKFVRNAFLAFPELYFARFVLLVEGDSERIVLPRLAEALNLLVDPSFVAIVPLGGRHVNHFWRLLHGLGIPYATLLDLDLGRDGGGYGRLKNALQQMLALGVPREKILELSDGTHLSDKRLAEMETFDAANLEGWLSYLERSSSVFFSWPLDLDLAMLAAFPAAYAATIDGAGPRMTNESAAEVVLGTAGPGLISYTGNAQMFRDHMAAYRYHFLTHSKPATHLRALTHIDLPALKAGMPAPLQRVLLHISAQVSRL

SEQ ID NO: 62497 - protein, 633 aa, Ralstonia eutropha H16
MSLPPRRVPPGDWQPVGVHSLEPNALTVVRSAEHRSVLAGPGAGKTELLAQRAAFLLQTGASPAPQRILAISFKRDAARNLARRVRQRCHPDHASRFDSLTFDAFAKSLVDRFGQALPNRWRPTADYGILFPKRAHWADFLQRASLALDNPFGQAAVQGLSVNYFERRHVLAERLPEAGWTSGNAGLWAGQRFWDEQLRGATRSHLTFPMLSRLAELLVRVNASVRNALALTYSHVFMDEFQDTTEAQFDLVQTIFLGMPTILTAVGDNKQQIMRFALAMDDPFGAFEQTFGAQRIPLLSNYRSSPELVRIQHVLAQALDTSAAHPQSKAAASISDACCAIWDFSSVNTEAQALARYVASQMREHQLQPNDFVLLVRQKAEDYARVLAPAFATAGIPLRNEAAYVGAQMLQELLTEPLSELVLLILRLACAPRGGLTWIEAQHALANLRGIAPTDDRARRVLAQDLDAFARRFIQQHPQPPETEAMARAVIQEVEAFLGRDALIAAHTPYGQGGWLAEVENSLALHLQSSAVQATDWAATLDAYEGTKALPLMTLHKSKGLEYHTVIFIGLDDSAWWSFVQDTVDATAGFFVAFTRAKQRVIFTYTPQRGARVNIAPLYGLLATAGVQTITVA

SEQ ID NO: 62498 - protein, 608 aa, Mesorhizobium loti MAFF303099
MHISKITIRNFRSFAHLDVRIAENTTCIIGENNTGKTNLLQALRLCLDVNLASSYRSLLPSDIHSAVDLSHPSQVVIAIEIDQWAGKVNEEALVGGWQVAPDRARLIYRFRPKLKVRDDLADETIEPGDLTIDDYQWEITGGGDPRHDVATVDWDQDIGVGIRFSDLQSFLVVHLPALRDVESDLRQTRSSPLTRLIAASEIDHAEKDALVQALRDANQTIAESPTIEALAEAIDASFTKVSGPAFDMGVGLGLAEPSFQAIVKALRILLTNAAVTDFDPAQNGLGLNNILYVSIWIEYFNKRLAQEKSAGQIILFEEPEAHLHPQLQLALFGALKALPFQSILTTHSTHITSQADLSSFVVLTNVGVAGTASGVPAENKDLEQNDIADLERFLDATKSNMLFARKVILVEGPAELFLIPPLVKEVMEIDLDREGIAVIPIYGVHFDVYAKLFTEGSLPKRCAIVADGDLKPSDAIEEDGDDELPDPPDLDALENDYVKVFRCPTTFERAITISGTLEMFAKAADEIGAPRVATRLRRGVRALEQEGLTADQRRELLDPLRAAVLSTAKRFGKARFAQLASSYVSDATALPPYIKNAVKWLRDDEADE

SEQ ID NO: 62499 - protein, 589 aa, Mesorhizobium loti MAFF303099
MKLTSEQKLAVDCPDDLMLTACPGSGKTRVIISKLSRAVDAIRGTPRVAGCITYTNTAVHEIETRLRQHSQVGDEENYDVCTIHSFCLNHIFRPFCHRIEGYENGFEVITPDSEQFNEYASAASADFNRYNLTFREFEEFSLLQISEAGEPFGSVLDTGTIRREEALRFWQRLRNDGRADFSLILYHSLSLMRDHPEIVEFVASRFSHILIDEFQDTTELQIAILGLIAERGRTNFFMVGDPNQSIFGFAGARPDLADIFADEVGARTDLVLTGNFRSSEPIIEHAERIIARNPPMTAVGPARLFTEVPEYENGATAFAVITETFLPRLQGLGIPIGNAAILAPSWFTLFPLGRRLREFGVSIVGPGARPYRRNRLFAPLAEQICGHLMNPTAESIIGIERSLFNLFLDATGKRRYDVFTYEGRVLVFRLVAEASRLQEIHMGAMDWLTQAATVFSGILIELSFFGTAHRDLLSDSVTEMEADMRNTRVDVANLTVDELGVYSNGDAALKLSSLHNSKGREYDAVAMIDLHQGKIPNYRANTPEAIAEARRLFYVGITRARHYLLYSTDRADRRNIPTQFLRADGVRMV

SEQ ID NO: 62500 - protein, 729 aa, Staphylococcus aureus subsp. aureus Mu50
MFISTLQIRNFRNYESEIFRFDNETNTIIGENDSGKTNALTALRILLDDSYYYSSKTLKESDFFHGIQNGWQGHWIIISATFEGISEEEFDNEICASISLNSESQTILEELISNADKGVGSISLFIRPNKAIRKQLFDISTELDSHQFNEFRNSIRLSDYEFYYTSKSNLNFCINENYDKLVGRLNDNIASNPEEDDEALLGSRIDMSDIFKHISVVYVDALRDVLREMKNNRNPVKRIMETIESKISSDNVESLKTIIQQLNETITSVPEIRKIGENINRQLNSIIGSVYSPNLLLSSTMSDDMGSLAKFLSMKPEQNIDLDLLGLGHLNMIYLALKIVEFEACRSRELLNIMLIEEPEAHIHHHIQKTLFEGLNLQKNYTQILMTTHSVHLAEVSEISRMNVLKSFNGKSIVMNPANNLNSFAKEKLKKNNLNLINAVERYLDVKRNGLLFSKGVILVEGDAEEILIPQIVKKLFGINLDELGIGLINVGSTSFEYIASLFDDDRIQRKCAIVTDLDEQAIPSEHRLYKSTAQEKGQARKEKLSSLFNENNWVNCFYANTTFEIEFLDVNKENILTYVSPIIDDAFKDKKTITAYKEEIQSEQYLERNLAMLKLANHVGKGWFAIELGEKIDFLIKIPKYILNAIAFACQEIVDLSIYKKILLHTIDLYEETTELSALSASLKTSDTADLNIAIISLLEYFGKDEDVVYLINQIENYTKILYAEVSK

SEQ ID NO: 62501 - protein, 597 aa, Staphylococcus aureus subsp. aureus Mu50
MTNIFEKIVNDLNLEQKDVVESEDNLYVNACPGSGKTRVLTRKIAYQAIKHDGSLKRIIAITYTNRAAEEIKERLSLLSIDDDINIWVGTIHQFCLEFIIYPFKMNLSRVSKGFTIIDDYTQRAYVSQINNMLNLNLKTYELNKIDLSLSHDFKINEVQYTQVSEMYHTMLEKNKEIDFDMILLVAYKILTVNSNVARNIASNIRAIYVDEFQDTRELQYNVIAKLLQNNPQIQSMFVGDIDQAIYGSLDGIAKSVEELEMLTSHTFQSKTLHGCYRSNQRLVDFYSNFQSCPYEIESRGNNKNDRGFISYDCKVTKEDLPNIIKNIIKEKIESGIHEKDICVLAPQHYPLFSLGEYLKKELPYCNFDAINISPIKVNNHSLFFKLAILYFTESGEKVRRRKLIANDILIILKNEFGIEVKDYFIDLDLLQLINSVKRMYSGDDNGVDLYKFVTKHIFVNLNIDEKNYPSIFKHYLFFINEVEDRIKNNSLSSSVSSFKKMFKSRDGITLTTAHKVKGNEYDTVIAINLLNGKIPHWNEIFNVSDKGISSARKLLYVICSRAKNNLFLFSEVGYFTSKGDLLYPTQLLDKIEFDYNI

SEQ ID NO: 62502 - protein, 329 aa, Klebsiella pneumoniae subsp. pneumoniae NTUH-K2044
MKDYGRNELCQVIISSHSSSILSRIEPEQIRHFRLDQISKSTVVSALTLPEKEDELSKFIKEAVKSYPEIYFSKLVIFGEGDSEEIIIPKVLELYSTEIDSHSISVVPLGGRHVNHFWRLLKSLQIPFITLLDFDIDRNGGGFGRLRYAIEQLSIFCGGKYGKTKEKIPAWDDERDPTTFKLPRTDGDSYNVVAALENHNIYFSSPLDIDYAMIEAFPDIFCEKDVVYGERGPKNIEQEEQEEQKKELINAVLKKGNSGVRYEFSVDYLKYFLWYRYRFLSNKSKPASHVRMFSKIEEKYTPDEIREKLPPVLIRVADKTVSLLAEVIE

SEQ ID NO: 62503 - protein, 557 aa, Klebsiella pneumoniae subsp. pneumoniae NTUH-K2044
MTSQWLPSEGIEPTQELMDIIFCDQSVSVLAGAGAGKTELLAQKSNYLLQTGKCMWPKRILCLSYKKEAQENIKTRVMKRCGQRGERFDSYTFDAFCKSIVDRFKDVLPENKRPLNNYDLVFNQKANNGKDKISFDLIRSLALDILTIRTDIVDLFSLTYSHVFIDEFQDTRSDQYEMIKLLFKDKGTQLLAVGDINQSIMLWAGAKKTVFEDCEKEFNTTKKLLVHNFRASEEIQEVLRCFIHFVQNDANFTPIIKSIDNCTIHYYDNELSEADDIADKIARFITSGIEEKEICVLVKQQSEQYTEKLRDKLTTKGIRNLDLSELQDVLKEPLGQIFAALFKVYTSRSSSSYTELCDLYLELHRVSRGDEKEDALIKVLSDNIAENKKNLGDEPSPDSLITCIKDIITLFGVKRMVGRWNQYKSADYWDKIWRNLEQHLRYTIDATHSLNEAALMFQAENSVQVMNVHKCKGLEYKVVIFLGLEDQAFWAYKNAKFENDCALYVALSRAKESIIITSTKCREHRITNWRDDRTSTYKNIGPIYSFLTKHCKFREVR

SEQ ID NO: 62504 - protein, 708 aa, Desulfitobacterium hafniense Y51
MCVELRENRKSLLMKKSTFIATIIVDTYANRLEEGRYRMYISRLKIQNYRCFQDVEIEFSEGLNVIIGENNCGKTTILKALQCFFKGSNTGSAMGIDDFNKGITIGEKPPEITFVLTIQSSKHEKAQDKAVVASWLTKLVSPWEATLTYKFFLPEADQKRYVADIRCIQDDDDRNSKKWAVLERHLKKYTPRIYGGNYESKNRADQEYLDKFHCEVLDALRDVESKMFTGRNALLKQVLNFFVDSDLIEKEETERETLQVQRNQTFESTSSSLVANMIERVSVSKIFELTEKTGAAVGGQPTLGGQLDESDVLSVLKLMIKKETGIEVPIVNNGMGYNNLIYISLLLSKFKMLVSSEMGENAKVFPMLLIEEPEAHLHPALQYSFLRFLKDEMDKQEISRQIFITTHSTHITAAVGLDPIICMNINALGNVVPAYPGKVFSDTADDQASKKYIARYLDATKSTMLFSKAVLFGEGLAEQILLPILAEYDGRSLDRSHVSMVRVDALTFKHFIKIFGSGIQEDRKKYAVSRRVACIIDSDPSRILHEAPAGKQRRWKKCYPFELDVEPELFEYKGVSGAVTNLLASLQGCDNVKVYYNSTGKGKTFEYDLAFENSESGLIFDGAFEITDVDGLDTSTWEAEEKEKAKKAASYLSYVEEGKGEPAFNLAEKLKENIKAQPRLVFNLPPHIKDALKWVCYDTEEEEVCDAQ

SEQ ID NO: 62505 - protein, 594 aa, Desulfitobacterium hafniense Y51
MHNEEIEIITSDHLLSDVDHPFKVFAGPGAGKTFWLINNIKNILKNSTRLFSASKISCITYTNVAVEEIQTRLDMTGDRVEVSTIHSFLYNCLVKPYVNLLKYEDGSYLVNIEQLDGHDDHIPSVGRILGNKQMSATVLKNRIDHKELQGVLSSLDWYLNGDDLILQPRNDWQRKKYKKLVTAGFFNAYKAMFWDDGTIHHEDVLFFSHEILKNHPLIREFIAAKYPYILIDEFQDTHPVQTKILKWISEAGAIIGVIGDPAQSIFKFQGASRADFLEFKLPGQKNYAIKYNRRSTRNIVNILNHIRGTDEVVQECYREIDGSEVCIIVNKSVEGIIEKFNSERARLGMTGDSCIVTRRNDSVVKLKNCAGNCNMSIWSDFSEADSKRQRFIEVILSAQEYADNSMHETAVKQVMKVFKTDKEGALKDPFTACSFEIDNLSKRSMAVSLLEYLTSNRDENMTKNVLAFYNDLIGFFNGIGVALKRVGAGGFKTFAQAANVNELVLSLKLGEEKYSNIRTIHKSKGAEFQSILVYFEDNKDIQHLLNPDAKHEEDDCRLYYVALSRAEDYLCIATDELSQEIIDALAKLNLKMIG

SEQ ID NO: 62506 - protein, 729 aa, Staphylococcus aureus subsp. aureus Mu3; identical to SEQ ID NO: 62500

SEQ ID NO: 62507 - protein, 597 aa, Staphylococcus aureus subsp. aureus Mu3; identical to SEQ ID NO: 62501

SEQ ID NO: 62508 - protein, 696 aa, Lactobacillus rhamnosus GG
MFLKTVKLYDFRKFVSQVNGEPGLIVKFHPGLNIIVGENDSGKTAVIDAIKVLLGTVSDDRTSIQDEDFYFDGTEFSNDFKIEAVFCSLNKYEAGTFLEWLSFDDNNEYELHVKLTVERKTSEAGRQYLDRNLVAGDEGAESSLASGARVYLRVTYLKALRNATDELTPGFRSHLPQLLAAHSEFRNHPEHKLKLVQALEEANAIIEGYLSDGFPSESNPPKDNDHLSDNNLEKQSINKELHSVLRQLFDSQDQDKSDTRFQLTQVTLDQIFKQLSLSSESVNLGLGNLNLLYISTELALLKDHSSSVVYGPNIMLIEELEAHLHVQAQIRLIKYIERYILSTEDNSSQQFILTSHSVALTASIDQRSLIYMNANKAYSMAPEDTMLEEADYDFLNRFLDATKSNLFFAKGIILVEGYAENILLPALADLINLPLHRSGISIVNVGGTSFNQYIKLFSQKEKSEKIGIPISIITDSDINPTVYGIDSESAEKIQELISGPSDLNVDLFGEEYATFAELVAAFKLRFENTKIKNLIIQVKKFRSDSDWASKTAERQECLNQKYEEFSSNSKVFMSPLWTLEYSLLRSSLRHLTIQAIAETQFVRENHREKLIKKFEEDYKTSPNKAAYNAYAALNKGSVSKTQVSEQLAKLIMGLSQDEKEELKNKIIGDTTHSQNEECKYLINAIKFASGQEVEQD

SEQ ID NO: 62509 - protein, 595 aa, Lactobacillus rhamnosus GG
MNLMQIESILLHGAHFTAEQREVIQAIGRIDVVAGPGSGKTTVLAAKVLRLLTTRNYEDKGICCITHTNVAVKEILARLKLAGVDEIEYPNFVGTIQSFMDKFLGKTAFATVLPGVTLKLLDDEKFYEKYDKNFRRIVKDYRSDWNVPKPSKNGCKLVILDDGSFYYTNRHQNQRCQYAINRACEWLLRDGYVSYSDLKSLSYWYLSKHRDELSVAFEKRFSYLMIDEAQDTDWIQFAIINGLANGKQLNVQRFGDPYQALYTIYGSETEDSWNPRPDNEFYQTKEISETTRFGSLIAAVVKHVCVQEYEQFHSNQELNFFPKYFMTYETGDELKEKHTRLIEDAASSNPNFRILQKPDAIVGIMHSDIIKVEPKYSKEGSEQRAHERSVSEIYALVIKLLANANGVSFMEESVLIRNNHDSNLELADVIQKLAKQNISLNEVQYHLYSLIGSETISEAYLQRECKHLLQDVSNLEGEPERMNLSTVHREFATIHGVKGETHRSTLLLLTSCVHMKFNEEDKINKFFKTIFPYLLGDRPDFSSDPEIEQLQRDCLKLAYVALSRPKYLLAVAIPSQDLADEKKTSLLTHGWVEAK

SEQ ID NO: 62510 - protein, 748 aa, Colwellia psychrerythraea 34H
MKISFIDIQNFRKLQSCRINLSDKETLLVGANNSGKTSATDVLITFLDQKVKRPFSVTDFTLSNWKPLNEYAMSWTKDIDSIQGTSIEEWQKLCPSIDIWLDASINEVEKVAHLIPTLKWSGEPLGVRLVLQPKNLDELKAHFVSEYTAANNIKSISPKGTLSLWPRDIKDYLSKGKLNTQFEVKAYILDPEKSNSPQKLRKEQSSMEFYPFDGIFKVDVIEAQRGFSDPNSSEIKQSNGGLSGQLNQYYNRHLNPTDLPDVADLEALETIDNAKELFDIRLNKSFKEALGEIKTLGYPGFNDPDIKLSSRINPIDSLDHDAAIIFDTQKRGFTGLDNFSLPEKYNGLGYKNLIFIVFKLISFRDQWLRKGKAQKRRNADDIAIEPIHLVLIEEPEAHLHAQVQQVFIRKAYDVLRLDVSNKLTTQMIVSSHSSYIAHEAGFEKLRYFKRKPALGLDQVATAEVVDLSTVFKSNSNKTDDVTVTAKFVARYLKTIHCDLFFANGIIMVEGAAERMLIPHFIRTHYNDSLNQNYISILEVGGAHAQRLRPLIDALSLPTLVITDTDATKSKDSNEKIRPEKGKNYGFGSDTLKEWFDLKSKTLDEVVELDEKHKVQGMARAAYQCGIAVNYGEGAKVAEVIPYTFEDALVLSNIELFKSLSNSTGMVKKMHLALGKPTLDECCDQLYTELKGIKAQMALDLLFDVEPKELCIPEYIKEGFEWLEKELKNNALDFIEAKVNTAVEDKAVG

SEQ ID NO: 62511 - protein, 622 aa, Colwellia psychrerythraea 34H
MRNPNIELVGVDKEIYSYLNLYNPKSFLLFAGAGSGKTRTLVNVLQEIKNNNLQTLIENGQKVAVITYTNAASNEIQHRLEYDPIFTVSTIHSFIWELIKPFTSDIKDFIKVKLRSDIDVLTTKISKARDKNGKTALANARSLKSKQKRLDGLAEVESFTYSPTSNKTSKGTLNHSEVIIIGSIFIADQKLMQSVLINRYPILLIDESQDTNKVLLEAFISVQENNKNKFSLGLFGDMMQRIYSGGKNDLTTSLPPDWETPAKIINYRCPKRVITLINNIRKGDDQNVQVPKEDAIDGFVRLFIVDSNTTDKLELENKIRFQMAMLTHDEDWNIAEEVKTLTLEHDMAASRGGFDEFLLPLSSVSSLRDAALNGTSKNINFITSTLLPFIDAVEKDDSFEVARIIKSGSLLISDSNQSFLLNPIGTLKDIDSNVVEFKKILVNGKVTLHNVLSTIQKFELLSLPDELLVYLSDIEQGEPNEPESDTKLLSDVDKAWGLALNSSIGHVKNYAKYVNETLGYATHQGVKGLEYKRVMAVLDDKFKGFLFDYEKLFGAKDLTKKDIENEDLGKDSALSRTRRLFYVICSRAEQSLAVVAYSNDPIAIEKTAIESEWFSKDEIVLI

SEQ ID NO: 62512 - protein, 784 aa, Burkholderia thailandensis E264
MHIEFVEIANFRKLLSARVDLSLKTTLFVGANNSGKTSAMLALRRFLTPRRCPFDIHDFTLCHLPALVDIGETWLQANLEGVATDLTLDPWVQALPALDLWLQVKEDEVHRVRDLVPLMDWTGGRLGVRLRYEPKDMKALFKEFITAVTEANAMRAAAAAAVAAKAAGAAPSPKLTVWPETLVDFLSKRLTSMFTIRAYPLDPALLANPEKLRALPQSLPASALPIEGDPLSGLIKVHDIPAQRGFGEIQNGGEDEGELQTSAGGTRLSEQLRSYYAKHLDPAKGPDPTDLEALQAMEAAEDAFDLKLMESFNECFTEVAGLGYPGVSDPRPRVSTRLRAIDGLNHSAAVNFEVDVVPDAGAVTPILLLPEGSNGLGYQNLISMIFRLMSFRDAWMRVGKASKSSEAASIEPLHLVLVEEPEAHLHAQVQQVFIKKAYEVLRRRPELGESDALRTQLIVSTHSSHVAHETPFASLRYFRRLPAGMVAKVPVSTVVNLSQVFGEGTETERFVTRYLRAQHADLFFADAAILVEGPAERMLIPNFIRAHYKVLHQSYVTLLEIGGSHAHRLRPLIDHLGLLTLIVTDLDSLTATGGSSVQPALGAGQKTNNATLKTWVPALDDVDALVSATQAAKTITDAGDTLFAVRAAYQTPVEVTMPGSTAKETAYPYTFEDALVFENVTFFAAFAGPGLNAKFRAAIAKGGGATAVGASMYTALKDGKKAEFALDVLMADDFNKLNVPQYIAEGLEWLLKQMEKKQVEILTTAPATAVSVATAASPGPGAKP

SEQ ID NO: 62513 - protein, 639 aa, Burkholderia thailandensis E264
MTVADDQFDAEADATIIACLDLSKPRSFFLYAGAGSGKTRSLVSAVRKTIDGEHGRQLTLTGKKVGVITYTNAACDEIKQRLEFDSRVEVMTIHAFSWSLIEGFNADIRQWVAKNLEEEIAELEEQHKKGRPNTKAGVERLRSMESKRRRLARLDSVVKFIYSPTSDNRTRDSLNHSEVIAMTAAFLTSKPGLRRMLVSRCPVLLIDESQDTNKALMDAFLHLEEEFHGRFSLGLFGDLMQRIYSDGKERLDKAIPARWAMPRKRMNHRCPSRVVEVINSIRRDVDGEEQVPRSDAEKGVVRVFIAPQAGADPFAIEAAVRQRMATIAGDPAWQNSDTVKTLALEHLMSARRFGFAEFFEPLWAIDNLRTSLLQGAGAGLGFFIRDVLPLVNALRANDRFAATAIVKASSPLLDRAALQEAGSNQVAQLGKAKAACDGLLALITEQPEINAQAVLEFVAQTGLFSIPDTLAPFVSGDAKAVAAEDNAGQGDQMERTEDGEAEDTSPELSAWSKALEAPLSQIERYDLYARGQSQFATHQGVKGLEFPRVLVVINDDEARGFLFAYDKFFGTKEKSKADLENEAAGRETGSDRTRRLFYVTCSRAEKSLAIVYYSPDPALARSAILQYGWFVQDEVELIN

SEQ ID NO: 62514 - protein, 645 aa, Dechloromonas aromatica RCB
MKLTQLRINNFQSFGPTSTIIDLSAMSFLLGPNGTGKTAVLQALSRLFGFDPALRRVRRSDFHVTPADLAKSDIGPLTLWIEAQFEFPELKKSKGKHATIPGHFAHMQLESVDGVPRVRFRLNAELDDDGDIEETLHYVIQVDTDGEPVKMVAVQKHDRNAIQVHYLPARRDPSDHISYAANSLLGRALRAADWQAERDEIAGLTQNISEALAENVAVGGIGAQLSAHWSTLHKGSYYTKPSVSFERNEIDNLLRHLTVGFTPGHGEQIVDFSRLSDGQQSLLYVSLVLSIQAIGREVLDGKLDAFDVDKLRPAVFTLVAMEEPENSLSPHYLGRVIKALTTFSEHHDAQAVVATHAPSLLKRVAPENIRYLRLNGDRQTVVKSIIMPDAADEAHKFVREAVQAFPELYFSRLVVLGEGDSEEIVLPRMLRAKGLADDDTSISVAPLGGRHVNHFWRLLDGLDIPYVTLLDLDLGRYQGGWGRVRYAAKQILALGKPIKGLSKTTIEALPEWNGTDQVMTSESGKQWLSWLETQSIFFSSPLDLDFAMLRRYSAAYKLAAAELAAPETSTLTAVLGKKHHGVEQYNAEHQKHFAAYHQRFKLGSKPAAHLAAMAELSDKDLVDHMPPRIARLIDAVEARLKGLPE

SEQ ID NO: 62515 - protein, 553 aa, Dechloromonas aromatica RCB
MIKADRWQPSDGLKLEPNALAAARESQRSLALTAGPGAGKTEMLAQRADFLLRTGICRYPQRILAISFKVDASRNLKDRVRRRCGFELAARLDSHTFHAFAKRLIDRFRPVLTGRNALDPDYSIGSPRVQGRQIDFEDMVPLAVQILQSSEVARNAVRQTYSHVFLDEFQDCTDPQYQLIRIAFLGTGIPLTAVGDTKQRIMGWAGALEGVFQAFAEDFQALPLNLYQNFRSQPRLRRMQNAMVKIMDPKAAVPDSELAGKGGSVDVLAFADSQTEAEALADLIQAWIADEGMPPSEIAVLVSKLPDLYADRLMAELASRHLPFRNEQNLQDLSVEPAARLIVDFLSVVAGEREPDAYGRLMDVLLATGVDEDTAYELRARWNRHIDGARNQVREEGPVAHNAAALLKLADSFLALLGREALAALSADYERGNRLDEVIAQTLNRITDLLALDTDTAGALSRFSEDSAVRIMTIHKSKGLEFDSVIMLGIEEQTFFGKRADERSAFFVGISRAKRRLYLTVANHRERPEGYRRRWDEARSPLVEFLEYATNTT

SEQ ID NO: 62516 - protein, 715 aa, Escherichia coli UTI89
MEALGHFLVDASRFSVNDLTLCNWAKIKDITEQWLTEENIDLDKSQEALSDLFPFMDIWIEAKENELQYVNHILPTLEWNGGLIGVRLRYEPKKFDVFFEDFISSRQNSLDIHDRISERIDKENYTIALWPKDIYEYLSRKLNSLFTIKCYSLDPSKLELSDNGIAKPQRIDSKQTLLDGIPLKDLIRIDEINAQRGFGSPSAADKENSKLNTQLRDYYSKHLNPIESPELSDIEALQAIRDAQDTFDERLKNCFSQAIKEVEGLNYPGVTDPKLKISTKIEPIDGLNHDSAVQYELTNALSNVSLDYLRLPESYNGLGYQNLISIAFRLMGFRDSWMKVGKATNKKLADDNQEDFPAPLHLVLIEEPEAHLHAQVQQIFIRKAYDILRNHNNLGDKEELHTQLIISTHSSHIAHECKFSSLRYFRRIPACKEHEIPVSTVINLSNVFGVNDDTEKFVIRYLKATHCDLFFADAVILVEGPAERILVPHLIRRHYPFLNQSYITLLEIGGSHAHRLKNLIVSLNLLTLIITDLDPKDSQDGKVKPSKKGSGFVTSNTTLASWVPEVTGVDELYKLTEDKKEKKYNEFFYVYSAFQIPVLAEFKGVNQEFLPNTFEDSLVYNNLDFFSNLTGNGLVKKFKASITNCKNAEEFGEESFSHLSKGNKAEFALDILYHDESDKLNTPNYISNGLKWLEEKIKIKQLELVSDLASDGETK

SEQ ID NO: 62517 - protein, 612 aa, Escherichia coli UTI89
MTIKQTEEILDSNIYNYLTGTQKHSFLLYAGAGSGKTRTLVNVLEMILKSHSEEFRLRGKRIAVITYTNAACDEIKRRVKFNKLIDVSTIHSFLWELIRYHSSDIKSWLMENISAEIADLRDKQSRTTRVSQASLERERKIVSKEKRLQNLSDVYKFTYNPTGDNRTKDSLNHSEVIKLGSYFLDKKYTMQKILVNRHPILLIDESQDTNKLLMNALLEVEKNNRDTFSVGLLGDMMQRIYSDGKSDLEACLDEHWKKPEKSINYRSPKRVVALINLIRSQVDNHKQKAKEDAEEGYVRIFIKECHSDNKDRDESFVKQRMREITLDDDWENHDSLVNTLILEHHMAATRMGFIDMFTPLYQIERLKTGLLEGSLGNINFICGIVSPLISACIKNDTFTITNILRTNAPLLKREHLLKNTNNTSPLTQIRSSLDMLKSFISKNPELITINLLHKINEIKLLDVPDSIQEILESNDNSQDDIIEAWQKSFSSPLCQFDKYYNYVKGKTNIDTHQGVKGLEFPRVLVLIDDSEAKGFMFSYDKLFGIKEKTKTDLDNEKEGKDTSEDRTRRLFYVTCSRAQKSLAILAYTDNTEMLRKNLLHKGWFDSSEIEII

SEQ ID NO: 62518 - protein, 615 aa, Anaeromyxobacter dehalogenans 2CP-C
MYLSSLQLTRFRSFRDGTVYFDETLTVLAGENNSGKTNVLEALRLLTPPSDGRVVRWPEPRDITRGFESFSIRGTYSALDDRQRGSFLTCLRGPTSDSASLGLQYAEVPGKRRGERSRVVGPLDAPEIEPKARELVRHVHLPALRDASRELASSAPGRIEHLLRRTATDEQREALVAKARQALELLKADPVIGAAEAQVQEGVRALTAGVHPHEAHLGFADPTLTDLARDLRLRLGLAGMPAADLYESGLGYANVLFLALVVVELANTADADLTLFLVEEPEAHLHPQLQAVMLEYLRDKAEESQRRARSPGEYAGRIQVIVSTHSPHLTSAVGSKKVVILRTQAGPDVSPEVAPAGAAGRGGEAASASSFSAAVSLAQIRLREDEREKIDRYLDVTRSAMLFSRRVLLVEGISEALLIPAFGKVLYRGKSTELARLTASTIVPISGVDFEPYVRLLLTPDPGSGKRVADLVVVLTDEDPASETAKQEIDLEGAGGVQRRRALKEVSESLEAADRLSVQLSPITFEAALLGNPPSVQMEQVLRDSFLALRPRSALLWDRDVASSPPGHRGACLVRRLKDSGIGKGDYAQEIARRITPQVPVPSSVEAVLSALVTL

SEQ ID NO: 62519 - protein, 591 aa, Anaeromyxobacter dehalogenans 2CP-C
MTFAALTAEQEAVVLSDKTVFVTACPGAGKTRVIVEAFLREGGRAQAAHGVLVLSFSRCAADEIRKRCVREGRASAFEYPHFVDTFDAFVSRFLVAPFRNRWCPGRPVTYLDSWDRLGVKVHLRLKNAPPPIPLSAFELKDVDAVALQPRNVEYAFRKAAAQHLDALNAEANALRGKLLARGYMTCADGRALALSRVREARGQPVLKAIAARFPVAIVDEVQDCNSADLEILERLMAAGVRTLAVGDPNQDIYRFRGADGRRAARLFVSASQLSLTGNHRSTENICRFASSVKLAAGSDTAVGRYGAEVSPVVVLGYEPPLDAGLGDAFVVRLRALRISAEDGAVLAYQEADALAAVGRTKDAGASRVAKLASAIEVFRSAAPRPADLLAATEHAESLLLAKHGLKCSSALPKEVAQRNGIDSVALRTEALRILCSLAKESIGIGDASWLERARCALDRADMLLPTGTTCASGQVLKKAGKEWRVPEAPCEFRGTATTVHAAKGREYPGVMVVLPPGKRTKQLLDEWETRQDSEGRAVLYVAATRAQRLLVLAAPNEYASRVYSLASRDGAHCVLDPIARQGVEEAVLVEA

SEQ ID NO: 62520 - protein, 636 aa, Syntrophus aciditrophicus SB
MQISRLIIKNFRGIQNASIILSKHSVLIGDNNTGKTTILEAIDLALGPDRLNRVPPVDVHDFYQGKYISDASADEVPTSTKAEQGVKAEGAVDAVANNADVQVDGDVTAEAPQIEIEVTVADLTEEQKGRFGDYTEFWDTATDTFYDQPNPAGVDAVSISEALRVSFIGWYDPEEDDFKGKTYFTRSLSEGDNPVVFSKKDKQICGFLYLRSLRTGSRALSLERGSLLDIILRLKEVRPQMWEYTISKLDSYSVASDPELGISGVLESINAALQKYVPKEWGIEPHLKVSNLTREHLRKVITAFIATGEGRHAAPFYRQGTGTINMLVLAMLSQIAEDKQNVIFAMEEPETAIPPYAQKRIVHEIRTLASQTIFTSHSPYVLEEFTLEETVVLARDAQGALRRSAITLPDSVKLKRYRQEFRTRFCEGLLTRRILVAEGATEAASFPVVCRRLAELKPATYSSLEALGICTIDAGGETNISDLAKLYRDLGKRTLAICDKQTDEEKALIEAQVDTLFMHDEKGFEDLVLKNTTEDALKRFTKLIVWPQHLQQKYPDPEAQAQAALSDYFCGKKADWGVSDFLAQCTEDEIPEWLRDTCLSLKAICEPVHVGDADGGALNAPEAPDSEQGVDVDATN

SEQ ID NO: 62521 - protein, 606 aa, Syntrophus aciditrophicus SB
MQLTEKQTKIMDAEGHVLVTGGPGSGKTTISILKAAQIAGCGLRPDQKILFLSFARATVSRVVEAIEYEQQIPHEQKKRIDVETYHSFFWRILKAHGYLVGLPRQLSILTPPSEAIELSTIRSGYAPASKLNNAEKAEKRAREDAERLRLARIEGCVCFDLFAQYTGDILQGSKRIRKLIATMYPVIILDEFQDTNVEQWRVVQALGEHSILLALADPEQRIYDWIGADPKRLSHFKDAFAPTEVDLSTDNHRSAGIDIVAFGNDILTGKFREEPYRGVQIDVYTPNFNQAFSALVTTTYKARKRLINSGREDCSLAILVPTKKMTRLVSDSFRSPLAGMTKIPHAAAIETEAAILGAEIIAFLMQPDMDGSHFKHFIDLLRNYFHGKGGDNPTKADLKEAENIQKAYNDWRSRQAAGKDINKRSILIAIIAVYGTTRKIVLTGDPDKDWRAVRNILEEGACPRLKRVAEEVRNIRLLERGTQLRQELSQDWRDKGAYDNALRITQQAFVREHFSTNANPESGVVVMNMHKAKGKQFDEVIIFEGWPIKRKGQPPYNADRIVRYNSRKHDSDQSRQNLRVSITRGKFHATILTPKGDPCILLIGEG

SEQ ID NO: 62522 - protein, 605 aa, Janthinobacterium sp. Marseille
MHLAELNITNFRKLRDAKLRFQAGLNVLVGANNVGKSAVVDALRALLAGQEEPYPRLDVADRHRPAEGEPEGDIDFHYVFRGLDRDDEADFLAALKAGGDGQMEIHIHVRYFDADKTGRFRVKRWCGDHEDVPLLSDMMENLRGVYLQPLRDASQSLRPSRNSQLSRLLHLLTDDAGRDGINAALQKLDEELKQHAPMISTQSAIATRHGDMLGEQLKQALTVGLSASDFQRLSSRLSLSVDQFEIEQNGLGFNNLIFMAVVLSELAKNTDATYRGLIVEEPEAHLHPQLQAVLLRYLASLQAVAGEKPVQLFVTSHSPNFASNANLDCLACLVESEGHVETFFPRDVTFEKGKREKLERYLDVTRAEIFFARRVIFVEGAAELMLIDALATLAGYDLRGHGVSLISVEGLNFDSFLPLFGENALKIPVALITDADPQRELEEGENDDDNDDDDAEDVAIEEDGVQPKRKRAKAVYPALGEEIKVSANTAKMKALEDRYVKVFHGVKTLEYDLALHANAREAMLTALADPHPKIAKSLRKIVDAENDNTDKARVLFRGMFERSQNNVQKGRFGQALAQVISEGVVCDVPAYIKSAVEHVCKEEPH

SEQ ID NO: 62523 - protein, 573 aa, Janthinobacterium sp. Marseille
MDLSAEQQAIINAPLAPLAVIACAGSGKTATAVRRLVEMRRLLADSRARVALLSFSNVAVDTFRQSYQTLAQTLPNGAGRSRVDFETLDGFITSHILRPHAYRTMGSQRAAFLVTGTEPFLSGFTCRRDPFPLPITDMKVGFENNELFFYYDFQGNIKRLDQNAASLAVRRLGRTGAYTHDLGRYWAYHTLIDQPLILRALVRRYPHVLVDESQDIGLLHQAILELLMRAGVQVSLIGDPNQSIYEFAGANGMFLRDYHRREEVTAFSLTRNYRSRPSIQAIANHISGRNDEPHRPIDPGTHGVYFIGYSNPELPGLLDAFHAEVANLGMRIENAAILCRSSKLADQLAGVNEPSGRGIVKHFVEAALHRDMHGRFQDAYKAVVRGIVSLLDGPPQGLLASLSHPAHDRSLQDLRRRLWAFSREVETGLPSSELPAMDSWHPLMLARVRTLLQEIHQDFGMVPTDNLGHKLARTGLPAGPLGAGADLAAERGPRIRVGTVHHVKGESIDAVLYVATRPHLQAMLDGVETELGRIGYVAVTRACNLLWLAVPSAALREMRPALLAAGFQEAGDR

SEQ ID NO: 62524 - protein, 613 aa, Burkholderia xenovorans LB400
MRLSRIVIKNFRNFKHFDVRLGEHAVVLGENKVGKTNLLFALRLILDPALPDSSRRLRIDDFWDGLARPLKAEDVIEVSVEFRDFENNENLLAVLADHLVRPDPMVARVTYRYQPVQGLEGAPRSEADYEFILFGGGRIENAIGYELRRWMPMDLFPALRDAESDLARWSRSPLRPLLDRAAKTVDAKALSAIAGEVHATTSKIAALPELSDVVSQVNDQLTVMVGDKHAVKTALGFAPTEPERLLRALQMMIDSGKRGVAEASLGSANVLYLALKHLEHQYLVDEGERQHTFLAIEEPEAHLHPHLQRLIYRNYLQTRDEVQADTEPRSILLTTHSPNVASVAPLANVVVLRHVVDAGHTVGRSLKGVKLNTSDREDLERYIDVTRGELFFSKGVILVEGDAEKFLLPTLAKLNDKALDFDAMGISVCSIAGTNFAPYVQLLGQKGLDIPFVVLTDFDPKNQAVSQEDADPDDNGVGNSYGKNRVVNQIMRHLLDEEVWDKSSYGEVLELAPKHGIFLNEFTFEIDLFKAGAEDYFHTAIGSLTTNKKMHARFKGMSADPDSLDPSQFLKDIDSIGKGRVAQRLAAVLVEESVDVCPTYIKKALKYLKAKLA

SEQ ID NO: 62525 - protein, 520 aa, Burkholderia xenovorans LB400
MRENEDQWCAYQATGNCVILAGPGSGKTKTITIKIARLLAEDVRRPRRVACITYSNACVGELRSRLTRLGVGDSDRLVLSTVHSFCLTELVFPYAKMAGLQMPDPLVVASPAQARALFSDAYRAQLGGNAPAWFRMACDRLRRTILDRGSDEWRAGSARETMVVEAYENLLLQNGLIDFDGLVLAGLQLVEKNEWVRHAIRAKYPVVVIDEYQDLGVPLHRIVLALLQAGVRIIAVGDPDQSIYGFTGAKPDLLTALAGLQQMESVTLKLNYRCADRIIAASRALLPEPAEFRSHDGRSGEIHIHRLECSIREQADYALGTLVPALLEANPSWAPGDIAVLYRTLNEGAPIAEAADALGLQYFRLDNGSPIKRTRVTEWLTDAARWCSGGWQTGEISLSQLLKAWRRMYRSVTHESELLATRKRLISALFSLRDSALPLRRWLLALRRDVLDELLEQEPGLADEKDNLEELTAAAGAGGPLRAFTVEIFGNQGKMPRVKQDESSASIWMRVLALRQRWRA

SEQ ID NO: 62526 - protein, 782 aa, Burkholderia xenovorans LB400
MHLKKLVVRNFRRLRNVVIDLASDISIFVGANNSGKTSVGHALQLFTGGGRFNIHDFSAELWPDIVAFGEDEGEGVGESSLPQIEIDIWLEIGPDDVHRVIDLLPSLAWEGTLVGMRVAYAPRNPAETRARYAEVRQRALDAVAKNEDGAPVFDPSPRNLREFLRDRLHDEYELCHFVLDPARFSANMIPEDGYAPAPLTGRDRSGREILNGLLHIDFLNAQRHLSDGPGGSRAEDLSHVLSRFYGRNLEQKGEDIEALRALAASEVSLNEHLERVFEPTLKSLSKLGYPGLSNPRMMIRSALDPVKIMNGRDGAIVHYALGGDDGNPDPPTLPDHYNGLGFKNLIFMVVELLDLHAQWLAIEGSRPPVHLIFVEEPEAHLHAQLQQAFIRKVMDILALKDEDRTHYTSQVVVTTHSTHILYERGFRPIRYFRRSRLQNVPTSDVLNLSLFYDSTDPDIRSFLERYLKLAHCDLFFADGAVLVEGNVERLLLPQMIANAAPRLQSTYLTVLEIGGAFGFRFKTLIEFLGLTTLIITDLDSVFGPLAQDGEDAAHVQPAHVAPPAENAVAPDADVEDTDDEDEDAPAAAEKPGKACVAGQPGAATSNQTLVQWLPKCATIAALWAASAEQKIQARANDNDALVRVAYQCRTDVTWGGETLALAGRTLEEAFALENLEWCQHKDRKPLQLRIAKAGEKDLVTLAERIHKRVQAKSFSKTDFALALLAEDPGNWTVPAYIAEGLCWLETEIAPLSLDDGEDGEQQEEGGLELANGVVVAGDGVVA

SEQ ID NO: 62527 - protein, 625 aa, Burkholderia xenovorans LB400
MTSRIGSPNTQADLDVRACLDRMPPRSFVMVAGAGSGKTTSLVKAIAHLAETRGPALRRAGQQIACITYTEVAVGEIVADVGVSPLFHISTIHSFLWSIIRPFHIDIATWVATRIEEKIAERREHYDRPRTQERTKARLAQEIADLEAELDAIGGVGKFVYGNGSSYAEGILGHDDILKLAPACVASHPLLRLLVAKRFPYIFVDESQDTNPEVVEALRQIAGDHPDLCVGFFGDPMQKIYMSGAGAVPLNDGWAEVTKPENFRCPTSVLGVINAIRAGGDRLEQVRGRTVTVDGIQQPVAGSSNLFVLPADGERSAHLAAVRRWLAVETGDDLWLSDMREGDVRLLVLVHRMAATRLGFPNLYAALNDRAPMSLSEGLTDGTAWPLRPVAQHILPLVVAARAGDQFTVMSVLRSESPKLEPERLRGQATAPVLRALQQALDGLVALLAEGSQATVRDVLTLVRDSELLRLDDRFGVHLVAEPVDDGSSGFENVQAYLACGVDELWAYRRYFTEESPFATHHGVKGAQFERVLVVIDDDEAGFRQYSYGKYFGYVPLSESDEARIASDEESVLDRTRRLFYVCCSRAVKDLAVVVFAPDVTAARTAIVGKNLFPEAVIRGVEHLD

SEQ ID NO: 62528 - protein, 666 aa, Saccharophagus degradans 2-40
MKVEQISITNFRCFGRETTTFTLQDNSTVFIGSNGSGKTAAIQALSRLFGVTSKQRQVRKTDFHIEHDKDELASGSTLSIDVILSFPGHDEPDGADTIPEFFQQMAVETPGGDLKARIILKAKWIDDGTPLGSVEEDIRWAPRLTNNFDWEKDCTRVQASERSRIQLIYIPAHRNISEQVTNLIKSRFWQAAKWSDEFRNHVEALSKNIQASYANEAPAKLLLEKLSSRWKQVHDADTDTDPRLKLIDSRFERIIQNAGFTFFPNEFGQERDLADLSDGQKSLFHIALTAATLEAELAAIEMNYEDSPFDHDKMRRVCLTLLAIEEPENSLSPFFLSRIIEQALEIGSLDAAQVLISSHSASIISRLEPENVRYFRLDRSNRTSSVQKILLPEDDEEASKFIRLAVKAYPEIYFARCVILGEGASEEIVIPRLAEAMGFPLDPSFVPVVPLGGRYCVHFWKLLSDLKIPFVTLLDLDAGRSHGGAKLVQGTADRLDEMGIDWNSNSVVEDRLLDPDKIDTLEDADIWYDFDDNDWLNVFEAEGVYFSDPLDIDFAMLLSFPEEYKIPNPGGRGPRNTPESIENAKIATLKTDGDSSLYEDQYDDTFRWYPYLFLNNKSKPETHIKALSKLSKERLSRDAPRELKALVSKVINIVMGSENGHQNQPL

SEQ ID NO: 62529 - protein, 614 aa, Saccharophagus degradans 2-40
MVTRINPCEWKPQGVDDLEPNAWEGLRENKQHAAVLAGAGAGKTEFLAQKAAYLLQTGICSDPNRILAISFKNDAARVLKERVNLRCAPEQSRRFESFTYDGFTKFLLDRFRLAIPEPYAPPPDYNIYFPNKGTFQEFLNNQKIRGVNVYQLQKDIANLPLPAGQHNYLALKSYWQCRLTSDEVALSFQMINRLIEYLIRSNPNIKHALRSTYPFVFLDEFQDTTSPQYELLKFIFLESNSLITAVGDDKQQIMGWAGALPEAFNVFNQDFGAKNFDLVSNWRSHPELVSMQHAIAQMITPGLTQPEAKNTKNMKGDVAAIWGYSDRNDEIQGVSNWISEQINSGTKAHELAILVRTHADKLEVEIAPHLLNKGISIRNVARIVDGIAIQDILTEKLTTIILPFLYLGVLERSPENWNRALISLCALEGVDFVDERAHSQQQDRLQYFSRLLRQDLSNGNFHKGRINPTISSILAFLTEDAIRSSISEYKQDRDYNRVLNGIVSLLEECADCSSSWLEALDRFQGVDQVPLMTIHKSKGLEFQTIIFFGLDAKTWWSLTPDNPEELRSFFVAFTRAKQSTFFTSCSQTGNPVTWIEEILTSVGVNKLAGPGCEN

SEQ ID NO: 62530 - protein, 594 aa, Methanococcoides burtonii DSM 6242
MSILIKTVRIAGFRGLENIEVELEQTTILTGMNNTGKTSFLKALQLALGNRQFVSQDDFFIKGDFVSKEIIVDLLIVPINGDGDERDDFSPDWETLFTIERVRNDDAGRSFVPLRTVITFDEVNNNYKTQQFILKFWPELIKKFDVPGSEQKDINWYEVKDIGDSSKSNFHFDEIPFFYMDAQRDILEDIKLRFSNLGKMLSKIKYSDDDINEIESQIKTLNEKAVSSSPILSILKTNLKELDTAMDSHGEGIEITPFTKKIRDLNKGLTIYYNDQNESFPMENHGMGTRSWSSLLALKAFVFLLSNNAMEKGTKFFPILTIEEPEAHLHPNAQKKLYEQIDSIVGQKIISTHSPSITSAARLSQIRNFYKNEKVTCGKIETDKLEPEDIRQINRQVTNTRGEIFFSKVLVFVEGETEEQALPIFAEKYFKKSPVEIGLDFIGVGGHPKYLPFLRFAEALNIPWLILSDAELSTKESVLSQFSKCSSKKSDINCVVFLDDGNDFEKQLIADNFSVEIKSAISSSCNYMNGQHKKAKEKEIEKYDDKKLYTIIMGSKTQYGPVIAEKIIQTDKDLPPKVINLFRKIDAILKRKEI

SEQ ID NO: 62531 - protein, 587 aa, Methanococcoides burtonii DSM 6242
MTPRVELSKKQEEIVFAENGAIYVKASAGSGKTRVLTERVRYLLDKTNKKVLALTFTNKAGEEIKERLSDISEIDNRVFVGTFHSFCQSILENHGNLIGRAQMPHIFEDESDRLELVEQAIMQTPSYAEIYKNKSKQNQIDYRYSVLSFISKVKRELISDSELGQHTTDDNLVLIYHNYREILDNQNAIDFDDLLFLAHNLLVNYPKTAALYRRSFFAICIDEAQDLNNAQYQLLLALVNGEFNNIIMVGDSNQSIYNFNGSSPKYMDEQFVHDFDPVAVIKLNENYRSSKEVLLAAKKIIPDESDISETVKEGIFKIHCLKNEHDEAQWVVDKINELLTAKTHDDIEGEITLEKIAVLARNKYIFNQLENLLTENNLPFYYKMTPGMIRFESDLMKIFDLSLRVRLNPLDDLHKQRLLNYLNIKNSENMNLESMIPLVPDELVQNLILLVTELHDDGSNIKQKLESFRDTLTVNDENEKNMIFNDITEILNHWHNYAKKTDNKSLHQFKNAMALGKTHPLTQHSGITLSTVHTMKGQEFDIVFIIGMDDETFPDYRAVRSGGIELIQEKNNLYVAFTRAKRFLYVT

SEQ ID NO: 62532 - protein, 363 aa, Roseobacter denitrificans OCh 114
MLYISLVLAMREIGDKVLAGELEAFDIDKLRPAIFTLIAVEEPENSLSPHYLGRVIRAISEFANGQNAQTLVATHAPSLLRRVAPETIRYLRLDGDRRTVVARVVLPENEDAAKYVREAVHAFPELYFARFVILGEGDSEEVVLPRMLAARGVLTDDASISVVPLGGRHVNHFWRLLHELGIPHATLLDLDLARFQGGWGRIKYAATQLLKYSDVENAGIDEDEIAAIPAWNSEQGLLIDDDDWFEYFNERGVFFSSPLDLDFMMIEAFAEVYRVEDDECEEPDETTLKAVLGKKHDTVAGQYTDYQLQLFDAYHHRFKLGSKPAWHIRAMAAIDDAEIAADMPAAMTALIDYVETELEGLPE

SEQ ID NO: 62533 - protein, 549 aa, Roseobacter denitrificans OCh 114
MIAVERWSPVDGLTLEPNALAAATEIARNLALTAGPGAGKTEMLAQRADFLLRTGTCRYPRRILAISFKTDASQNLKARVRKRCGPGLAARFDSYTFHAFAKRIIDRFRPVLSGRDALNPDYSIGPRRVQHQSITFADMVPLACKIIEDSLVARNAVRQTYSHVFLDEFQDCTDEQYRLILASFGDTPTILTAVGDTKQSIMGWAGALEGIFHTFADAFDALPRNLYQNFRSAPALRRMQNAMVKVMDPPAALDDADIIGDEGEICILRFEDDDDEASGLAERIRDLIDDGIEPSEIAILVSKQQSLYCRLLVAAFEAEEIPFREEDTKQDLASEPVASLLIDFLLIASGSRQPSAYRRLLDLVVFNHGYDEEREYQLRSRWDRFVNETKQKIAAHKLDLRQMDDLQALAISLVDNVGRDSLISLSPDYEHGDRFDELIAQTLEHAHMLLQSQADSSTALASFSGDSAVRIMSVHKSKGLEFDTVVILGVEKETFWGEPSAEHAAYFVAISRAKQRLLLTTCSQRQRPQGAKRWSIKRHEYDEFLAYVP

SEQ ID NO: 62534 - protein, 615 aa, Chelativorans sp. BNC1
MRVRRLKITNFRGVSQGCIDFSGHTLLVGGNNVGKSTVCEALDLVLGPERLFRRPVVDEHDFHCGRYLTEDGAPVEIRIEAILVDLSEEATRRFGGHLRRWDDQAGTFIDERENGLDQADAPGVVWALPLLFVGRYDRDEDDFVGNTFFDHPTKELDALDEETEIKLGQGRVPFTRVHKRLCGFVFLRTLRTGSRALSLQRGSLLDSVLKLGGSGAVEMWQDTLGRLQALDPAIGEIEQLKQIRAEVRSRMGRFVNLAPGDNSTAFFASDLTREHLREVVRLFIAAQPGQHLVPFGRLGTGSINLLVFALLTFIAELKDKQSVIFAMEEPEIALPPHTQRRVTRFVLAEMGQSIVTSHSPYVIEQFDASQIVILNRDEGGALTGKPIDAQAVKPKTYRTERRQFAEAILSRAVLVVEGSTEASLFPVASSIMEDSLPADSYMHFDLAGVSVFDAGADNAVPRHGPIFSALGKLAFGFYDKPNAAFGQDSLEKLKSYTQVWESPEKGIENVLVKQMPIAVVRRFLNEVKDRSDYPAVGAYDPAAGDADAAALATKVLKARKGEAYGYAAMLIAQCQTAAELPATIREILEAIHKTLSAMPEEIAAPVPGDFEDLPG

SEQ ID NO: 62535 - protein, 569 aa, Chelativorans sp. BNC1
MKLELCDKRKAIIAQTGHLLVLGGPGSGKTTIALFKAQGRFATLKPGQEVLFLSFSRAAIRQVLLRCKEILTPSQRRAVVVQTYHAFCMEMLEAHGRLLHGRSVRFLYPGEERLQKSAFDGDWSVERKRQAAEMGLYCFDLFAAGTADLLEGCAALRGLVADRFPMIIVDEFQDTDDNQWRIVRALAQVTDVFCLADPEQRIFDYRDDIDPRRLDILREAVAIAEFDLGGENHRSPNAGILHFADAVLRNQGPLPVTPDVKQVSYWGNAFSATVHAAVIWTFSALRRKGVEKPSVAVLSRSNSLISDLSVILSEPHTYNNQLLSVIEHDVVWDAELSAAAAIVVASILEWPTGLAAESLARTLLAIAGFYKLKNAEEQTNTAAENARKYDEAAAKVAKGEEPRIKAAKALVAAHAAGVALIGEPVADWKVARRLLQDIPALSELFREVRLVRLFRATDALASGLSERWLASGSYRGASDLVKRILEQERLIAAERDSQFGCILMNMHKAKGKEFDGVVLVEGAFKSGFFDERTEQPPFERSRRLLRVGLTRARTLVTIVRPQNARPLVD

SEQ ID NO: 62536 - protein, 690 aa, Granulibacter bethesdensis CGDNIH1
MRIKGVEIENFRLLRDVAVGLEERTTLIVGRNNSGKTSIAELFRRLLGEKAPSFRMEDFSLGCHECFWTAFEAFRTEASEPDVVALLPSIKVTIDITYDVNAPDLGPLSDCIVDLDPNCSDTRLILTYGPRPAAPTTLFADLTVGEDVAVNRATLFRALGSRISGAYTASLEAVDPNDATNRKALEPKTLTALVRGGFINAQRGLDDDTHRERDVLGKVVEVLFQSALTDPVDPAKRTTAEQLKAAVEQIQGDLHAGFNAKLTSLLPTFDLFGYPGLSDPGLVTETSFDVDKLLNDHTKVRYVGVNGMTLPETYNGLGVRNLVYMLLQLLRFFREYQAEPTAAGVHLIFIEEPEAHLHPQMQEVFIRQLDQITSAFVAQLNENKPWPVQFVVTTHSPHMANEARFEAMRYFLSIPDGEGMRRSVVKDLRRGMGGAPEPDREFLHQYLTLTRCDLFFADKAVLIEGTAERILLPAMIRKTDSAAAGQPKLGSQYLSVMEVGGAYAHRFFDLLSFLELRTLIITDIDAVKPNDGGKRVAVPVAEGLFTSNGCLKAAFGNDVSPQTLLGKTAAEKITGIRRIAFQIPEAPGGPCGRSFEDSFILANPARFPLDDDDKALAAYELASDQKKSAFALGHAIEHTDWNVPKYIAEGLRWLAEGNPAPAEPNPPIAVEIVAGAAGVAVNVTGVSADG

SEQ ID NO: 62537 - protein, 588 aa, Granulibacter bethesdensis CGDNIH1
MAEEVENPADAAGRVALERMFACLDNGHSFRLEAGAGAGKTYSLDKALRRLIDRRGAELLRRGQQVGCITYTNVAKDEIISRIQAHPAVRTETIHGFCWSVLQDFQSTLRALVPALESWAERLEPVGGIGTRRVHYELGYPSVGDHQVTLRHEDVLALMIQALAYPKFRAVLTARYPILLIDEYQDTDADFVNAIKARFLDAGQGPQLGLFGDHWQKIYGEGCGLVEHASLDVIDKNANFRSTDPIVQVLNRMRPALPQMVRDPTLPGEARVFHTNLWPGVRRTGQGGGHWTGDTSPEAAKAYFAHIKHRLAAEGWDLAVGKTKILMLSHSVLAREQGYSSIPPIYGQFNDPWLKKDDPHIKFLADQLEPACAAFTAKRYGEMFECFGTGTPKIRKHADKVAWTDAMTTLIALRTSGTIGEVVDFIAAQPHMRLPGQVEDAEKRLADVGPDAVEGESRRVTQLRKLRAVPYVELIALDRFIDGYTPFATKHGVKGAEFENVLVIVGRGWNKYNFGQMLEWIEPGPPADKTDFFENNRNLFYVACSRPKVRLALLFTQVLSANAMARLTAWFGADNIVALPADPGGVPA

SEQ ID NO: 62538 - protein, 695 aa, Streptococcus suis 05ZYH33
MKLTKVIINNFRSFGDSQVIGFNDQTVLIGNNSSGKTTVLQALSKLFSDKQNDRIIRKSDFHLPKGLRPGENSRTLFIETIFEFDELDGTAYSPAIPSFFEHFTVSQGDAKTFLRIRLESSWEDDGTVEGSIDTQIYYISSAEDIIKDEDKHRAPRKDLDKIRVLYVPASRTPEKELGNASGSMLSRLVNSINWTDDEIKEITNKIDELNNTFLSESGALTQINQEIQKSWKLYHEDNRFSQAELTINSSEMAGALRQIALKFSPTTTEEAFTVSDLGDGLRSIFYFSLVDSILDIELEITKDREENPDNPRFKLIPPILTILAIEEPENHIAPHHIGKLIKRFKQLGNNDNSQVILTSHSPAIVKRIDPEDLRYLRIENNDSVLQTIVSDIQLPQSIDESYKYIKGAIQAYPELYFAKLVVLGEGDSEELLLPKFFDLLGKEIDSSQISIVPLGGRHVNYFWKLLNSLKIPYITLLDFDNERYGGGWGRIKYAIQQLLEIGIERSDLVTMEDGRILNDEDIARISSNQISDIFLKPLSSWINHLEKFNVFFSAPLDIDFLMLQYYKDYYLGTLSTNEGPVVSYTDENNDKKKIRLTKMDRTNDYQLIGFKNRISEAIQATLKDKSGPGDSFTDEEKELMIWYQYFFLGRGKPTTHMQFLSSISDDELKRNLPPVFEKIVRRAEELLGDIDYGEE

SEQ ID NO: 62539 - protein, 514 aa, Streptococcus suis 05ZYH33
MRKNYLEILTMVKSDDWFPKGVIKLEDAALEVVKDVTNSLVIAGPGAGKTELLAQKLDYLFSTNKCISPKKILALSFKTDAAANLKDRVKKRYGDEYASRFTSLTYSAFEKRILDQFRDVLPEDIRPSRDYLIEDWDTIKELLSMNGINVNGWRMSDIRNFVENIILNDGNTHKLKKDLLKGTQDNKPVLLYRQITKLSTQIIATNEYIRKALQMTYDFVFLDEFQDTTYAQYNLLKTCFLGSSCKLTAVGDNKQAIMRWAGAKPDIFPDYIRDFNSNEYQLLMNHRSVPKLVKFQKEVHQILNSNHSSIQPNNYPEFQEGEITLFEFENESLEAELIANDIESKIQGGIRPSEICILAKQKVDDYSSKLITTLNSKGIKARIENEYQELLKDPTCNLLLDLISCSQGKRDPLIWENISNFYGNINGIDEFTDELILAKSYKEIDNIVSDITYLISNFIPNEESMLNLIDCIIEKIDEKRIISNFSTYNGKSDLDIIVKNFSMLLYKEYSQTQG

SEQ ID NO: 62540 - protein, 556 aa, Streptococcus suis 98HAH33
MKLTKVIINNFRSFGDSQVIGFNDQTVLIGNNSSGKTTVLQALSKLFSDKQNDRIIRKSDFHLPKGLRPGENSRTLFIETIFEFDELDGTAYSPAIPSFFEHFTVSQGDAKTFLRIRLESSWEDDGTVEGSIDTQIYYISSAEDIIKDEDKHRAPRKDLDKIRVLYVPASRTPEKELGNASGSMLSRLVNSINWTDDEIKEITNKIDELNNTFLSESGALTQINQEIQKSWKLYHEDNRFSQAELTINSSEMAGALRQIALKFSPTTTEEAFTVSDLGDGLRSIFYFSLVDSILDIELEITKDREENPDNPRFKLIPPILTILAIEEPENHIAPHHIGKLIKRFKQLGNNDNSQVILTSHSPAIVKRIDPEDLRYLRIENNDSVLQTIVSDIQLPQSIDESYKYIKGAIQAYPELYFAKLVVLGEGDSEELLLPKFFDLLGKEIDSSQISIVPLGGRHVNYFWKLLNSLKIPYITLLDFDNERYGGGWGRIKYAIQQLLEIGIERSDLVTMEDGRILNDEDIARISSNQISDIFLKPLSSLDKPFRKIQCFLFCTT

SEQ ID NO: 62541 - protein, 610 aa, Streptococcus suis 98HAH33
MEILTMVKSDDWFPKGVIKLEDAALEVVKDVTNSLVIAGPGAGKTELLAQKLDYLFSTNKCISPKKILALSFKTDAAANLKDRVKKRYGDEYASRFTSLTYSAFEKRILDQFRDVLPEDIRPSRDYLIEDWDTIKELLSMNGINVNGWRMSDIRNFVENIILNDGNTHKLKKDLLKGTQDNKPVLLYRQITKLSTQIIATNEYIRKALQMTYDFVFLDEFQDTTYAQYNLLKTCFLGSSCKLTAVGDNKQAIMRWAGAKPDIFPDYIRDFNSNEYQLLMNHRSVPKLVKFQKEVHQILNSNHSSIQPNNYPEFQEGEITLFEFENESLEAELIANDIESKIQGGIRPSEICILAKQKVDDYSSKLITTLNSKGIKARIENEYQELLKDPTCNLLLDLISCSQGKRDPLIWENISNFYGNINGIDEFTDELILAKSYKEIDNIVSDITYLISNFIPNEESMLNLIDCIIEKIDEKRIISNFSTYNGKSDLDIIVKNFSMLLYKEYSQTQGEWLDIVSSFKGENSISIMTIHKSKGLEYEAVYFLGLEDSAFWNFNNQPEEDKSAFFVALSRAKSHLIFTYCKLRNNRAQNNRNINEIYSLLTQSKLVKVGN

SEQ ID NO: 62542 - protein, 807 aa, Pseudomonas aeruginosa UCBPP-PA14
MKLQAYRLQNYRRLRDVVIELDDEISIFVGANNSGKTSAVQGLYSMLRGEVKKFELFDFSAALWAEIDAVGRTPPGDEDAPKRLPSILLDLWFRVGEDDLATAMSLLPSTEWDGKCVGIRVAFEPRDAHELVWKFHELHEKANNAAVALAAKRKAAGEQAVEAGAEDAAAVVADAGEYKPWPESLTKYLTKELSKEYTFRYYVLDERAFVGYQAREADYEPLPLGKEPGGAAILKSLVRVDFLRAQRHLDDPDAGSSDRAESLSRRLSRFYHRNLEKRGDDHAALKALDTSEKELNFHLKEVFNDTLTRLAKLGYPGVNNPEIVIRAALDPTTVLGQDAKVHYVIPGVASAQLPDSYNGLGFKNLVYMVVELLDLHEQWKAEDDKRAPLHLVFIEEPEAHLHAQIQQVFIRNVLRLLEDANDHATLFHTQLVITTHSPHILYERGFSPIRYFRRVNDQLGHHTDVRNLSLFKTGASDAPAREFLQRYLKLTHCDLFFSDAVILVEGNVERLLLPAMIELVAKRLRSSALTILEVGGAFAHRFQELIAFVGLTTLVITDLDSVTVKTDAEKAAAQGAGAEGAVDGDDEDEDDDLKPFELEDDDEAEPSGKKKSKKRGSTCHAHVEGAVTSNQTLISWIPKKRSMAELWEVTAEQKTLSLAEDSSAGVRVAYQTKVSVTVGATTSQLCGRTLEEAFGLENADWCQAEANRSVGLKLKRAPSSPEELAEKLHDRVVGKNFDKTRFALEVLASGPLNGWKVPAYIAEGLAWLEAKVAHELEADAAIATEVATIEPTTADVVAIIVDPGQTA

SEQ ID NO: 62543 - protein, 643 aa, Pseudomonas aeruginosa UCBPP-PA14
MSRRIDSPDTDADREIHACIVATPPQPFVVRAGAGSGKTTSLIKALDWVISEHGASMRARKQKVACITYTDLATNEILADVNDDPLVHVSTIHSFYWSIAKTFQADIKVWLQNDIRRRISELEEEFENYSSRVRQTTRDRNKADQERYVRSLEAVAGVRTFNYGVGSDYAKGILGHEDILQLADFLLQNRPLFRRVVALSYPFVFIDESQDTFPGVVKSFKEVEAQMQGKFCLGFFGDPMQSIFMRGAGDIQLEDHWRAITKPENFRCAKQILDVANAVRAQGDGMEQVRGLHERVDGNLKLVEGSARMFVLPNTLNRTEALARVRAWSSATNNDEGWTTPDIAVKILVIVHRMAANRLGFGGIYSALNDKTSDAMKQGMQDGTGWPVRPFLSFALPIVAAVKAGNEFAAMSLLREFSPRLAPAALTGRRAADVLRELHAAASRLVAMLDEAGTTIGDIALHLCDTGLFEFDERYARVLGFVRDIADTAQEPEAADAVPAEGLSLDATMAKFFNCSAQELWPYERYVSEGSPYATQHGVKGAQFERVMVVMDEEESDYRTYNYERVFASAEARAADRARALDGDENTWSRTLRLLYVCCTRAQRGLVLAFFVADPATTLENVVASGILPRSAVFTQEVLVGWP

SEQ ID NO: 62544 - protein, 703 aa, Pelobacter propionicus DSM 2379
MHISCLSIRNFRNFKSAQLHFRKGINTIIGENGSGKTNLFFSLRILIDNTLPRYFKFYQTDFNRVLDSWAGHWIIISITFDGLDTSEEAQALAIQSSGHMETATQGSYSVYFRPKYQFRKELYEYSQVEGKDSAGLKLLLDKLAIEDYETVYLCRSTADFSIDDIYKKYVGDFDKIEFPDPDDKEELIFGTWLPKEINIHNELSCTFIKALRDVESDLRSYSSNPLISLLRGKEKTVEITKQHEIIESIDQLNEQISSLDEVMEVKNGIDKSIKETVGTTYAPNIDIKSELPNEMEKLFQSLKLWIGDPDEDGHKGRISELSLGGANIIYLSLKLLEYEKVKTDRIANFLLVEEPEAHVHTHIQKTLFNNLKENKTQVIVSTHSTHISSVSNISQVNILSRGDKEAQIFYPSKGLDKDEIIRIERYLDAVRSNLLFAKGVVLVEGDAEQILIPEMFKKVFGLSLDEIGVSLINIGSTGFENVARIFHPDRVRKNCSILTDDDTSIVTLPADPKTDTEYQAHCRASEKSGKERKLRLTDFCKGNTYIKPIYAKYTFEVDFLMNSNSYEFANCLDSIYKQGAAIDKAKEKLENKSVEIAGVEVLRIAGKHGKGWLALLVAEQLVYNTFIPKYILEAIAFAAAHINISSKAKAVLHRIKHIQEHDGNSLQEKAKDFDVKDKSHEEIVSAFIADFKNDQLTTFLAFL

SEQ ID NO: 62545 - protein, 591 aa, Pelobacter propionicus DSM 2379
MILAKLNHEQKLAVKQEGHVLLTACPGSGKTRVLIHKLAYNLSKLPENSKKRIAAVTFTVRASEEIFRRLNGIGINSNNIWSGTLHSFCFEWIIKPYSCYLPELSNGFAIADEAFCAELVSSLKDKYKLKQIDPVNFRINRDGSYVENKSIQQKLIAEYHSILISNKLIDFELILYYSYKLLVTYPNIQITLSNIFELICVDEYQDTQDLLYAIISVIIKAGNGKTSLFFVGDTDQAIYASLGGVAKSLQEIKAEIDNMPITHLTLTGNYRSSQRIIDFYSNFQTQKYQIHAVGKNAKEEGLITFNSDIHHSNIVDEIAKLIQLSLDTGIPENEICVLVPQWWLITIVTKKLRASLPGVSFDASGLAPMSKNRENIWYKLSRLLLTEPNPKIYSSRYRWATDLIDSFRVDTNTEFNELYKNERDLLRLINSIKSSEMEGIDYLNDCFDQFLQIIGIDQLKYPQLVEHRNLFFDNIDKRLNDDTFKVPSDIQSFKSFYREMTGVIINTCVGVKGEEFDTVISYGLLNGYVPHWNDIFSGRASDAAKKLLYVICSRAKKNLHLISEIGRTTKSGSDLGITPELKCIKFEYDVV

SEQ ID NO: 62546 - protein, 772 aa, Shewanella sp. W3-18-1
MYLESLTIKNYRKFSSTDNTICFVKPKPIDKRTEEEQPKPVISPSTTLIIGKNNAGKTTVVNALTMLCQNKQPSTSDFNLSYLNELFNKYIRKFEADESTKFEHLETPNLEFTLIIKIDFNDQDLMTHLAPFISISEIDNGEAISIRIMVKISLAEESTFKEEVRNIFKATDSNGNKLSDNQRRDKFYALLSKATSVIKNEGNLYKVDFIDCIGNVAEKFSINHLISVKEIKANRHLKENVLSTVFSKIVEFQFNNDASSRSNLEASVQDINQVISNNVGSKSTEISKVLGEVESRNKVDMDLSGNVTYSTLIKGLIKYNFMDGDDYIPEDQFGLGYINLLNIIGEIIHFVDSYEDKSHLSHINLLFIEEPEAFMHPQMQEFFIKRIDNAVMKALEIANKSSKLAKTLQCQIVITTHSSHIVNSKIHSSNTFNNLNYLTTINKCTKAINLTDNTIVPFDNIDSTKDLNFIKKHIKYKVSELFFSDAIIFVEGITEETLLNYFLEKHPILSNYYISVFNINGAHGKLYLPLAEKLSVPSLIVTDLDIKREECEKGIKHKNNKSCSICGQRPKDGDNPYIEGTEPKYVQITNLKGRTTTNSTIKELNFRLNGISEKADFLDGIKFIEGTNFYVVFQKDPIEEQYATSLEEALILTNYQNDMINEVIRQCKPEIYADIINDGGNESRKNILNNSYKLQNKLSDSKSEFSNKLLFSLLSSENSDLSPNLPKYLNDGLDWLATKLQTNDSALSMPINANAEVLSGIIEDLEAIDHDA

SEQ ID NO: 62547 - protein, 711 aa, Shewanella sp. W3-18-1
MTHNEIAELEVQKAINNSIDNFKSFRFNAGAGAGKTYALIETLRYVTTNKIVTTKSPQKVACITYTNVAVNEIKSRLGNSDIVQVSTIHERLWDIIKNAQPELLICHKEKIISVLDQHNNELNNINNKNTKTFAKLTTEEKLEFISLAIKTKDLFYKSEKLNATAFRDYYKKNIEENKYKLLDIHLKNIENFKKIVKIIYKIEKLEACLERISTGIENRVNYDSKVNLDRLHYMKFSHDTLLEYGLKLINTYPTLCRIIIDTYPYIFIDEYQDTHCNVISFFKTINEYANKKNKKWMVGYFGDTAQNIYNDGVGRKIEELHSGLINIQKIFNRRSHQQIIDIANKIRADNIVQKPIFEKRNEGSVKFYYHDSENKQTIAQQFLSEYQTDLFNVDSETEVINTESKKIHCLVLTNKLMASFNGFGDVYDIYQNSSIYFENLNTQVLSQQLEKLHPTILTIYYLISLYQDLQKRTVSYFDIFGSSSKNLTFAKASLIIQELETDKLTSLGDWIDLITDRLKNSTAKETLSKILINRVHYEQDKVTSSDIFRDTLMSRINSLMSDDSEEDDKAKEKILSILNLPIKSLVNWVNFIDGIEADDISYHTYHGTKGEEYNNVAIILEHSFGNKNRDKFKDYFLVLQQSTEETQFLFTDPVEEEKHINTQNLLYVACSRAIKNLRVLYLDDISEIQEGIKSIFGELQAWPVVENRKPA

SEQ ID NO: 62548 - protein, 712 aa, Acidovorax citrulli AAC00-1
MHISKLSLVNYRNFANTKLLFQKGINTIIGENGSGKTNLFRAIRLLLDDNMIRSAYRLESTDFHRGLGRWQGHWIIISLEFEEISADEAVQALFRHGTGGIDDEAIGKATYNLIFRPKKEIRLRLSQLDDGDHAGLAAILNPVTLDDYETIFTGRSDADFNDEAFYKEVVGDFEKARFNEEIEFPAIGAKIPSVLSVSKEISFTFVQALRDVVSEFHNNRTNPLLSLLKGKSGDIDPVAFQLITDGVKALNDSIEALPDVQVVRSDISDTIKDAAGEAYSPSSLSIKSDLPDEADKLFQSLKLFVGESGEGHEGPIHELSLGGANLIFLTLKLLEFKYQKAKQSIANFLLIEEPEAHIHTHIQKTLFDRLQYDDTQIIYSTHSTHISEVSNVQNVNILGRERDRCEAYQPSTGLGPEEIGNIQRYLDAVRSNLLFAKSVILVEGDAEEILIPILVKKVLGISLDELGISLINIRSTGFQNVAVLFHDDRIRKRCSIVTDLDKSIIDTTPAAGDPEGVLRRKKKYRASQESGIARKALLDESFKDNPWVSPFFAPHTFEVDFVAAGNANKVVGILPDIYKDAPTIAIAKAELESPDIALYGQRVLTMAGNHGKGWFAILLGKKIDPQTAIPSYILDAIAFAHPVVTKEVWFNVLSYRVNYIDAEDLFTASAVFDGFRAKLQAFRKGDIDFVGIRNEMLATFPDDRINDVLKVF

SEQ ID NO: 62549 - protein, 599 aa, Acidovorax citrulli AAC00-1
MFTWDKEDLNPEQEAAILEPGSVFLIACPGSGKTRTLTYKIAYELSRLKSNKQFVVAITYTHRAADEIHERIEGLGVDTSRLWIGTIHSFCLEWILKPYGIYHEALERGYRVIDQHEREKILEALCKPYQKPKITFWDCEFYFTETGYVLSCPQAWKHTGLHAILGKYFEKLQESRQIDFELILYYAYQLIASRPAISVLLGQLFSFVLIDEYQDTKRIQYSIVTAILKAGQGATKAFIVGDPNQAIYQSLGGYPIAFEDFKTMAGIDLKKLELSKNYRSSERIIDYFGNYNVHDTCIEAASDEKSYPSLVSFDATVNKTGLEAELIRLIRFNIETVGIAPHEVCVLAPQWTHLASMTRRLCASMPEYSFDGPGMVPFARDTENFWYRLSKIALTQASPGMYVRRLRWAGEILTDLEAAGASVSKLTRKSLLRECNAIKIDETDGLTYLSTFFERLFSSLAIDFRLFTTLREHHTAFFDSSQARVARLKSEGSEFIGDIGTFRKVFQSRTGITISTIHGVKGAEFDVVIAYALLEDMVPHFNDPNGQESAMKLLYVIGSRARKNLHLISERGRIRQYSGDEYQVTRKLAACSFGYDQVP

SEQ ID NO: 62550 - protein, 641 aa, Acidovorax citrulli AAC00-1
MQVARIEIHNFRGIREATLDLVQHAVLLGDNNTGKTTVLEAMDLVLGPDRLNRTPPVDEHDFFLGRYLPESSVGAEEDKADEEVVDHPGDIQQVAEGQVPEQGIPVAGEQTEGAGAPAGEPEVPAPQIRIGVTIANLSEEQQGRFGDYIEFWDSKEKKLYQDPAPEGVDAATVSPALRVTFIGQYDPEEDDFEGKTFYTVTLSDGAPVPFTKKDKQVCGLLYLRSVRTGSRTLSLERGSLLDIILRLKEVRPQMWEDAIGRISAISVAEDPSLGISGVLESINTALKKYVPKEWGIEPHLKVSNLTREHLRKVITAFIATGDGTHAAPFYRQGTGTINMLVLAMLSQIAEDKQNVIFAMEEPETAIPPYAQKRIIHEVRKLASQTLFTSHSPYVLEEFSLPETIILSRDGSGSLKQSGVTLPDSVKLKRYRQEFRTRFCEGLLARRILIAEGATEASAFPAACRRLAELNPAVYASLESLGVCVVDAGGEGSIPDMAKMYRSIGKRTFALCDLQSPEAQALIKAQVEHMFMHGEKGIENLVLKNTSKAALDRFSDLLDWPQDLLEKFKDPKADVVNALMAYFAKKKGDMGIAEFIAQCDEAEVPQWIREACVHLKALCQPTAAAPAVATVVAALAADPGAA

SEQ ID NO: 62551 - protein, 603 aa, Acidovorax citrulli AAC00-1
MKLTDKQKDVLETSGHLLVTGGPGSGKTTISILKAAEVAVAARPGQEILFLSFARATISRVMEAIENEHDIPRHIRARITVETYHSFFWRILKTHGYLLGLPRKLSILTPANEAIALSTIRREYKPASKLTDEERSQKKGRESKERLRLATEDGRVCFDLFASLVARLLSRSERLRKLVATRYPFIILDEFQDTNSDQWAVVQQLGRTSTLLALADPEQRIYDWIGADPERLNQFLGVFKAQEIPLAGDNHRSSGTDILLFANEVLTGKFSRKAGGYTGIELKGYPANENEAAVALITTTYAARKRLVALKKADWSLAVLVPTKKMTRNVSDLFRQPPSKLTAISHTAAVELDAAILAAEVVSYLMQPTTLFHLDGFIDLLCNFYQGKGGDAPAKGDLQEADNIRKAFAMSAQRKAAGKALPANSIMVRLLKTYEQARVVALSGDPDADWRAIRQVLDASSCPRCKEVGLEVKNIRLLERGTQLRQELSEDWRTFGHYENALEITRQAFVREHFSTQASPPSGVFVMNMHKAKGKQFDEVVIFEGWPRYYKKQIIGNPDRIIRGNAKENLDEQARQNLRVSITRGKLRTTILMPDADPCIVFK

SEQ ID NO: 62552 - protein, 637 aa, Polaromonas naphthalenivorans CJ2
MRGWGIRRVAYEAWHKLSKPLNLSCERVAKFTTDIFSKVNLSCYSKQKTVRNKINMHLSKIKLWNFRKYGDNSTFILEKPNLYLDFNSGLNVLIGENDSGKSAIIDAIRLVMKTHSYDWLRIDDDDFHVGQNRLRIELTLADIKPEEGKNFTEFLSWEILDGITVPSLRLILDVKKNLLTNQVSPYEVRAGADADGRQLSPEAKEYLKVTYLKPLRDAKEELVARKNSRLSQILVGHEAFKNRGTDHLLMGQLANFNESIENYFNGTDLMGVEITDQFGKSLKDQIDTYVQALYEPDKKTELAVTERGQLKNLLEKLELSIQGETRPGLGTLNRLFMASELLHLNKNNWTGIRLGLVEELEAHLHPQAQMQAIETFQKHDEVQLILTTHSPNIGSKLELKNLIICSGGNAFSMNAENTELNTDDYVFLQRFLDVTKANLFFSKGTILVEGWAEELILPEFAKLINFNLTEKGVSVINVASIAFIHYANIFKRKKIPHLILPVAIITDVDIAPNDEDGPIPGDKQKLTEACRLKKEKYDGQCVKSFIAPQWTLEYCLSKSSTFREKFAEITKTVHSKTDWTDFDAKLAEKLKNKSLKKTEIASRLAQAISKGEIDKTKIAEDIHIKYLVDAIKYACTT

SEQ ID NO: 62553 - protein, 669 aa, Polaromonas naphthalenivorans CJ2
MLVQLNVSDDDIAYAERILLPLGCIFDEERREFIRNFGTLDLQAVPGSGKTTALLAKLLILDRYLPFSDGSGILVISHTNAAIDEIKNKIGFACTNLFKYPNHVGTIQSFVDKFVAIPFYIDKYKKAPLRIDDDIYNQKFSKPPYNIKNLTPQDSNNAKHWLRANIKSIRWSFLQGKKTLTDGYCGKEIDFKKPKGKTKNYIDWNSTEKKNVRSWIYKFKAQILDAGCLCYDDAYFLASVSLERNPAIKLFLQKRFTYVFVDEMQDLQKHQHNLLEEIFFDDGTSNSIYQRIGDKNQSIYDAKEAVSQPFWNDRQTVLELNGSYRLSSILAGVVSPFAISPLRIEGRRKNTDGSDVRIKPHLIIFSEKNKEYVIPRFSEIINFLINDGSISASPRNKYKAIAWTTKKEDGKLRLADYFPDFSRQEQQRTTEYLTLESYITNYDKEDRTLFSIERNICNSLLRILREEEIVGADKSQYTKSKMRDFLKEANSNYFSAFEAKLYKWCLSVIQGESAAVLVDIKINLPEFISQFGTRINNSSNFINKTGNTPSSAPISANNKTANVFQCNGFKVEVSTVHRVKGETHTATLYMETFYEKKGGGGNYESERLIASLKGNAIAANAHNLIKQSAKMVYVGFSRPTHLLCFAVHESRFAKFEMDIDHDVWEIVRL

SEQ ID NO: 62554 - protein, 645 aa, Polaromonas naphthalenivorans CJ2
MKLTRLRISNFQSFGPVPTPIDFEAMTFLLGPNGAGKTVVLQALARLFGFDPSLRRVRRSDFHISPATLAAGNAGTLNLWIEAQFEFPELLDANGQHATIPGHFSHMQLDSADGVPRVRFRLTAILDEDGDIEEKMHYVIHVDANDEPVNPMVVPKHDRNSIQVHYLPARRDPTDHISYTASSLLGRTLRAANWHAERATVAGLTQGISAALASNAGVQGIGEQMAGHWLKLHKGSYYASPSVSFEHNEIDNLLRHLTIGFTPGHEASMVDFSRLSDGQQSLLYVSLVLSIQGIGRRVLAGQLDAFDIDRLRPAVFTLMAMEEPENSLSPHYLGRVIKALTDFAGHHDAQAVVATHAPSLLRRVPPESIRYLRLDAARCTTVKTIVMPAKTDEAHKFVREAVQAFPELYFSRLVILGEGDSEEIVLPRLFRAMGLADDDTSIVIAPLGGRHVNHFWRLLSGLQIPYVTLLDLDVGRHQAGWGRIRYAAKQILALWQSTPNLTLEAIEALPAWNGPDQILSSSQGAKLLSWLEKQGVFFSSPLDLDFSMIQAFPGAYGVSQAELVAADDPTVKSVLGKSGLGPDQYSTDQQSYFSAYHARFKLGSKPAAHLEALAKLDDAALTAGMPPPIARLIALVEKKLADLPE

SEQ ID NO: 62555 - protein, 554 aa, Polaromonas naphthalenivorans CJ2
MIKPQAWLPSDGLTLEPNALLAAQEVLRSLALTAGPGAGKTEMLAQRADFLLRTGTSRYPQRILAISFKVDASRNLKDRVRKRCGAELAARLDSHTFHAFAKRIIDRFRPILTGRDALNPDYTIGVGRVQGQQLDFGNLVPLAVQILKACPIACNAVRQTYSHVFLDEFQDCTDEQYQLIKVAFLGSSARLTAVGDTKQRIMGWAGALEGVFLTFATDFQAVPLNLYQNFRSKPRLRRMQNAMVRVMDPAAAVPDDMLMGPGGSVDVLHFSDSAEEAREIADLVQHWIGIESIPPSEIAVLLSRQPDLYAELLMNEFKRRGIAFRNEQLLQDLSVEPAARLIVDFLTVVAGERQSAAFGRLMDVLIATGIDEETAYEQRSRWLRFLEQSRRAMRGGQAQPLNAISLRANAMTFLKMLGREAVVALSSDYERGDRLTEVVAQTFDRLTELLGGEADPVRALSHFSEDSAVRIMTIHKCKGLEFDTVVILGVEQQTFWGDRDEQRSAFFVGISRAKSRLYLTVADQRQRPTEAQNRWDIVRRPHDEYIGYATSSVG

SEQ ID NO: 62556 - protein, 769 aa, Polaromonas naphthalenivorans CJ2
MPAASAATPVSGDITLRFLEFCQFRRLGKVQLDIDKKTTILVGANNSGKTSVLAALRHFLADGSAFGAFDISLSQWPKLRALGKAWEALTEDPSTMTGSEDQWKEQLETILSAMPTLDLWFDAGAGMYHYVAPFLSKFSWKGGAVGVRLRLEPAVSIDELKQLAWTYHTARLPVKDMGADSLAWPIDLLDFWLREPSKLGQVRAYKLNVDNNPLEGLKAYATQTLPADASPIERKHLSKLIRVDFVAAQRGLGSEEADSRSASGAHRVGMFSNQLLKFARQHLNIASTGHGHRADLIKAVAEAQQELDKKIHEAIAPSVEEVKELGYPGLHDPQEIRFRTRIQTADLLDHGTAVQYSMQKDSLEELLPEYSIGLGYQNLQSLSYQLVSFKAARLKPEKGSPAPVHLVMIEEPEAHLHVQVQRIFPDKAHKLISPTEKEASALKSQLLISTHSSHLAHAENFDRLRYVRRIAKSAANPMPTTEVVNLGKVFGEDKKTRQFAERYFRVQHTDLLFANAAIFVEGLAERMLVPLFIERDFKTLNSRYVSFLDIGGSHAHRLKPLVEKLRIPTVIITDIDPTEEKAGKPKKNGEPTTTLVAVANTGQAGLHCGNPTLRGWHPKLQKLNDFKNPTEAQLVWNETAECLVRFCWQLPVAEAEGNWPSTFEDSLVLTNMVWFKGLLDEKVDDDGVKIKPPKGALGSVATQVADAPSVPDLVGALHKLMHDSFNKGDFAASIFEMVSTEEPVVCPKYIADALDWLQKQLEPNQDVMA

SEQ ID NO: 62557 - protein, 649 aa, Polaromonas naphthalenivorans CJ2
MSAVPILANNDRDAGVVEEICGYLTEEPPRSYFLFAGAGSGKTRTLVEVLRRLTGVLKHEKGEQLARRLRTYGRSIRVVTYTKNAVAVINGRLGDNDLVGVSTIHSFCWELISGFNDDIREALIAVKEAQLEKETAKAQAKPRGITAAKQRDLDEIKADIEGFRTTDVFMYHPDRNTYGPGALAHKNVLDAAAWLLCNKPTLQTILRDRHPIVLIDESQDTIKGMLDALMGLAEPRGSGLTLGLLGDHRQRIYTDGHSDLPNLVPQSWATPELQMNHRSQGRIVTLINRIWKAELDGRTQPTTGVEQHPRIEKTGGVVRLYVGDTSLSPEDKVRRERWCADQMREASGAAAWGTGQYQLLALEHKLVATRGSFLDVYQAMVLLDPNAAAPAGSGDNKGPAAVQVMLNELAHLEACVGADGALNEFLATEVFRRHGSLDNIPEDPATRAARVDEMLKAMAAFVAACTDEKSTAEDVLFPVLSANLFEFDHRLSAAYADKSPPPAAPGRGEEESKQARMRRGWCALFDAPWNQLKRYRTYLAGNSVLATHQVVKGSEFMHVMVVMDDAVAGGNQISYDKIFGGTQLSKGDRENVDKGKETTIDRTLRLLYVTCSRAQESLALVLWSSDQEAALTRIKESGWFTDDEFQAIQ

SEQ ID NO: 62558 - protein, 606 aa, Acidovorax sp. JS42
MKVVRLTISNFRGIKSVELLFDGHTLMVGSNNVGKSTLCEALDLVLGPDRLNRFPPVDEFDFYNAEYLAPATEEGAEQAPIPLRIEAVLIEPGAEIGAKCGGNIEFWHVAEQRLLGPGEADAANPPDAVPCLRIETIGQYNPEEDEFEARTYFSHSPDAPPGELTKVPKGIKRLFGFLYLRALRTGSRALSLERGSLLDIILRTKGVRTSLWEKTIERLRGLDIEADATEIAPVLRSVERRLARYIALESPGNATKLHVSELTREHLRKTMTFFLALSADQGHVPFPHAGTGTINTLVLALLSFIADLKPDTVIFAMEEPEIAVPPHTQRRIAQYLLTKTTQAFVTSHSPFVIEKFEPSKTLLLARNAGVVTARKVSDATGLKDNDYKRFSRSGLSECMLGRAAIVVEGVTELHAMPVVARRMEESDPNLQPLDIAGVAFFDADGESNMPKFGKFFKTLGLRTFAFYDLDYKKKRKAEQAQALADNFEINVEHAYKGFEDLVVAEVPVDRLWSFLSGLKANDENGNVAIPDARPNDDAVKAIAKEALGGNKGAGWSARLFEECELHELPATVTKFLSSVFALFPPPPPIEDGDGAAPEPAAAAAAP

SEQ ID NO: 62559 - protein, 586 aa, Acidovorax sp. JS42
MNEPCKLRESVMACEGHALVIGGPGSGKTTLALRKAVKRIRDGMLPGQSALFLSFSRAAVARILDAAKLESTKAEQEQLSIQTFHSFFWDILKAHAYLLGAPHRLSILLPHDEKALSGGLGDEDEGWDEWLVERERLFREEGRIAFDLFAPNATALLARSSHLLASIAHRHPIIIVDEAQDTGQYAWQCIQMLAPHTQVLCLADLEQQIFDYLPGVGPERVIAIREALKPHEIDLGTQNHRSPDSEILAFGNDILTAKPRGAPYKGVSALAYRPEKPPPNWNHLLRRALGELLKSIRAQSDKKVETIAILVTNNRSALKMSNALNALGANVGKPVRHKLLFDEAEALLSARFAAFLLEPKDLAKLEADVATSMEMIAAARRATGQGRKEVAKLLEQANKIKGGKALNINIANALRGLISGLAVNDFSGDPAEDWLTVKHELRATNQDELTRVAAQLDFLVAFRRGHRISAALSDEWLRDGAYTNARTALDLALAQEQILDGVEPPMGLQVMNFHKAKGKQFDGVILVREARRTGPAVESSFVWRGDTALYPKSRRVLRVGITRAKVHTLILDPLWPQCPLLKGHKL

SEQ ID NO: 62560 - protein, 594 aa, Burkholderia pseudomallei 668
MHISRISISNFANFKALDVETTESIVIVGENKAGKSNFIQALQLVLDPGLSERDRQLGLEQFWDGLGENKLGATVEIAIELTDFDDDADLVASLVDCLVDVGPPTVARLTYRFRPKASLGGAPPLSLADYEYVIFGGDDEDNAIAAMQRRQLPLDVQAALRDAEKDLSSWRRSPLRPLIEELTFDLDAEAREEIQQMVSEAQTDLADRDEVVSTAERIGARLLAIVGNKHTVPIKLGLAPARVDVLLRSLRILIDNGARGIGDASLGTANLLFLALKSLELDRLVVDGERSHTFFAIEEPEAHLHPHVQRLVYRYFLGESPGHDRPSNITTILTTHSPHIASVAPIRSVVLLRHDPISGATTATSTATAPLTDEDEDDLQRYIDVTRGELFFARGIIFVEGDAERFLIPAFAEALDIHLDILGISVCSVSGTNFAPYIKLVGPTGLNIPHVVLTDLDPVDDRPPLARKRLLRLLELAVTDEEWDELDEDEPWDLGEEYGYFVNDSTLEPELFQAGLGSGIRDVIESELSTSAQTREALACWVDDPTALNNERLLKLIERIGKGRFAQALAGFATADTCPAYIRNALEYIRDAVA

SEQ ID NO: 62561 - protein, 599 aa, Burkholderia pseudomallei 668
MPLRSSSTAYLVQAEELRDNDQQWAAYESEWHCVVLAGPGSGKTKTLVLKLARILAEDVRTPRGVACITYSQECARELTRRLEQLGLRESSRLFIGTVHGFCLRHLLMPYAHLANLGLPTPIKVATVEHCRQLYSRQGTRLFGVGHPYKQMDIDKHRRVHLDRATPAWREQEELAALAEAYEEALHREGLVDFDDLVIYGERLVSQHDWVLPLVRARFPVLAVDEYQDLGLGLHRIVKRLAFDGGVRLFAVGDADQSVYGFNGADSRLLHELANRGDVELVRLEMNYRCADEIIQASERALGEARGYRAWDRDRAARVEMVECPEGLAEQAHRAVTEIIPAALEAKVGRQLGDIAILYRTADIGDLVAEAVIAAGLDFIRVDNAAPYRKCALTSWIEDCAAWCAGGWMEAKPLLRGLLERWLAFRYRRLSDAESRAERRRVTEFLWAHRQNGGGGNFVAALRATLLDDVMAAEPSLADQAVQVQSMSTALRSGGVLQDLDMARLGGRDGSPNQLNLLTLHSAKGCEYDVVIMLGLDEGSFHWSNVQGDALRESQRLFYVGLTRARDEVYMLYSGWNENKRTGRRYYSGRLRFLNELQAD

SEQ ID NO: 62562 - protein, 546 aa, Burkholderia pseudomallei 1106a
MIKVDFLHAQRHLSDSGGGARSEDLSRCLSRFYERNLEKHEEDYDAQRALYQSEALLNDHLERVFGPTLERLSHLGYPGLNNPKLLIKTALNPATILSSHDGARVHYAVGPEVGIDTQTTLPDRYNGLGFKNLIYMVVELLDAHARWLDIEENRPPLHLIFIEEPEAHLHAQLQQVFIRKVLDILDIPDEDAPHCTTQIVVSTHSPHVLFERGFQPIRYFRRVREAGVQRSEVLSMASFYETANDPNDPTDRTRDFLERYLRLTHCDLFFADAAILVEGNVERLLMPQMIAKVAPGLLSTYVSILEVGGAFGHRFKGLIEFLGLTTLIVTDIDSVMAPAAADPVAPDDEDDPDADPDLEEAAEDRAAVRGGRKACMANEPGALTSNQTLIQWLPGRSTIADLLNATVEQRIQVRTVASDALIRVSYQTSVNASWRGTTAAMVGRTLEEAFALENLAWCQDAARAEIRLRVRGCNKLSLEQIAQSLHRKIKSANFRKTDFALALLSQDPSAWTVPAYISEGLLWLEHEVVPHPPEIAAPPINAGAVA

SEQ ID NO: 62563 - protein, 631 aa, Burkholderia pseudomallei 1106a
MTLRASQPDTPADLELRACLDERPQRSFVMVAGAGSGKTTSLVKALTHLAQTRRRELKMRGQRIACITYTEVATKEISGDVGDDGLFHVSTIHSFMWSVVRPFQIDLKTWVISRIHEQIAEAREHYNRPRTRPATRQRLEREIARHERHLEEVAHRTHFSYGAGRDFARGVLGHPDVIAVAVELIEQSQLLRDLIASHYPVLFVDESQDTRADVVAAFRLIAETTPLEFCLGFFGDPMQKIYADGAGAIDAPATWSQITKPENFRCPQQVLRIVNGIRRAGDGLEQTRGRMTRVDDVLIPVAGTARLFLLLADERRSAKLSRVREWLRRTNNDELWVSEDRAADVRTLVVVHRMAASRLNFPNLYAALNDNSPQNFKEGLKDGSAWPLRPFLTYLLPLAMAVRDRRDFDAMTLLRSQCLLLSSVGLAGNGAPEVLRNLRAATEGLATLMHSNDATLRTVLIFASNTGLLQLDEAWSKYLDDDAEALAADDDPEVPSIIAFLNCQVSELRGYRHYLEDLSPFATQQGVKGAEFERVLVLIDDDEGRGQRLFSYEKYFNIAPLSETDQENIDAGDDNVIDRTRRLFYVCCSRAKRDLAVVMFVGDLAAARGKIEESGIFMPDDIVDEAALELD

SEQ ID NO: 62564 - protein, 565 aa, Vibrio cholerae O395
MYIKKVTIKNYRSFRFFEAQLQQLTVVIGENDTGKTNFFTALSLPLSGNQIDFNQKRLSVSDINKDAVIDFLKSVVDDDTEDNQLTKIPKVSVTVEFADPKDAYETALLAKWIVADGGEETYKIRYDFKPKDDKDLLEVVKKSLAGKTLDDINWFTLPVELYDYQVVSVNNEKPIAYSDLKHVSIHSINAERDDFSESSSMKSNSIFTKLLMNTLNDDDKGQINTAYSEFFSAIEKTETFDKVIGANDDFENYDSIIKQLECTPNLPNLKNILSNITLKYGNEFLYQKGLGQRNLIYILILFAYYKSCGDTFNLCCIEEPEAHLSVNNLRLVRDFIEKSSSNSGSLVQTIISTHNPSIINKLKLSNVLAFTGEKAISLSDTPTKLVDYLRKRPNFDILKLLFANKVILVEGPTEEMLISTYLSKQPALNDIDIIPIGQRGYATFLDIWLALNKDNQNKKIGVVRDYDNSDAAKAKHDTYDTAHANVTVRTTTNYTLEIDLVEAEDNLALLNDLFEMEGDLDAVSKHMINGKTARMLDVCDAMVDEENPLDIKLPAHIAEVIEAVS

SEQ ID NO: 62565 - protein, 458 aa, Vibrio cholerae O395
MIEVQIAGAGAGKTYGLAKTLIEHIEACTSHKKTFALTYTNSATAKIEQEIIKQHGFIPSNLCIQTVHSFLLNEIIYPFSSFTLGDVYNDASIMMLPSDARFKNWHLKRLKDKNVIHAESVYNIAKQIVDETISKHNNRAKKAKVRRLLAILGSCFDKIFIDEVQDLDKDALRFFEVLGCNDIDVYMIGDPKQAIKFPQDLDAFVRKVAPKEYATILPINNQTRRVPTEILAVSNSFCYEGQQQESLSEMVGELMYIESTDGRYDELLTNYLDTKQLVCIDKKNGRYTTSSKHKHAFPREIEEMIRDSNHKKDKALFVKAAFSDFMDDVAEVGARIAINRLKTSHGLTLSKQHLAQLLELCNSCTGHDVQFKVQSIESIKGLDADVCVIILSSNTLKYLTQNAISEANRFNKEWKKVYVALTRAKKRLVLALDHELLAKEDMAAVRDSIGELGFVTHN

SEQ ID NO: 62566 - protein, 598 aa, Agrobacterium radiobacter K84
MRIVRVHIENFRGIKLADIYFDGTTVLLGDNNTGKSTVFEAIELAIGADRLARTQAIDEHDFYGGDYRAGENQVPKIIVVEVVIADLDEQHCTKFRNNLEFWRTAARSLLGAGVAGGAAQAGTEPAVRVRFEGAYDSENDEFTAKTWFAVPRQEDGTPISECRSGDKREFGFLHLRALRTGNRALSMERGSLLDVILKTYEVRTRMWEGLLGRLRGLDVVGAEDAEFGRILTAIRDAMREIVPGEWADAPHLRVSELTREDLRRVLKSFLATGVPGYAAPFQHQGSGTINALVLAMLGLIAQRRNGRVIFAMEEPELSLPPHVQKRVVDKVRELAAQALFTSHSPYVIEQFTPEQMAVLTRDNAGLLTAMSVVLPDSLKLKIFRDGFRTRFCEALLARRVVVVEGKTELVAYSAVARRAAELAPAQYKRLDALGWVPFDAGGQTAVAPFASFFRGLGKTVATIFDQQQPDARAAIVAACHAPFEQPYAGFEHMLQAEVSPAMQAWFVQWFVGAGEWPPALAHLVPPNGSPEAAYRAPFLSLFTHKKGDDYLTVFFDLCQVGHFPQTMLGILTALKNMVAPPVPPVPQPPAPQPPGIFG

SEQ ID NO: 62567 - protein, 568 aa, Agrobacterium radiobacter K84
MVLVLCDQRRRLLETEGSILVRGGAGSGKTTIALAKACADLAAGRLGNTGKALFLSFARATVARVAEQATATIPREQLARIEINTYHGFAWTILKSHAYLLCARPGVSLLLPAQARGRLAGLDGAARLARQRELFDQEGLIAFDLFPSLLTELFALVPLLAQAYARAYPLIIVDEFQDTNTAEWQMVARLGQHSRLIALGDPKQRIYDFKGADPRRFDEFIEAFRPTLFDFQGENRRSPGTQMTDFADDMIDGVFKAVAYTGVSIARYGGQSLRPLKQEILRAVGRLRRANEWSLAVLVPANALAVGVFDYMARADHGLPRYPVEILVSAEGPMLAAAMIALLLEPRDHPDHLGALVLDGLAAFELGRNEAASAGGITKAARLRTIARSLRAQGDAGFGVRGIGPDVRALLESVAAHPLSGDPMTDWRSIRAIFEASPRAELQAVAKEARHMRLLRRGAQIESRFAEVWRGHGTYRDARGLLSAAVVEDQFAATTRPHHGVTVMTIHKAKGKEFDEVIVFEGAYQRYLQPRGADAERSARFNLHVAVTRARRAVTIMTPQANPCPLLP

SEQ ID NO: 62568 - protein, 657 aa, Rhodobacter sphaeroides ATCC 17025
MKIETITLSNFRCFGADPVVISLEENLTALVGNNGSGKTAVFMALARLFGATAAQRALRKSDFHIAGNQDALASETELAIDCVLGFPELDGDDDEGTDAVPEALSHMATDGENGALKVRIRLQAKWIDNGTPDGIIEESLRWVQSLDDEFEWDDCRPVQNVERNFIQLVYVPANRNAADQVTALLKGRLWRAAKWSEGLAESAAEAAGELQKDFDEEEPSAFILDRLEKRWTQLYQADTDRKPKLRLIDSTLEELVRRAEFVFFPDEAGQARNLDDLSDGQRSLFHIALTAAVLEIERDALALDADESMFDQEKLRRTYLTILAIEEPENSLSPFFLSRIMTQAREIGELDTAQILISSHSASILSRVEPEEVRYARLDQESRSSSISSLSLPDDDEDAQKYIRLAVRAYPELYFGRFVILAEGDSEAIILPRLAEAAGFPLDRSFVPIVPLGGRYVRHFWHLLSGLKIPYATLLDLDLGRKHGGSNIIATTIGELNLIGRDLAENRLVANGDVNLADIGDLDDSELLEEGQDHPWLKMLRREAVYFSSPIDVDFAMLRSFPDAYQHVRPSGRGPRRSAKAIENKKSVTLKTDGNPDLYEDAEWRDAFVWYPYLFLSDSKPGTHIEALTRIADEDLVDDAPIELKRLLTRVRKALSL

SEQ ID NO: 62569 - protein, 617 aa, Rhodobacter sphaeroides ATCC 17025
MTLVKPDDWQPQGVAELEDRALQALRETERSVCVTAGAGAGKTEFLAQKAAYLLQTGLCPAPKRILAISFKRDAAATLAERVKRRCAPEQARRFISVTFDAFSKGLIDQFRKALPDAYRPPANYRIGFPTTDSVNDFLRRHNRHGVNSTQFQNALIRRRLLDGGQEVNDETEALRDAYWRDQYQYYDEPVLTFPMINRLAEYLIRTNHRVRRAVRLSYPVVFLDEFQDTQASQFEILQRAFDGAATVLTAVGDDKQKIMGWAGAMPNAFRVFRDQYNARAISLLLNWRSHAELVAIQHVIASNIDPDVEPVVARGQRNVEGDVSAIWEFADEEAEITVISEWIEGQVANGTAAHDIAILVRAKADRVEIELGPALAERGLILRNLARNVGEISIEDLLSEEFTKILVPVLRLATSKRHPEAWSTTLENFSRLYAVSPEDDDQLQRLNDRVQSIVRRLRAFLSEHAVTATNPNQISDLLIEEIDEALIRRSTPAYQRDADYLRVKQGFDLLLAESMNEADDWCVVLDRFEGRNQIPLLTVHKSKGMEFHTMIFFGFDSRTWWSLTPDKDEEKNSFFVAFTRARQRAFFTSCLRRGGRITWLEELLGDAVPRVEGVTIL

SEQ ID NO: 62570 - protein, 793 aa, Flavobacterium johnsoniae UW101
MHLKSITVKNFRRLKKTQIDLEKDDSIFVGANNSGKTSATYLLYRFLEDQKAKFSLHDFSSHCWKIFDDLGNSETLLKASEFPSISLDLWFQIQSSDLHRVLDLLPSLEWQNAPVGARVEFSVKDVSTLMENYKQAKSKAVANKKEQYHPWPKNLSDYLRKNLNQEFNFKFYVLDFEKFDNDFNQEEGYEPLTLGNDTDRSGSKIIKSIIKVDILNAQRHLTDNNSARSEDLSKRMNRFYERNLRKKENDYEAMRALDNSEKELTAHLSEVFAPTLQSLNNLGYRGFNDPKLLIKAALNSEMIASQTKLHYALSDDPELMALPDQYNGLGFKNLIYMVIEILDFHARWMDDEENRAPLHLVIIEEPEVHLHAQLQQVFIREIRKVIQKAETSEFFATQVVISTHSPHIIYESGFKPIRYFQREIDDDGHQKSNVLNLSTFYDGSRPKTIKFLQQYMKLTHCDLFFADGTILVEGNVERLLLPMMINKSASELNASYITIIEVGGAFAHLFKKLINFLGLKCLIITDIDSMLGRDETSKTLSSTVCFDNKTPFKDSPDSLENGESASNILNEDDEDDEDDEDDEDEDDEDEDEDEDEDEDVKKENKNGKCPTDTENAVTSNQTLIKWLPKLSKISELFEANDDAKTQIPSAISKSHVFITYQTPQKVTWEGKSKKISGRTIEEAFALENLAWTQKVEHKDLKLRVITLIDNRSLDEVKDRLYRRINLNNFNKTDFALRLMMKNSEEWKVPSYIDLGLKWLQKQLSEEQQIIKKTITVQKKDPKPKKNNKKQDQI

SEQ ID NO: 62571 - protein, 637 aa, Flavobacterium johnsoniae UW101
MSGRINKPDTPADKKLRNCLKTKTSFVMIAGAGSGKTTSLIKSLKYIEETEGINLRQEGKKIACITYTTAAEKEILDDVGHDSFFHVSTIHSFLWELIRPFQKDIKKWVSSKIDSKLEELQEARAKFSNRTWQSTRDNNKLETAKYLHMKENFHTVSEFQYETGSKYLDGILGHSDIIAMAPQMIISNPLLQIILSNKYPYFFIDESQDTIPEFVKAMKVVQMNVKNFCLGFFGDPMQKIYHTGSGAIVIETGWQEIRKPENFRCSKNVLDVINKIRALGDGLKKQTGGRKMFVDGEWQLINGSAQIFILQADERHAEKIALVRSYLADQLKDPLWKSDKKEADLKVLVIEHRIAANRLKFAELYSAFKDSSTDSLSMSFSEGTSWALMPFLKYILPLINAYRNGEHFQVVNLLRQYCPLLQKSHLQLPESEPSKILNELKVHLEIINKLLKIESPATVENLFSYLESNNLISFDDRIRTRLNKASKGSLEDEDISVTDQVIANFFKCPVFQVWGYERYLNEESPYSTQHSIKGAEFNRVMVVLDDEEGRRSTSYSYERLLGIKELSDTDVTNAGNGRETSQDRTRRLFYVCCSRALTDLAVVLFTNDPRSAKKAVTETGIFKKNSIKIELDISNEK

SEQ ID NO: 62572 - protein, 647 aa, Acidiphilium cryptum JF-5
MRSHYGDGMRITRLHIENFRSVRNLDIELGETTVLIGPNNAGKTAILDAVRIVLTRRWGQRGTGFTENDVHRPEPDGDPRTLPPVRIVIAMEESRSGEWDPDMVAALEDIITVTADRMRNLLTVQVTCAWSEEKEAFDPAWQFLDSAGVPLRERRRAINLTGFFSYMPLFWLGALRDATNEFTPRSGHWGRLLRSVRIPDELEAEALRILAELDARIAAADPRLAEIAEMIGQATRVAIGEGPGGARLATLPLGIEEMLQRTGIVLRNEELRPWLPLGHHGQGLQSLAVIFLFQAAVLQQLAEAERPGVEAVFAIEEPEAHLHPQAARTLWEHVQALAGQKLMSTHSPYFLQHVPLRDIRLVCLRGGCTEIATLPRYVVSDLPWNDAVNGFLNGSAGRIFFRDEPTGRVASRSWFDMAMATRVLRCYRRDPDRAARTDQVRQFRHLCRILPTAEDEEELGFHGRRVRGEIFFARRWIMVEGVTEYLLLHALGKALGWPLDDHGVAVIDFQQSGNAGIYPALAEAFGIPWNMIVDGDHEGEKFRRQIIDRGFDDEELEGRFVTLTPQNDLEDQLLADGHEQMLREILADIGGRSALDCPPDEFRARLKNRKTGYMGVLSLRVAADEALARRMPARFVDLVTALRDGAA

SEQ ID NO: 62573 - protein, 639 aa, Acidiphilium cryptum JF-5
MTPELQAALDRLSPTQRQAVDWEDGAALVLAGPGVGKTTVLTTRIARILDSTAGKNFRILALTFTTKAGDEMRERVEAIVPGLAERTVIGTFHSFCAQVLRQHGSHLAIKPDFGIYDQDEDRAELLKDALEQAASHGAAVTADDTRWLRAIDQLRSSLVSPQKAAKHFRDPKAGERAARVYEIYENALRERNIMDFNGMILDTCRLAHQVPAVAARIRQSYPYWLLDEFQDTTPAQYRLIRFLAGDKFKNVFVVADDDQIIYQWAGASYRQIAAFREHFAPDIIQLVENRRCPPEIVQAANNLIAHNAERTPGKQPLVPTRPSDGAAIIDRAFATETEEAQAIAQEIAAKGEAVWGRTAVLGRTRAILQPVLDELRKLGVAASIATRRDRFVSPQFVWLQSCLDLSLRPTDRRAFTTMAAAANRITGIELDVAILAAEARSSDASLLEYWALAANNAGNDIASSLAEFALRLVQSRSTWRKVVSEAIAWLPQTADSSNGIISDAEEDRTAWETAAQAIRVEKGSQPDLDELLQGIALRPKEPPLDPSAVRLLTIHAAKGLEFEYVWVTGVAEQILPSWQSLKAGASPAELEEERRNFFVAVTRTQKQLVLTHAAQYRGWQRQPSRFLAEMNLSGTDTDS

SEQ ID NO: 62574 - protein, 640 aa, Geobacter uraniireducens Rf4
MYVVETLPYSSCKYYNKRKLNMPKPLVATSGVKVTDVRIANFRSLMDIEVSLDSLTVLIGANNAGKTSFLDAIYAAIGAGRKLLGQDDIRVAPEEAIPPKDRNVVIDIKIRPITDDGKFADEFPEGSFWTSLWGSGITPAETDDSHEFMAFRTILSWSFAKGDYVLERKFLKEWRPYAEWLPTPMQEKRLQSSDIEPIALHYIDAKRDLDDDLRKQGSFWRKLTDDLGLSPADIIFLEEALTGINQHIVDKSEILKHLKHNLADMQSVVAAEGAGIDISPVARRLRDLSKGIDVSFSTTAAQSFPLTRHGMGTRSLASLLVFRAFASWRSSQAQMEGDQIHTFLALEEPESHLHPQAQRSLFSHIKTIPGQRIVSTHSPYFAGQAQLSDLRLFLKRGGNTIVTQLDISQLGTKEDLRKLQQTVVDTRGDLLFSRAVIFFEGQTEEQALPIWAEKYWNASIHELGFSFVRVNGTDYFPFISLAQHLEIPWYVLADGEPRPLGELNKALKKIGQVVASACPNIVVFPNGNNFESQFLAEGYLPEIEKALNETHNCTDFLGDYINELQGQKRKGGEIRDYTVGDGRKIAALDALNGLKTCMAKPLAHTISSLPDEARRFPNQIRKLFEIISSEHGLTKAKETT

SEQ ID NO: 62575 - protein, 620 aa, Geobacter uraniireducens Rf4
MTKARLSAQQATVVEHVEGALLVIAGPGSGKTRVLTERIRRLLTVIPGHFRVLALTFTNKAANEMKERLSDLGDVRQRAFVGTLHSFCLDMLTERGKLVGVTSLPHIFEQFSDRKEILHKAVLQDPLLSDELDRAGDAKARNKRLDDWLQGISWVKAHPITCEFPTDDLDKRVIETYDAGLRACDAYDFDDLLLLAYRLLSSYPKIADFYRRLYKFVCIDEAQDLNEAQYAVLTALCGEDFKNVLMVGDPKQSIYGFNTSSPDYMWRFRDEFGAGEIELTENFRSSSAVVQVARSLEPHYLVEAQLPIPGAVSVLVGIDETDEAHKVVDEIQRLISSGHEDIEGNVTPSNCAILGRTRYALMAIETELKERGISYYKRLTANHENESATVDEFQLALRVLANPRDRLHLTALAKKWKLSEPKGPAPANEQEVRLIFSAMANVAKEGRASAIVDAIDAVARQTQRLDLMLGIKSLRAFADSLPEVERLVIYEDLAVLQQEWDQYLRSDGAARTIAGFMSSKALGATQQASRDGVALLTVHSSKGLEFDVVFIAGMADGVFPDYRAQGKKKEMAEEARNAFVAVTRSKRLLYLSFPKRRMMPWGDEKRQQPSCYLRQAGLVE

SEQ ID NO: 62576 - protein, 679 aa, Clostridium botulinum A str. ATCC 19397
MYISKLEINNFRCYEDVDIEFNEGLNIIIGENNCGKTTIMRALEYIFNRSRVSTPDTNDFNKELVNKALEIGEQPPEITIIATLKSSSSDKLEDKAVVASWLTKLETPWEATLTYKFFLPESDIKEYKEEIKSIKKSQKNYIQKRWNIFEKYLKKYVSRIYGGNSESKNKVESEYLNKFHCELLDALRDVESKMFTGKNALLKEVLGYFKDSHIEIEDGDEFSEEDKKKLIEKEKKDRKKEFDEYADKIVKNISKRVGNNDVLDFAEKTGASIGGIPTLGGNLEENDVLSVLKLMIKNKTGIEVPIINNGMGYNNLIYISLLLSKFKMITSDEYGENAKVFPILLVEEPEAHLHPALQYNFLKFLKDEVSNQKISRQIFITTHSTHITAAVGLDQIICMERDESGNTTARYPGKVFSDSDKEDIKSKKYVERYLDATKSTMLFAKSVLFGEGLAEQILLPVLAEQVDRSFDKNHVAMVRVDGVTFKHFIKLFGAGIKKHNLKYALTKRVACINDSDPQKIIKEKEEGKTRRWKKCWPFEIDLDTEHYDYKAFSGTIKNLLEDVKECKNVNVFYNITEKGKTLEYDIALENYDSDDFFNDKIEIMDFQELNKSSWKKEEKVKAKKAASYLNYAQDTKGEAAFELAEKIRSEEINIKLPNHIQKAFNWVCYMDDEEVKEDE

SEQ ID NO: 62577 - protein, 593 aa, Clostridium botulinum A str. ATCC 19397
MSNTEYETITSDQLIDINTNFKIIAGPGAGKTYWLVRHIKHVLEESKILKSASKIACITYTTVAAEEINNRLKANSDRVEISTIHSFLYNNVIKPYIYLLKDENEKCIVNYIKLDGHVENVPSNGKIIQWKKINNLFHFKDDNKIKKCLMDLDWSLKDQELLLKVRKDYNRKVGRYYIKEECFPSYKQLFWDEGIIHHEDVLYFSFNLLEQYPMIKEFLSAKYPYIFLDEFQDTNPIQTQIIKWLGEAGSLTGVIGDPAQSIYKFQGASRKDFLEFNLLNQKNYKIEKNRRSTENIIKILNHLRNGDNINQSCYRANLGNDVLYIVSNDTNYIINKFKEVRKAIGCYKDYCIITRKNDDVIKLKNGDKSCDCKLWDKVFECDFSRGRFLKNLFTAQELAVEDRYEMAIKEVLKLFKSNRDGKLREPFKSTIEITNLQKRSYAVSILEHLLNNREGNMNVKLLDFYNRLNNDVLESLNLQISKVGSRGKAKTCYESVILKDLISNLKLDEEKESKIRTIHKTKGTEFESVLVCIESNDDIENIISPNIENEEDDCRLYYVASSRAKDLLCIAVPEGSQEKKLKEIGLVSMIDNI

SEQ ID NO: 62578 - protein, 679 aa, Clostridium botulinum A str. Hall; identical to SEQ ID NO: 62576

SEQ ID NO: 62579 - protein, 593 aa, Clostridium botulinum A str. Hall; identical to SEQ ID NO: 62577

SEQ ID NO: 62580 - protein, 707 aa, Methanococcus maripaludis C7
MVNNYRLLKEMNLDLEDDLSLIIGKNNCGKTSLLSILNKFLNNSPNFSFDDFNIEFQDGLRDFVLQNTDLTSRGIYLKLFIEYGEKDDLANVSNLMMDLDPDNNKIILSFGYVLPDDKIDNLKADFNEYISKKPKPEENKKTIFNEFIKKEHGKYFKTFKKTVGYDLQTASINENRYIDLNERKISLDNIINFKIIGATRNVSNNDSNKTLSLLSSKYYEKTEESKKGLDNFKEFKEILCKTDGELEDIYGKLFEDVLTKVRKFGGINEGDSTIKLVSNLQHKELLGGNTTVVYEHNKEHLLPESYNGLGYLNLISMIFEIELILSDFRRENKEDKNPADINILFIEEPEAHTHPQMQSVFIKNIKELLKTESGNSDGTEFNLQTIITSHSSHIVSESDFEDIKYFYKKSQNEVIAKNLKDLKSEYLGAGEDAYYKFLKQFLTLNRAELFFADKAILIEGDTEKILLPAMMKKIDQEFPENMPLLSQNISIVESGAYSHIFEKFIDFIGIKSLIITDLDSAKKEPVLNNKGEQETYDNGNPKYTTGKVKVFEGNITTNASLKFFHGKRENLDYFLGLSCESKRLSKNKTTKNWETDENGNLMVIFQVEESNCNDEKYCARSFEDAFFHLNRKYVCDNIGNFPSLQYKKYVADQTKDVYTLAEKCIDKKPAFAIEILLNSKDTENGKMFGNWKTPKYIREGLIWLKNC

SEQ ID NO: 62581 - protein, 627 aa, Methanococcus maripaludis C7
MVEKLLEPEIVEIFGHVLRGNNFLLSGGAGSGKTYSLIQVIRKALNDNPNASIACITYTNSAVNEIKLKINHDNLMVSTIHDFLWNNIKQFQKELKNGIIELSELETSKIKFKNENDKSHFVENVSNIQYKEYIQMKNGIISHDEVLVLAHHLFEKHDLLCNILKDKFKFIFLDEYQDTNKLVIEILLKHLKKCNKEQIIGFFGDSMQSIYDDGIGDLKDYVNSGEVKEVVLNQNRRNPKLVIDLANKLRTDNVIQEPSNDINAPNMKDGSVIIGKINFLYSTTNDVENIKSTQYFSNWNFNDTIKTKELSLTHNLIAPKAGFSNLMAIYDKDPMFRLKNDILSKSNEKCIELDDSKSFEKIIEEVDSLFRNSKKQMINSSNEVKELYDHLKNLPFSEIKKIYFDKDSLIDNKKETDDEGSNDSKRDNLIKHLFKIEKIIQNYKNKDYNEFIRKTNFKIDSIAKKRELKNIIDKIGNFSELKIEEVINLCDEKELCKKDDSFNTFIEKNQYLYNRVKALQYLEFQNLFNYLEGFTPFSTQHKVKGSEFENVLVILDNGGWNNYNFEYLFCNRIDKQSVLLRTQKIFYVCCTRAKENLNIYYHNPNSQTISKAIEWFGEENVHNLDDN

SEQ ID NO: 62582 - protein, 569 aa, Shewanella baltica OS185
MYIRTVEIENYRAFKSFKIKLSPLSLIIGENEAGKTNLFDALALPLNSNDISFNKKRLSVSDINREAIKDFYQAIINGKGDDEIKALIPKVRVEVEFTDPKNFIEEGVIGKWIIGEEADESYKIRYDFRPKDADHFVKSAKELLDGIEDIKETRWFNLPIELYDYDVTQSNNGLKVSYSDLRLIAINSINAERDDFAENNTQKSNNILTKMLISALEDSDKAKINSAYTSFFDEIESTETFKKIVTPDPDFENFFDEIVDKLECIPNLPNLKSILSNITLKSGESYLYQRGLGYRNLVFIYLLFEFFKGNKNALNLCCIEEPEAHLSVNNLRFATDFIYKSTQKGGSSLQTLISSHSPQVINKLELTNVIVLSGNEAIHLTDSKKHLTNYLRKRPNFDILKLLLSNKTVLVEGTTEEMLINAILYRNNKNLSSLEVISIEQTGFITFMDVWLQVNKGKPKKKLSIIRDYDDNNATKDKHQKYDIENDNIRVRTTTQYTLEDDLAGTAGNLHRLNTLFNKKCKTPEEMAKFLKNSKAERMLKIADSILDEMNKDPIMLPKHIQEALDFMK

SEQ ID NO: 62583 - protein, 484 aa, Shewanella baltica OS185
MIEVQIAGAGAGKTHGLAEKIIKHYDASSYKKIFAITYTNNAAKNISEAIIKQFGYLPENIIVCTVHTFLLNEIIYPYSPFVLNEIHTTSSRCKTFSNFPPGKSEEKKRRESAGTISRLKKIGVIHVDETYAAAWRIVDENYSKHSSQKKKSKVRKVHKLLSSAIDKIFLDEAQDLDETALKAFQQIGENSVDIYMVGDPKQAIDYPTSFTEWLAANKANEKVKVLPNITTSRRVPQRILDLSNTFCPKGQEQTSLSEVEGRLTYITSEDDHYDDVLCHHIENRSLVSIFRKEGNYSTKQAGSLPEFDPEVEELLTVKFPEYEEGVVIYSLQRFFTSLLSKNDNNKSIRKFLAKLEIPYDKELFIKLCRSAEQFSSSKDNSAKYAISNIQRTKGLESKVCVLILTPAIFKCLMQNGVTKFNKTWNMVYVALTRAESELVVAVDMALLGRGYKHDDIVESLESIGFEVLNPNLPNHKTEEKLEEA

SEQ ID NO: 62584 - protein, 594 aa, Parvibaculum lavamentivorans DS-1
MRVSRVRLINFANFSDVDVETGESIVIVGENKVGKSNFIRGLQLILDPGLSERDRQLGLEYFWDGLGEDKVGATIEVSVDLTDFTNDPRLMAHLNDCVINPGPPMVARLTYRFQPKAGLGRAPESLKDYEYIIFGGNDPDMLIGGALRRMLPIDVQVALRDAEKDLASWRNSPLRPLIEDLAASLDDDAREEIQNQVDEAQRELAGHEEVVATAERISERLIAIAGGQHAVPVSLGLAPTRVDALLRSLRLLIDNGVRGVGDASLGTANLIFLALKSLELDRFVSEGERDHTFFVVEEPEAHLHPHVQRLVYRYFLGTRAEDEDEAPPLTTILTTHSPHIASVAPIRSIVLLRHNAADGKTIAVSTANAPFTQRDEDDLQRYIDVTRGEIFFSRGVILVEGDAERFIIPAFAEALGIPFDILGITVCSVGGTNFTPYVKLLGPKGLNIPHVILTDRDPVNGKPPLAHRRLINLLNEVDEEYGYDDLDIDDVLKYAAEFGYFVNESTLESDLFAAGMAEAMKAVIEQELPLRQVTRDALQEWVADPDQVDEDRLLKLIERIGKGRFAQALAPSVSEGVCPAYIRSALEHIRDAVA

SEQ ID NO: 62585 - protein, 604 aa, Parvibaculum lavamentivorans DS-1
MPSRNVGTAYLAQAAELAGNPGQLAAYNSQGHCVVLAGPGSGKTKTLVLKLARILAEDVESPRGVACITYSQECARELVRRIESLGLQQAPNLFIGTVHGFCLRHLLMPYGRLAGLPISFPLSVATQRVSDRLLKQTGDAIFGQNHPYKVIDLGRHRRSVLNRNSVAWRSEEELAAWAEAYEAALRDEGLIDYDDMVVFGQRLIAEHDWVLPLVQAKFPVLAVDEYQDLGVALHRIVKRLAFDGGVRLFAVGDADQSIYGFTGADGALLMELAARGDIEPVRLQLNYRSGTGIVTASEMALGEVRGYQASDPARQATIEFVLRPGGMADQAAHVVAQIIPAALASKPGRTLGDIAILYKDYRAGDIVSEAVTAGGLDYIRVDTAAPYRKVSLTSWVEDCAAWCAGGWRVGRPQLRGLIDRYLAFHRASLDDAQARREGQELTALLWALRSDQQPARDFVASLRSGIVDRLLAAELALADQKEQLDRMTAALAEGGALATLDMTSLGGRDGSPDHLNLLTLHSAKGCEYDVVIMVGLDLGNLPWRNESPEKLRESRRLFYVGLTRARDEVHMLYSGFVEGRYGPMRLGRSPFLDELEARMRATGI

SEQ ID NO: 62586 - protein, 619 aa, Xanthobacter autotrophicus Py2
MRACRLTITNFRGVKSATLHLPQHGVLIGDNNTGKTTILEALDLVLGPDRLNRQPPIDEHDFFRGAYLPEPAAPAADAAEAVDDGGDGELPAPEVGAEPPRIEIEVTVADLTEEQKGKFGDYTEFWDGAMDTFYDEPNPAGVDAATITEALRITFLGWYDAEEDDFQGKTYFTRSLTEGDRPEPFSRKHKQVCGFLYLRSLRTGSRALSLERGSLLDIILRLKEVRPQMWEATLGTLAGISVASDPKLGISPVLESINTALKKYVPKEWGVEPHLKVSNLTREHLRKVITAFIATGDGDHAAPFYRQGTGTINMLVLAMLSQIAQDKQNVIFAMEEPETAIPPYAQKRIVHEVRKLASQTLFTSHSPYVLEEFAVEETVVLGRDGEGVLEQKAITLPGNVKLKRYRQQFRTRFCEGLLARRVLVAEGATETSAFPVACRRLAELKPDTYASLEALGVCIVDAGGETDIPGMAKLYRDLGKRTFAICDKQGDANKDLIEAQVELLLMHEEKGFEAMVLQGTTEAALKRFTKLIDWPQDLAQKYPDPEAQAVDSLTDYFAKSKGNWGIADFLAQCSEAEIPQWLRNAAVNLRDACLPIPAGGGQAAAPAADEHPEAVDGAD

SEQ ID NO: 62587 - protein, 595 aa, Xanthobacter autotrophicus Py2
MEADGHLLVTGGPGSGKTTISILKAAQVAERDLRPGQKILFLSFARATVSRVVEAIEYEQQIPPAQKRHIDVETYHSFFWRILKAHGYLIGLPRRLFILTPPGEAIALSAARSGFPARNLTDAQKAAKKVAEETERARLATEDGRVCFDLYAPYVGDPLHGSARIRRLIASMYPVIILDEFQDTNEAQWRVVQALGEVCRLIALADPEQRIYDWIGADPARLDHFREAFKPTEVDLSTDNHRSAGTEIALFGNDVLTGKFRQDSYKGIDFDVFDPFPDPAMTKLVTTVYKARKRLVDAGVVNWSLAVLVPTKKMTRLVSDAFRQPPAGMVEVPHSAVIELEAAILGAEIIALLMQPADDRHFGQFIDLMCNYFQGKGGDGPTQGALKEAANIRKAYDEWLACRAAGKAIRKNSMLVNMIAVYEQARTAVLTGDPDEDWRAVRRVLEDGGCARLKEIGQEVRNLRILERGTQLRQELSQDWRDSGGYRNALAITRQAFIQEHFSTNAKPESGVVVMNMHKAKGKQFDEVIIFEHWPIKRKGQPPYNGDRIVRFNSREQIDDQARQNFRVSVTRGKRQTTILTPKCDPCVLLLGDDE

SEQ ID NO: 62588 - protein, 598 aa, Xanthobacter autotrophicus Py2
MKIFSVGIENFRGIQSAKLVLPDHAVLIGDNNTGKSSVFEAIDLALGPDRLSRRPPVDEHDFYQGRYLPSPNPDAPEGAEPGPAPKITVEVTITNLSPEQEARFGANVEWLNTTTGDFYQEANPAGVDAAEIKAALRVTFVGQYDPDEDDFVGNSYFTRSLSEDETPASFSKKDKQHCGFLFLRSLRTGSRALSLEHGSLLDIILRLKEIRPQMWEGTIGTLAAFDVASDPSIGISGVLESIDKSLKKYVPREWGVKPHLKVSNLTREHLRKVITAFIATGAGDHAAPFFRQGTGTINMLVLAMLSQIAEDKQNVIFAMEEAETAIPPYAQKRIVHELRKLSAQSIFTSHSPYVLEEFSLDETVILSRSDNGQLSQSKIELPESIKHKRYRQDFRTRFCEGLLSRRVLIAEGATEATSFPVVARRLAELNPAAYASLEALGVCVIDAGSETQIADLGALYKSLGKRTFALCDKQTDAAKVAIEAQVERLFMHDEKGIEDLILKNTTQAALERFADQLDWPQHLLAKYPDPKAQAAAALGAYFSWSKGNWGIAEFLAQCSEAEIPQWLRDACVTLKALCDPPLQPAEPEPEDDFADLLG

SEQ ID NO: 62589 - protein, 608 aa, Xanthobacter autotrophicus Py2
MVDLTEAQKEILQAVGHQLVTGGPGSGKTTVSILKAAKIAREELKPGQRILFLSFARATVSRVLEAIDEESAITREERQRIEVDTYHSFFWRILKTHGYLVGFPRRMTILTPPNEAIALSAVRSGYKAAKNLSDEEKAEKRAKEEAERVRLATEEGKVCFDLFADRVATLLHGSDKVRALVSTMYPYITLDEFQDTSADQWRVVQALGANSTLIALADPEQRIFDFIGADPERLNHFKADFAPTVHDLAGDNHRSKGTEIALFGNDILTGNFRQKEYQGIGYAPFASNPNQAYASLVGQVLQARKRLVESGRRDWSLAILVPTKKMTRMVSDILREPFGNVPSISHSAAVDMEGPILAAEIIAFLLQKCGHDGSFDEFVELMCSYFHGRGGTAPTKGDMDEAARFRKALSKWNECLAKGRTTPGNSVLQGTFAVHQATAALTFTGDPDADWVSVRDVLDTGACERLKDVAKDVRNVRLLERGTQLRQGLAQDWRDVGRYSNALAITRQSFVQEHFATAHKPESGVVVMNMHKAKGKQFDEVVIFEGWPKRFKGEIVANPDRIVFGNVHDGVMTQARQNFRVSITRAKARTTIMTPRDDVCVLLRPVPA

SEQ ID NO: 62590 - protein, 607 aa, Escherichia coli O139:H28 str. E24377A
MNILIDKVRISGFRGISNIEITLPRVTVLLGQNNAGKTSVIKAMQLAMGDYSRYLSDEDFHIGEDEKRQEAITVDLRFIAVDGETRIKEFSENWQQVFGEKIQSEPDGSQFVCIRTTAKPDRVKGGYVVERFHLDIWPERMNWQDARVNNKNRLGKRLEFVPFIPIDAQRDIHSELKEKSSFVGRVLSSVEYDDKDVAELERMVAEINKEAIEKSEPLKRLKNHLDNLNQSFEGSGQTELTPFPKKIRDLSKRFSVNFGESDKSSFSMEYHGMGTRSWASMLTVKAFTELLVKNHEEEAEPFFPIMAAEEPEAHLHPNAQRTLYRQLVDAPGQVIISTHSPYIAGLAELHEIRFLSKQENSVCVYQLRDKFDGDDLRKLRREVVHSRGELLFSKAIVLSEGETEEQALPELFEAYTGKHPFSLGINFVGVNGSGAKYRPFLILAKDFNIPVFIFSDGEEQTVKDLKKNYEKVFGVTDIMNAANITILEGTDFEGYLLSQGFDQLIEKTIHEIDGDDAIDKWIEKKNGTSLKRIRTDKPNCGTCNQPIFEDVLRNYIGDDGRVRAILEILDSSKPLYAKAITDNLIKLPKEKFPQKIIELFKQIESGV

SEQ ID NO: 62591 - protein, 630 aa, Escherichia coli O139:H28 str. E24377A
MNLSNAQRQIVEAPMDIAIQVLASAGSGKTRVLTERVRYILNNTKRDAVIALTFTNKAAEEMSSRLSDFDPDEDRVWIATIHSVAQRILEKYGHTIGLPSDLYIYDRDKDRMEVFMQSLREDGIDIDEYLSIADSKELKNRERNLQSYMDIFSKIKRELLTEFEVSELYPDNNIWKIYQDYQASLLNSGGIDYDDILVYAHRILLTHDWIAKIYRSKYKHVCVDEAQDLNKAQYEFIKVLCGDVIKSILMVGDPNQMIYGFNGSSKDYFCEDFINDFFPNQFELKENYRSAKAIIRAANKLRPGSQAEIDYALEGGVRISEFASEEDEADTVVATIKHLLELKVHDEIEGDISLNNMVVIGRNRFVFGKLEKCLKENLIPYSLRKGERALEPSTRFGKALDYAIRVKLNSKDWVDGKKLCQVLCISEPAGWTPDVLREMAVQISSSDDDYSIVFEKLLTTIDSLNIENPKIPKLIKEFNALLTSLVENHNGISDDKIEDVKLSIEELKEFSGMWTRFKRKGLGDSLVAFRNALALGQLAESSMDEGLTLSTVHTMKGLEKDIVFLIGMCEGVFPDYRARTPKELEEERNNAFVAVTRAKRWLYVSYPRQRMMPWGDLRFQQKSRFVSEIE

SEQ ID NO: 62592 - protein, 711 aa, Citrobacter koseri ATCC BAA-895
MLRAQSITMYINKLAIRNYKNFRSSNFYFVKGSVNTIIGENASGKTNLFNAMRLILDDSLPMNSRILSNEDFYRGLSEPFGHWIIITLYFDDLSESEEEQVLANYTVNDGNDKSIKEGNYTFIYRPKFHIRQKLYELTLEDDNVEARSASFTEFASNHIISKETYEAVAFVRTKVDLNNDEIYKQVVGDFDSYSFSNPNDDDATVLGVKKPPYFALGSEVACTYVKALRNVVADLKYYKTNPLYKLLTLKSKQIDDRKDIVENVKEINGKISAIPEIERLSNKISASLLNTVGSTYSPKILVSSQLPEDFTELIQSLGLVVEDSLDYNGSGKIDDLSLGGANLIYLALKLYEYEEIRDSEEHITHFLLIEEPEAHIHNHIQKTLFDNFNFKNTQVFVSTHSTQISSVSKISSMNILSRQKGFTDVYHPSFGLTPKEISSVERYLDAIRSDLLFAKSVILVEGDAELILIPAMVKETLGISLDELGISLIKVDGTVFKHISNLFHEKRLKRKCAILTDLDSAYVKVADDIFDADFVESLVDAEDDGLRRKEELDKYIEGNEFITVHYAENTFETELVRYDENNNLFLEVMKTEYKKEAYFKKAESDVNSSDLRVRYKRVLKFAKKIGKGWLATEMVEHLSVDNRVPDYILQAIQFVLRDRNVEPIYQKMLDYNMSLMGVKEFDCINAEKDFSSKMIEYKKHFNDSFVRLLEL

SEQ ID NO: 62593 - protein, 573 aa, Citrobacter koseri ATCC BAA-895
MDAVKFNGNLLLTACPGSGKTKTLVSKLCFILENKELFCIGKKKIIALTYTNIAADTILERIMSFGISSESLWIGTIHSFCLNWIIKPNVDKIPRLCRGFSVIDEHEKEFLINELKEKHGLSANDKVFTNLDFNLCQLYSRGTKEYLVVKEYHNHLYEQKLIDFDLILNLSCRVLTKYNALCERLSLLLRCILVDEYQDTSLIQYEILRQIVLKKNTMITFIGDKEQAIYTGLGAVVKNRDELIDCFQLDNLTEMKLTGCFRSSQSIVDFYSKYKDEDYDINSLSDNKDFNSVIFKESEVDVTQLPIYISGIIRTHLAQGVLSNEIAILCPGWFDVIKLSNDIVTLNPDIEVDGVMISPIPKNNENLWLALVKLFLIKRVPSNFNTRQKLLRDFLQELNVAAPYTESLSPKKILKIINKISLSVDYNCEIDVWLREIITSFCHSINLSISIDSYYYQEMDLLINATLKRMLKYKMAYKANELHLFFNFRSGVKITTCHSTKGDEYEVVICTGLLNGKIPNWNDIINCSSEHQNYVARRLLYVVSSRAKKHLYMISERGYKTKRGYPYQTTPQL

SEQ ID NO: 62594 - protein, 600 aa, Delftia acidovorans SPH-1
MQIAKVKVEKFRGIESGIVTLSGHSVFLGDNNVGKSTLLEAIDLVLGPERLSRRPVIDEHDFHAGRYLDEEGDPVLIRIEVIVSDLSAEQQRHFRDHIEWWSATEKTLLVGPPPEGTDASDVSAALRVFFEGRYDKEEDDFTGNTFFATPVLAEGTHPTFKTTDKRKCGFLYLRTLRTGARALSLERGSLLDVILRLQDKRVTMWEDLLNELRKLPVADKPELGIAPLLKDVQDAVRRFVPSDWAEEPHMRVSDLTREALRKDLTVFMGTGAKRPDGSTYCAPYHHQGTGTINTLVLALLSIIAGLKQNVIFAMEEPEIALPPHTQKRIVNSVRETSAQALFTSHSPYVLEEFAPSEMHVLRRDGGKLSAMLATYPPAVKPKAYKAEFRARFCEALLARYVLVVEGRTEFDAIPAAARRLNDLNPTEYKTLEALGVAVIDAQTDAQVAPLGKFFRDLGKTVFAVFDKQEPAASAAIKAAVHHSFESAEKGFENVVLHHTAEAALRRYALSLVAENAWPNHLIAKTPNAAQTVEQIRDALRQFFGWAKGSGDAGDLLGCCTEAEMPQYVRDTLRVIHITVEPPPLPPVPSAAAAPFDDEEL

SEQ ID NO: 62595 - protein, 550 aa, Delftia acidovorans SPH-1
MGGPGSGKTHVALVKARDEIRSAKLLSGQRILFLSFARPTVARVLEKAKELITADDLRLLDVNTYHGFAWSVLRSHGYLLSNGKPLQLLPPPEGSARLAHFAKEQHHQEKLRLFHEEGLLHFDLFAQLTAELLRRSRRLAGIYTATYPILVVDEFQDTNADEWAMVRELGRGCRIIALADPDQRIYEFRGADPQRLKEFVDQFDPLPVEFEGENHRSAGTDIATYGSDLLTGKNKGAVYANVSVVEYGVYYGRGPHFHAKAQLIQAIKRLRKEPAWSIAVLVPSKAFMLQVSDYLSAESDGMPNLRHEVAMDAESPALAANVIATLMEGGPSELLAARLLSALHTHIRGRSGTKRPAQAELDMADAIDQYLVSGKIRGKNRQALISECARLAALRQDVVFTGHPEEDWLTARGLLATSAVGQLSRVAADAKYLRLLHKGSNLRASLSELWRSQGQYVGAIEAVRGALLQEHFTAAAKEWRGVHLMTIHKAKGKEFDEVLIYEGRYAGRIVPANADTSRQSQALLALRVAVTRAMKRATILTPSGDRSIFL

SEQ ID NO: 62596 - protein, 569 aa, Shewanella baltica OS195; identical to SEQ ID NO: 62582

SEQ ID NO: 62597 - protein, 484 aa, Shewanella baltica OS195
MIEVQIAGAGAGKTHGLAEKIIKHYDASSYKKIFAITYTNNAAKNISEAIIKQFGYLPENIIVCTVHTFLLNEIIYPYSPFVLNEIHTTSSRCKTFSNFPPGKSEEKKRRESAGTISRLKKIGVIHVDETYAAAWRIVDENYSKHSSQKKKSKVRKVHKLLSSAIDKIFLDEAQDLDETALKAFQQIGENSVDIYMVGDPKQAIDYPTSFTEWLAANKANEKVKVLPNITTSRRVPQRILDLSNTFCPKGQEQTSLSEVEGRLTYITSEDDHYDDVLCHHIENRSLVSIFRKEGNYSTKQAGSLPEFDPEVEELLTVKFPEYEEGVVIYSLQRFFASLLSKNDNNKSIRKFLAKLEIPYDKELFIKLCRSAEQFSSSKDNSAKYAISSIQRTKGLESKVCVLILTPAIFKCLMQNGVTKFNKTWNMVYVALTRAESELVVAVDMALLGRGYKHDDIVESLESIGFEVLNPNLPNHKTEEKLEEA

SEQ ID NO: 62598 - protein, 639 aa, Shewanella baltica OS195
MKLSCVRLSNFQSFGPTSTELNLENLTFLIGSNGSGKTAALQALCRMFALDPSVRRIKKSDFHVPYDEIEIPDERNLWIEADFQFSELNDEAGNTTVAPHFGHMRLDDGDGIPRVRFRLEASIGVDGDIEESFVYVHDLDKHGHPLSTAKVRRGERNLIQLHYLPARRDPAEHITFATNAILGRLLRAVNWEGEREAIKEHTEQISQDLAANTSVNALSNSIKSSWASLHKGEFFKEPKITFVASEIESLLRHLSISFTPGHDETLVDFSRLSDGQKSMLYLSLVLSSQVIGRAALNGDNSFDPDKLRPPVFTIVAVEEPENSLSPHFLGRIVSALKEMNSNGDAQALIATHAPSMLRRIEPKQIRYLRLNTSRHTTISNISLPDSETSGDAHKFVTQAVKAFPEIYFSRLVVLGEGDSEEIVLPRLMEAKGVPVDEFAITVTPLGGRHVNHFWRLLEGLNIPYVTLLDLDMSRFNGGWGRVKTCNEQLKLHNPAQQLTGDFVNIPAWDSEQYKIKNYLIYLLELEKRGIFFSYPMDLDLAMLKAFPNAFKVQAINQIEPEESTIKAVLGKSRTDASEYEEDERKLFVTYHKLFKLGSKPAVHIDALSNISNTQLLASIPPSLGRLADAVIAKLAELPE

SEQ ID NO: 62599 - protein, 556 aa, Shewanella baltica OS195
MIRHDNWKPADGLTLEPNAERAVKECEKNLALTAGPGAGKTEMLAQRADFLLRTGTCRYPKRILAISFKVDASSNLKDRVTRRSGDELSSRFDSYTFHAFAKRIIDRFRPILTGIYTLDSEYTIGSPRTPQKQIEFADLVPLATRILQSSAVARNAIRQTYTDVFLDEFQDCTDIQYEFLKIAFQSTTIRLTAVGDTKQIIMGWAGALDGIFVTYAQDFQALPLNMYRNFRSKPQLLRLQNEIIRTLDPASVMPNELIVGNEGEIRAFQFETSQREAEYLAEQIQNWIIVDNIPPNEIAILIRNQPHLYAQHLIPALRNRQIPFRNEQELQDITVEPAARLIVDFLLCTFGKREPAAWLRLMNQLIPFTDDEEEQDKYQQIWLNFIQRQRKRIRENPITIDNQSRWQSVQSFIELVGIETMTALSHDYETASRLNEVLRATFNKLDETLASGLTLLEALCQFTDDQSVRILTSHKSKGLEFDTVVLLGIENECYFGAPQENLCTFFVGVSRAKCKLLLTFAKERIRPEGFSGRWSEQRTLVNEYAGYVRPFLSNNN

SEQ ID NO: 62600 - protein, 669 aa, Anoxybacillus flavithermus WK1
MTVRRKNIVRSPYISRVKIKNFRNFRDIDISLSHKQVIIGENNVGKTNFLRAIQLILDPTLSDEDRYLTESDFFDGLENPMENGEDIEIIIEIRGYEHNKNILSVLSDATISDDPPTLRLTYRYYPIEKEDGTKDYEYIIFQGINPDNLFKHSHRKYLNMRVINAIRDVESELRNSRRSPINQLLKQYEIDKTELKEIAEKLKQRSDEVLTLDEIKDLTQKINERFKKVIGVQPDSLVSLETIDIDPNRILNTLKLMMGDKKRPTSETSLGLNNLLYIALILLLLEDRTIPTFLKKEKFEELLQKSGSNILTSSYEKNDNDNYFLKGDLSKNELKQLYSFMDMHNPINEGFTILAIEEPEAHLHPTLQRIIYRDVMVGNSSVLMTTHSPHITSVAPINSIVHMRWTNNGTQVHTTSNLSLTPTEKRDLERYLDVKRGEIYFGKGVILVEGIAEEYLIPRFAELLDKPLDQKGIVVCNINSTNFAPYVKFLDALGIPYVVITDGDYYILEEDGKTKIFHVLYDQSHENYGFLGHEIISTLLTDLQKVKRSQIPTDFQKQEDLFNKHGFFVGYYTLEVDIMVQSAENEEAKELIYQVFSELTIGGEKQKSNFKNELNAEKYFDCLRKIESSKNGIGKGRFSQRFSNMCIKDHIPVYIENAINQIYKKVDEV

SEQ ID NO: 62601 - protein, 603 aa, Anoxybacillus flavithermus WK1
MDLYNEKLNQIKSDKEQYEAYLSEDSTVVIAGPGSGKTTVLTLKILRLLKEYIRPPRGLACVTFSKAAAKEIKDRLNAFGYQQRDNVFLGTVHSFCISEIISPFAHLYNYDIPLPLRIVSEKKRKSLFKQIISDFELEHLGLSIEEMDKERTLNIEGISEVEVPTYDLALRVAIEYEKRLHTNGLVDFVDIVKYATTLIQNQEYVRKCLEAKFPWVLIDEYQDLGKPLHEMVLSLFYKTNIKIFAVGDPDQSIHGYNGAIPDYLIELYHNPSITQIQLKTNYRSNQDIIDASELALQDKRGYKAGARLGENAEFHFITCEEEMFDQYVKVAKEIIPSCREAGIPLEEIAIMVGSNKHAKELGRILDESGVPFYITKFDFQRSDVVLWLERCAIWCVDKSKQSFNELVGFWINLHKIHDRPLLSKEQILFRRRLFDTLTSSIKHIDDLGKWLTFVVNELELSSLLTDSPVYPDELENLNKLMKLTIEGEFRDYDLSKFGKLGKPGNQVTITTRHGSKGLEFEVVILLGMEEDHFPSYWNKQDEKRLSEEHRVFFVCVSRAKRVCYLLRSQKYTKKTKYGLKKFDYAPSRFWELLYARYGEKTHV

SEQ ID NO: 62602 - protein, 574 aa, Pseudomonas putida GB-1
MLITRVVLKGFRNFADATVGLERNTLIIGANNVGKTNLVYALRLLLDKSLSDAEIEPMESDFHISSAGKISDHLSITIYFSEVSEDAVLASLKGNITDDSCFVLQYTADRRSLTYQIKIGATKPSLVEIPSRYYLKHINLRYVKSRRDLEKYINSEKRQLLKLSLENRSDDESKSDHRQMARIGKALEAINGRIRNLHYVKGATDSVNEELQKLAHDFSEYEVKLDSGAIQVQQFIDSLRLGASTSGASVMLGGDGRNNQILMALWKAKSQREHDPDSEVVFYCVEEPEAHLHPHQQRKLADYLINDLPGQTFITSHSPQITARYTPSSIVHLKVTGGRTKAASNGCSNCISKAWDHLGYRMSILPAEAFFAKCVLLVEGPSEILFYSELAKKLSIDLDFYNISILSVDGIQFSVYVKILDAMEIPWVMRTDNDVSDITVKKVLQRHVAGINRCRAAAALTAEPHYPVGTTTQSLLADGTWDRISMETNPKGAYLSRIDLEHDLTEELESEVIAYACKKLKKRTLDAPSAIKYLQGKKAIRMRELLTQISNSLPVITGGHLAKPLLHAKLLAET

SEQ ID NO: 62603 - protein, 545 aa, Pseudomonas putida GB-1
MPTKITYSDAQEKAIDCLGSMVITACPGSGKTTVMVEKIRREFDSLKPHQGVIGISFTIKSSMELGEKCKRNGANIRSSFFGTIDNFCLAEIVFPFIARIYGFSAKQISCVQYNQLEDNYKADLPDLSKTNINLQTSDYDLYESEFKEHYQKGFILLEAATIIACKIIEKSEACRRYIKARYRSVYIDEYQDTSEPQHTLFCALYSLGLKAVAVGDTQQSIFAFRGSDPTYLLALTADASNFEHHVININHRSHPSIINYANRLFAPQCQLLPVEENDVQVYHRRFNGTQEDVASTLNEWIEKAARVLKIEDLSEVAILVRWNNSIERLQRNLTLPARFYKDDPLSQTVSPLGRFFSALLYFYFDKRKLVEKILEDFPLLRTTPAKLRALRKSIHDLRNLQPASLPPAFLEIAHSFRFPTDNQAELGALEKTISSPEEILHYESARPGEIQIMTLHKSKGLEFDLVVHLDLYDWVFPTRKYTGNFDEKVFPDWDQDLNLHFVGITRARKWCVLVTSTQRINSENNTKNGNASQFMTMPGITGLYR

SEQ ID NO: 62604 - protein, 691 aa, Caulobacter sp. K31
MRIKHVEIENFRLLRKVAIGLEERTTLIVGRNNSGKTSIAELFRRLLSERTLAFKLEDFSLGCHECFWTAFEAFRAGADSSDVRSHLPSITIALDIAYDVDAPDLGPLSDCIIDLNPDCTEARLVLTFGPRTTAAETLFAGIVAPGEDVAADRIALFRALGSRLPAAYASSLEAVDPNDPTNRKTLEPKTLTALIHGGFINAQRGLDDDTHRERDVLGKVVEVLFQSALTDPLDPEKRTTAEQLKAAVEQIQGDLHVGFNAKLTSLLPTFDLFGYPGLADPGLVTETSFDVDKLLNDHTKVRYVGVNGVTLPETYNGLGVRNLVYMLLQLLRFFREYQASPAAAGVHLVFIEEPEAHLHPQMQEVFIRQLDQITSAFVAQLNENRPWPVQFVVTTHSPHMANEARFESMRYFLSVADGNGLRRSVIKDLRQGMGNAPAPDREFLHQYLTLTRCDLFFADKAVLIEGTSERLLLPAMIRKTDAAAAGEAQLGSQYLTVMEVGGAYAHRFFDLLAFLELRALIITDIDTVKPNDKGKHVAALVADGQFTSNGCIKAWFEIAVSPAALLAKTSPDKTVGSRRLAYQIPETDGGPSARSFEDAFILANPERFALGDGDAAALAYEHAAEQKKSTFALEHAIEHTDWNVPRYISEGLRWLAQGNPAPLEPPLAVAVEIVAGVAGVAVNVAEVAGNG

SEQ ID NO: 62605 - protein, 588 aa, Caulobacter sp. K31
MADGAESPADAAGRVALERMFACLDEGGSFRLEAGAGAGKTYSLDKALRRLIDRRGTDLLRQRQQVGCITYTNVAKDEIISRVEAHPAVRPETVHGFCWSILQDFQSTLRALVPELPGWAERLEPVGGIGARRVHYELGYPSVGEQQVTIRHEDVLALMIQAMALPKFRAVLTARYPVLLIDEYQDTDAAFVDALKAWFLDHGEGPLIGLFGDHWQKIYGDGCGSVEHAALAVIDKNANFRSADPIVQMLNRMRPDLPQMVSDPDAPGEARVFHTNAWPGVRRTGQGGGHWTGDTSADAARAYFSHIKVRLAGEGWDFAIGKTKILMLSHSVLAREQGYASIPSIYGQFNDPWLKKDDPHIKFLTDQLEPACAAFEAQRYGNMFECFGTGMPRIRKHLDKVAWAETMTALIALRHTGSIGDVIDFIAGQPHMRLPDAVEEREKKLADAGPDPAVGESRRITQLRKLRQVAYVELIALDRFIDGHTPFATKHGVKGAEFENVLVIVGRGWNKYNFGQMLEWIDAGPPADKLEFFENNRNLFYVACSRPKVRLALLFTQILTANAMAKLTAWFGAANVVALPGQLEEVMA

SEQ ID NO: 62606 - protein, 750 aa, Cellvibrio japonicus Ueda107
MYLESLTIKNFRKFKDKNNAVHFVGSKEIAVKKDQEKQSLVAPSSTLIIGKNNTGKTTIARALNLIINKLKPKAYDFNIDYLRELLTLYETTLAENESIEELETPSIEFKLQIKVNIKKTTKPDDPKDEDDSDIVNNLYQFIPISSSTPDLIEIIVKAHMREDSAFRNEVSDVIRADYSKIDKNKIAIKKMELLCRFLNSDQNLYKTSYFTSAGVEVADPALSELIQVKEIKANRHLSEKVLSDVYQKIISSQYAANEEDKNRLIQSIKNINDEIDGSVGEKSDSISEILKEIEDSHHVGVSLTGNVSESSILKNLIKYSFRDGDDFIPEDQFGLGYVNLLNIIGEIIHYIDGYEDNSHQNRVNLLFIEEPEAFMHPQMQEFFITRIDNAVQRILELATGKKKTNSKSLHCQIVITTHSSHIVNSKIHSCNSFDNINYLTSINKFSQVIKLDDAIVCGKQNPDIDDDLKFIKKHIKYKVSELFFADAIIFVEGVTEETLSHFYLEKNKTLRNYYVSIFNINGAHGELYYPLIKALQIPCLVVTDLDIKREACEKNETNPDHKKEAECNYCGKVAGVDDHKEFKQITSLQKRITTNSTIAKFNKVALNEDTNNTKLDAINYFASDNLYVVFQKDPIQGQYATSFEEALILSNFDNDVLNSVLESCKPAIYKSIVSPKGDKNTSNLISRSFEFQRKLKNSKSEFANNLLYKIIIDEENSPKLPTYIQDGIDWLANRLTPRGDVMEENNNVAN

SEQ ID NO: 62607 - protein, 705 aa, Cellvibrio japonicus Ueda107
MLQTEIDELEVQKNINSCIDSFKSFRFNAGAGAGKTYALIQTIRYILRNKLIDLRRKNQQVICITYTNVAVREIKERLGSSEVVLISTIHDRLWSIIKPYQKELIEIHDQKLRKEIELISNELSDKDNPKLAKYASLSEQERIDLHSFLFKHRENYFLNRDKSAAEFRKSYESIPNKPMCFNDLIKSAGNFKEVAKRIYRKSRYDQCIQDIENNKKTKVDYDSAFNADRLEYMKFSHDTLLEYSQTLFDKYPMLCRLVIDKYPYFFVDEYQDSNEKVINIIKQLFTASVEIKKSWLVGYFGDTAQNIYDDGVGRKITKMHSQVLEINKIYNRRSHKKIIDIANMIRNDEIRQKPIFDERNDGTVEFYYCATSINQEEIALSFLNKYRSDLLSDEKTLKKQIDCLVLTNKLMATLSGFGDIQSNVSNAKSIYWNEINTKLLSHDLEKLHPTIHLLYKVIKLQISLTEKNSTYKDIFGTIKGGISFSRALQISEALKNIKANTLNDFIFELSKILTNSTFDATALENILQNLSVKLKDFKEEQDFYSYLKSEISVLMLGSENTSLDDADPEETKSLLNITLDQWHRWVNFIDRNEKDKEIIYHTYHGTKGEEYENVAIIMEHSFGGGHEGRDKFKNYFLKLEEIKRVMESEGKAVKTDDEFENTKNLIYVAYTRAIKNLKILYIDDIQEIQGGIKAAFGIDALILDV

SEQ ID NO: 62608 - protein, 773 aa, Shewanella woodyi ATCC 51908
MYLESLTIKNYRKFRDTDNTVCFVKPEVVDMSVEEDQPESSVIAPSTTLIIGKNNAGKTTVVNALKMLCNNEQPSASDFNLSYLNELFNQYKQDFEADQLTKFKSLATPNLEFGLRVKVDFNDEDLMTHLAPFIPISEEGNGKPVSVYIVVKVALAEESAFKEEASKIFKATGSEGQELESNQRFEKFYALLSKESSVIQTEGNLYQIVFMDLLGDATEKFSLKKLINIKEIKANRHLKEGVLSDVFNKIVAFQFANDVSSRSSLEASIESINKKISDNVGAKSTDISQVLGKVESTNKVNLNLSGNVTYEAIMKGLIKYNFMDDADFIPEDQFGLGYINLLNIIGEIIHFVDSYEENSHLSRINLLFIEEPEAFMHPQMQEFFIKRIDNAVKKAVEIANASSQDPKTLQCQIAITTHSSHIVNSKIHSSNTFNSINYLTSINKCTKAINLTDEAVVSSDDSDANKKLNFIKKHIKYKVSELFFSDAVIFVEGITEETLLNYYLENHQSLSEYYISVFNINGAHGKLYLPLAKKLSVPSLIVTDLDIKREKCEKGEKHKKDESCEACGQQPKDGEATPYVAGTPPRYLQIKSLVSRITTNTTLIDFNRTLKGKSKEVANKISNIEFFEDDNLYVVFQKDLIKGQHATSLEEALILTNYQNKIINDVIKSCKPKIYEGILNGGGKKSLRNFINHSYKLQKKLSDSKSTFSNELIFSLLSAEKGEVLPQLPNYLEDGLNWLVTKLKTNDMPSLSRVETAVDVEVESTGVTSDDVQ

SEQ ID NO: 62609 - protein, 707 aa, Shewanella woodyi ATCC 51908
MTSNEIAELDIQKSIHKHIDDFNSFRFNAGAGAGKTYALIETLKYVTINKIAATKSPQKVACITYTNVAVNEIKSRLGNSDAVKVSTIHERIWKIIKRAQPQLLICHKEKIEEVIEKNKQDLLGSPKAQFFNDLEQPEQQEFLEFAIQTKDLFYQSKKLNAAPFRHAYNTEINKPEFLDNCLRNVRNFKFVVGLLYKKQRLKVCLERIDTGEIKRVEYDSKVNSDRLHYMKFSHDTLLEYGLKLVETYPTLCRIIIDSYPYFFIDEYQDTHSNVVKFVKTIHDYAIENNKDWVVGYFGDTAQSIYDDGVGRKIEGLHDGLVNVDKIFNRRSHQQIIDVANNIRADQIVQVPIFEERNTGSVRFYYNNSEDKLTTAQQFLVEYKNELVTHNGESGDISPEDTKIHCLVLTNKLMANFNGFGDVYEVFQKSAIYYDNLNTQVLSQQLEKLHPTVLAIFHLIKLYQDILQGKVSYYDVFGTSSRNMAFSKASLIIRELGNTEVASLKNWVDLIIDRLDNSNAKEVLGKVLINRVNHFEGDVISADVFRSSLLDSINILMNEDSEDEDKAKEKNDSILELPITSLMNWANFIYGIEADDISYHTYHGTKGEEYKNVAIILEHSFGKINKDKFKNYFNVIQQNEEEKKRLLSDREVEEKHINTQNLLYVASSRAIKNLRVLYLDDISEIKEGIETIFGESKPWPIEDNHIPE

SEQ ID NO: 62610 - protein, 583 aa, Klebsiella pneumoniae 342
MYLGSLKISRFRSCDDVTVSLRPDLTVLVGENNGGKSNVVDAIRLLTLPLSGRRERYPEDEDVRRYSTVPSFQIEGAFQGLSDTLKGLLISAVPDPTKSEATYGYRYESRSEHAPRGKTTVWAGRFDTNGPELGSSELIRHVYLPPLRDAHQVLGTSSGTRVMALLRNFLPKEREQDFLAGVRRADNRPEILTTINTDISAALGLLTNGVRPQIAALDFGSETLLDVARDLRFRMADTGLIPEDIRSSGLGYSNLLYMATVVVELTKAKEADLTIFLVEEPEAHLHPQLQVLVLEFLLDQARQSASRIVEPGKPEGRIQIVVTTHSPNLTAWVSPRHLVVMRSRHREQDGIAISESVSVPIAEIGLKPKTLDKISRYLDVTRSALLFGNRAILVEGIAEALLLPVLAQKLVLADDLDGWLRFKGAVIVPIEGVDFRPYVEVLLRPYGDARIADRLIVITDADPTVLGNRKVDLENLAATHGASDALIVLTNQHTLEHEIFGAGNESFLKSVFLRLHRNSRRDWEAQIEGIPEQDRPNAFLKLIEAKKTRKGDLAQAMASRIEAGEPFVVPPYLIDAIRGASGI

SEQ ID NO: 62611 - protein, 591 aa, Klebsiella pneumoniae 342
MTGIHNLTPEQESFASHVGGAFVNACPGAGKTRTIIARLARIAATLPSRQGIAILSFTNSAVDEFRERCLAAGLDTLLKYPSFMGTLDAFVRHFVVLPSCAISSQTRPIILDSWDTLGVEIRLSGQFAFRGQPVSLDLFDPETNVIDPDRIRHAGLQNHVRQHQNRYQQVAANRRRSLLQAGYMSAGDARAQTLRLIRDNVIGESLARALVARFQEVMVDEGQDCNPLDLQILTWLRAHGVNVTFVCDPDQAIYEFRNGNPQGIQVFKDTYPIAAQKGLTGNFRSSPAICQLAATLRREGQIDRSLGESADVDYPVLLLTYGGRGPTAIIGQAFLRRIRELGLESTKAIILAHSGKVALQAAGFTSSISTGNSRIELLARKVSEFWSPAATPRTKENVIQSVEILLLDLMGVRQRNEHLVKVIERLGLDRRAHRRCALSFLINLPKTCRDSDEERLAWIACVHAEIEKLHLPLPAGVSLRRFFQQPPDAQWSKHLQVPAALSFACGNIHEVKGREYDAVCVVVPPNRAPENRIEALFESWQARVDAEAKRVLYVGLTRARNFVALAIPNAFAGRCVDLLATGQVPYTRVDL

SEQ ID NO: 62612 - protein, 689 aa, Streptococcus pneumoniae G54
MKLTKVIINNFRSFGESQIIELNNQTVLIGNNSSGKTTVLQALSKLFSDKQNDRIIKKSDFHLPKGSRPGENTRNLFIETIFEFDELDGTPYSQAIPSFFEHFTVSKDGAKPFLRIRLESSWEDDGTVEGSIDTQFYYISSDEDTIRDEDKHRAPRKDLDKIRVLYVPASRTPEKELGNASGSMLSRLVNSINWTEDEINEITDKIDELNNTFLSENGALTQINNEIQKSWELYHEDNRFSQAELIINSSEMAAALRQIALKFSPTTTEEAFTVSDLGDGLRSIFYFSLVDSILDIELEITKDREENPDNPRFKLIPPVLTILAIEEPENHIAPHHIGKLIKRFKQLGNNDNSQVILTSHSPAIVKRIDPEDLKYLRIENNDRVLQTIVSDIQLPPAIDESYKYIKGAIQAYPELYFAKLVVLGEGDSEELLLPKFFDLLGKEVDSSQISIVPLGGRHVNYFWKLLNALRIPHITLLDFDNERYGGGWGRIKYISQHLYELNTEFQEWFHTQRLDFNEIGSRGCESIGAQRLINWFNKLEEFNVYFSSPLDIDFLMLQHYKDNYLNTLSPIEGPVVSYNDSDGSSKKVKLSDLDCLDRLQLEGFNKRKEEAIRATLKDKSGHGDSFNEEEKELMIWYQYFFLGRGKPTTHMQFLSSISDDELTRNLPPVFEKIVNSAEELLGDIQHGKE

SEQ ID NO: 62613 - protein, 605 aa, Streptococcus pneumoniae G54
MVKSEEWFPKGDIILEETALGAVKDVTNCLVIAGPGAGKTELLAQKLDYLFSTNKCVSPKKILALSFKTDAASNLKERVKKRYGDEYASRFTSLTYSAFEKRILDQFRDVLPEDIRPSRDYLIEDWYTIKELLSMNGINVNGWRMSDIRRYVENIILNNGDNHKFKTDLLKGTQDNKPVLLYRQITKLSTQIIDTNEYIRKALQMTYDFVFLDEFQDTTYAQYDLLKTCFLGSSCKLTAVGDDKQAIMRWAGAKPDIFPDYIRDFNPNEYQLLMNHRSVPKLVEFQKEVHQILNSNHSSIQTNNYPEFQEGEITLFEFENESLEAKLIANDIESKIQGGIRPSEICILAKQKVGIYSFELISILNSKGIKARIENEYQDILKDPTCNLLLDLISCSQGKRDPLIWENISNFYGNINGIDELTDELILAKSYKEIDNIVSDITYLISNFIPNEESMLKLIDCIIEKIDEKRIISNFSTYNGKSDLDIIVKNFSKLLYIEYSQTQGEWLDTVSSFKGENSIPIMTIHKSKGLEYEVVYFLGLEDSAFWSFNNQPEEDKSAFFVALSRAKSHLIFTYCKLRNNSPQNNRNINEIYSLLTQSNLVDVIN

SEQ ID NO: 62614 - protein, 598 aa, Methylobacterium populi BJ001
MKIFSVVIENFRGIQSAKLVLPDHAVLIGDNNTGKSSVFEAIDLALGPDRLSRRPPVDEHDFYQGRYLPSPNPDAPDGAEPGPAPKITVEVTITNLSPEQEARFGANVEWLNTTTGDFYQEADPAGVDAAEIKAALRVTFIGEYDPDEDDFVGNSYFTRSLSEDETPASFSKKDKQHCGFLFLRSLRTGSRALSLEHGSLLDIILRLKEIRPQMWEGTIGTLAAYDVASDPAIGISGVLESIDKSLKKYVPREWGVKPHLKVSNLTREHLRKVITAFIATGAGDHAAPFFRQGTGTINMLVLAMLSQIAEDKQNVIFAMEEAETAIPPYAQKRIVHELRKLSAQSLFTSHSPYVLEEFSLHETVILARSDDGQLSQSKIELPESIKHKRYRQDFRTRFCEGLLSRRVLIAEGATEAASFPVVARRLAELNPATYASLEALGVCVIDAGSETQIADLGALYKSLGKRTFALCDKQTDAAKAAIEAQVERLFMHEEKGIEDLILNNTTQAALERFADQLDWPQHLLNQYPNPKAQAAAALGAYFKWSKGNWGIAEFLAQCSEVEIPQWLRDACTTLKAACDPPPQPAEADGEDLFADILG

SEQ ID NO: 62615 - protein, 608 aa, Methylobacterium populi BJ001
MVDLTETQKAILQAVGHQLVTGGPGSGKTTVSILKAAKIAREELKPGQRILFLSFARATVSRVLEAIDEESAITREERRRIEVDTYHSFFWRILKTHGYLVGFPRRMTILTPPNEAIALSAVRSGYKAARNLSDEEKAEKRAKEVAERVRLATEEGKVCFDLFADRVATLLHGSDKVRALISTMYPYIILDEFQDTSADQWRVVQALGANSTLIALADPEQRIFDFIGADPERLNHFTAAFAPTVHDLAGDNHRSKGTEIALFGNDILTGKFRQNDYKGIDCALFESNPNQAYASLVGQVLQARKRLIETGRSDWSLAILVPTKKMTRMVSDILREPFGNVPPISHMAAVDMEGPILAAEIIAFLLQQRGHDGCFDEFVELMCSYFHGRGGATPTKGDMDEAARFRKALSKWNECLAKGRPTPGNSVLQGTYAVHRAIAALTFTGDPGADWVAVRGVLDAGACERLKDVAKEVRNVRLLERGTQLRQGLAQDWRDVSGYSNALAITRQSFVQEHFATAHKPESGIVVMNMHKAKGKQFDEVVIFEGWPKRFKGEIVANPDRIVSGNVHDGAMTQARQNFRVSVTRARARTTIMTPRDDVCVLLRPGPA

SEQ ID NO: 62616 - protein, 586 aa, Natranaerobius thermophilus JW/NM-WN-LF
MIKIRVAKIKINNFRGIKFSELIFPEHTVFVGDNNSGKSTILEALDLTLGPERLFRTPVIDEHDFYAGEYLDNDNNPINIEIEVVIINLNEEQSRYFRNNIEWWDQDEQALINEPPPEKTDKESVQPALRVRFEGNYDSEEDDFFGRTYYASPEVEDGSMTSFTKKDKRYCGFLFLRTLRTGSRALSLENGSLLDIILRLQELKLPIWEEILKQLDQLKIAAPDSEINQILREIESSIHSFVPNEWANNPQMKVSGLTRQNLKKIITFFMGTGATRSDGSEHSAPFKYQGTGTINTMVLTLLSMIAELKQQQNVIFAMEEPEIAIPPHTQKRIIHSICSKSDQAIFTSHSPYVLEEFDPSQILVLSKSDGIITGKEATYPPRVKPKLYRDEFRRRFCESLLSRRVLIVEGKTEYDALPTVARRLQQLSPDEFKTFEELGISVINAKGDSYIAQLAEHFKNLNKQVFAICDKQSDENRQAISENVDLPLVSEEDGFENIVLKHSDEDALKRYAFMIVEEEWPPHLNNLKPNEAMTSEEIQKSLFEYFKWAKGSGSIADFLGTCSKDEIPNYIISVLNKIREFVEGES

SEQ ID NO: 62617 - protein, 575 aa, Natranaerobius thermophilus JW/NM-WN-LF
MEFSKQQQEFLKAEGNCLVLGGPGSGKTTTSLIKAKNLIKNEHLKNEQKILFLSFARATIARVEEQAGLYESDLINKSIEVNTYHGFAWNILRSHGYLLNSISPLKILPPQEACSRFSTIRDGKRRRKEKIKLFKEEGVVDFDLFAELCYELLSRSDKLLNVISSSYPYIILDEFQDTSYDEWRLINILGKRSTLVALADPDQRIYEFRGADPARISDYIKEFEPFQFDFASINNRSNGTDLIQFGNDLLSGANKSKNYRNVKIIKYDFKKGKGRHSKLKYQTLKVRDKLRKHKKNWSLAILVPTNNLMADVSNYLGSWQSFKSGNKLPGLKHHVAVSKEGTLLAAELILGIIENISLQSVNEDDIISDLVKYFRGRKGDKSPTQDELKLVSALENYLESEKIRGKNRKILIADISRIIKDSKNIELTGDPISDWHFVTEILKQSESKVFKDLIIDASNLKLLYRTSKMLSKLVELWREKNSYVGARRVFQDFILQEHFIASSNEINGIHLMTIHKSKGKEFDEVIIYEGFYQERLVRHRNNVDKARLNLRVACTRARRNTYIFTPTKDPCILIE

SEQ ID NO: 62618 - protein, 762 aa, Burkholderia phytofirmans PsJN
MHLQKLGIRNFRRLRDVVIDLAPDISIFVGANNSGKTSAGHALQLFTGKGRFTLHDFSAELWPQFVAFGEGVAGATLPTMSIDIWLHIDGTDIHRVIDLLPSLAWQGALVGMRIAYVPIDPEATKARYTEMRRRALAAVAREDGQAAAFDPAPRNMHDFLREDLNKEYELRYYVLDPARFAADMTADADYVPVALMPSESRSGREILNSLIRVDFLHAQRHLSDSPGGARAEDLSRVLSRFYERNLEQKEDDLDVLRALANSEAMLNDHLERVFEPTLRSLATLGYPGLSNPRLMIRSALDPAAIMSDRGARVHYALGDAEEQGIDPPTLPDHYNGLGFKNLIFMVVELLDLHAQWLAITDGRPLLHLVFIEEPEAHLHAQLQQAFIRKVLDILQLQGEDQRHCSSQVVVTTHSSHILYERGFRPIRYFRRSQTGNRSEILSLSSFYDRTPEGERNFLERYLKLTHCDLFFADAAVLVEGNVERLLLPQMIEIAAPKLRSTYLSILEVGGAFGHRFKPLIEFLGLTALIVTDLDSVVGPPVPDVVAGDPIEAALPVVADEVDNEARPPEENDADDEDEDEEGAGRRAGKACLPELAGAVTSNQMLIQWLPRRRTIADLFAVTPEEKIQPRGGEGTALVRVAYQYRTAVTWREETLQLAGRTLEEAFALENLPWCQANEQRDLGLRIPGAAGKDLSTLVERVHKRVKGSSFKKTDFALGLLGHQPDAWRVPTYIAEGLVWLEGEITPQEQPEEPGGLHVEEAR

SEQ ID NO: 62619 - protein, 628 aa, Burkholderia phytofirmans PsJN
MTSRIGSPDTPADIEVRECLDEQPARSFVMVAGAGSGKTTSLVKALQHLAVSRGAMLRRAGQQIACITYTEVAVAEISGDVGNASTFHVSTIHSFLWLLVRSFQADIKLWVVDRIREKIAEKAEHRDRRGTRAGTRERLIREIAELEEVRTTVARVERFTYGTGSDYAEGVLGHDDILKLGPALIVERPLLRQIIAGRFPFIFVDESQDTNPVVVSALRCVAADQPQLCVGFFGDPMQKIYTTGAGPIAREREWREITKPENFRCPTSVLRVVNAIRATGDGLEQTRGRALEVDGVLQPVTGSAQMFVLPADGNRTAGLQAVRLWLRNSTADPLWSSDNAEADVRLLVLVHRMAASRLGFANIYAALHDGAPASLKDGLDDGSAWPLRPLLQFVLPLVIAVRSGDQFKVMSLLRSACPQLETDRIQQQEIQGVLRQLQEGVDALAGLLEDGAHASILDVLRLIRDREMLRLDERFNTYLMPDPLDNGSSEFQHIVGFLACHAIELWGYRKYIEEESPFATQQGVKGAQFERVLVVLDDEEGPHSHFSYGKYFGFVPLSENDEEKIASGAESVLDRTRRLFYVCCSRAVKDLAVVMFVPDVELARNAVERTAIFPPGRVFGLEDLEGLA

SEQ ID NO: 62620 - protein, 634 aa, Ralstonia pickettii 12J
MKLQTIRLSNFQSFGEAPTEVVLEDITYLIGPNGSGKTAALQALCRLFAFDPSLRRILRSDFYVPFNEEAPPAERQLWVEADFLFPELGEDEDNSTVAPHFGHMRLDEVDGTPRVRFRLTATMGLDGDIEESLVYVLDINPDGSPLTTAQVLRSERNHIHVHYLPARRDPADHIAYGANALLGRMLRAVNWDAERSVIKGLTDQISDSLAANPSINAFSTSLKTAWGGLHKGSFFADPKLTFVASEIEALLRHMSVSFTPGHDEQLVDFSRLSDGQKSMLYLSLVLSSQAIGRAVLAAEDKSFDADKLRPPVFTVVAVEEPENSLSPHYLGRIVNALNGMTGNGDAQALIATHAPSMLRRVDPERIRYLRLTQERTSRVTHIQLPDTTDEAHKFVREAVQAFPEVYFSRLVVLGEGDSEEIVLPRLLQAKGAPVDESAVSIAPLGGRHVNHFWRLLSALQIPYLTLLDLDVARYQAGWGRIKYANNQLAAYEPSKVLPADHGIPSWNDATHKVRAYGHYNTLLEERGVYFSFPMDLDFSMLLAYPDAYGVEKEKPDESTIKAVLGKSHYDASQYNEDEQKLFGTYHRSFKLGSKPAAHIDALAKLSDADLLANMPESLGRLADAVIAKLAELPE

SEQ ID NO: 62621 - protein, 557 aa, Ralstonia pickettii 12J
MIAVDAWQPADGLTLEPNALLAAKEQVRSLALTAGPGAGKTEMLAQRADFLLRTGTCCYPKRILAISFKVDASSNLKERVKRRCGSEMAARFDSYTFHAFAKRIIDRFRPVLTGQDALDVGYKIVERKVKPSRQEIEFADLVPLAIKILRKSAMARNAVRQTYSDVFLDEFQDCTNLQYELLKLAFQGTSIRLTAVGDTKQKIMGWAGAMDGIFQAFVADFAATPLNMYRNFRSKPRLLRLQNEIVRRLDPSSVMPNEQLAGDEGEVFAWRFDDSRQEAEHLAELIDGWIKTEQLPPAEIAVLIRNQLDLYADHLMAALEARGIPYRNEQRLQDITVEPAARLIVDYLTCLYGQREPKAWIRLMNQLIPFADEEIQSNARKDLDRLIKQQRKEVVIAELVAEPFSGWWEFVRAFLKQVSIETLVSLSPDYESHGRLKEVVRDTKIRIEELLKLEPDLPEALERFSDDQAVRILTIHKSKGLEFDSVVIMAVEKEIFFGDQDENRCAFFVGVSRAKRRLVLTHADQRERPAGHTRRWDVQRTAQTEYFGYAMPFVRQE

SEQ ID NO: 62622 - protein, 603 aa, Rhizobium etli CIAT 652
MRVARIVIKNFRTFQRLDVNVENDLCCIIGENNTGKTAILRAIQICLDISLPSTLRSLLREDINANVDISIPTQVLIGVELTGFEGIVNEEALVSTWKTGTDRARIFYRFRPKPGVREQLASGAIQSGSLTLDDYAWEIRGGGNPAIDLLDLEWNEDGVGEAVRFADLQSFLVIHLPALRDVEGDLRNPRQSPLIKLIESFEIPKEEQEELIQILDEANNLIAKSKTISDVAQAIDSRFKDVSGPAFEMGAKLGLSAATFRAILRNLKLILSDTSLQEFEPGRNGLGMNNILYISILIEYLKRRIAGGNSSGQLILIEEPEAHLHPQLQYSLISALNSIGVQTVLTSHSTHVTSQVPLKTIVSLTKRGDASIAAGNLALNAKLTSGEISDLERYLDSTKSSLLYARKVMLVEGAAELFLIPALIESVHKVKLERVGISLTPIHGVHFDVYAKLFAHGSLEKKCAIVADADLIPSDATALDFNPDDSAPDLMALENDFVQVFLGATTFERELTTKGLLPMHIAAAEALGAPKIHEALSSGYAKLCSGSLQLDDEVKLRVELGGAVLNTAKRFGKARYAQVAARFADHANELPEYIQQAFEWLSE

SEQ ID NO: 62623 - protein, 594 aa, Rhizobium etli CIAT 652
MISLTEEQQSAVEVEKHLLLAACPGSGKTRVILAKLLGLADTVEKSPRFIGCITYTNAAVDEIESRLRVYGTNTSTEKCDVSTIHSFCLQHILRPYSWLVAELPPTFKVLTREIADFEQIVEAVEDHFGRATMARTFDDYESLRVDVHGEPAGDGFEHGIVTRDSAILYWEFVRARGFLDFAMILFYSLRILREHPFVARGIAARFEWLLVDEFQDTTDVQLAIFRELHRHLTTKFFMVGDHNQSIMSFAGARPDLAQEFATEIGAELDYSLTANFRSAPGVVNTAHTLIATNPRMHSEGKAKDFDAKVTYVHVSQPLNAITEHFLPMLQDEGIELGNAAVLAPWWTHLIPVARALREFDIPVFGPGARPYRRRRLLAGLAEQLGACAESEHFLGLPGVEKALFRLIGDITGATRFDVFSYAGRRTALALIYRARACATAHPGGKAWLYQIAAEIAEQLYTDGWVPAPPTALLEASADEMVRDMRANRVDLENLAISDMGLFANPEKALKLITMHNSKGREFDAVALISMNYGHLPHFSSTTQEQYDEARRLFYVGITRAKKVLLVASDFSDRRNRPCPFITEAGLMLGGSEDW

SEQ ID NO: 62624 - protein, 773 aa, Acidithiobacillus ferrooxidans ATCC 53993
MYVHSLAFKNFRRLKDARVDFADDLTIFVGANNSGKTSATHAIELFLSGGKDKFTVHDFYAGCWADFENFPAEGAIDAKVEFPAISLDAWISVDADNLYRVVELLPRAAWEGSLVGLRIEFAAKDAAQTLANFRAKATKVAKFAKTKEKDGQDYKPWPRNMRDYLSRELKNEYSLRYFILDEAQLKEETADAAYTPKEIIGDAERSGHTVINSLIKVDFLSAQRHLSDGNAQARTEDLSKRLSRVYTRNQKQREDDHNALRALALSEDQLTNHFAEVFSDTFKSLRKLGYPGLANPTLEIRAALKLERLMGDQQAKVHYLLEEATAEVEALALPDSYNGLGFKNLIYMGVELLDIHSAWSSTEEGEEDKRQPIHLIFIEEPEAHMHAQLQQAFVRKLTDLISPTGDDGYATQFVITTHSPHILYERGFQPIRYFRRSPETGAKQSSAVFNLSVFYDQNEPDRDFLQRYMKLTHCDLFFADAAILVEGNVERLVLPLMITQGAKKLSAAYLSILEVGGAFAYRFRKLIEFLGLTTLIVTDLDSVHPASPKKQEEAVAGDGAAAEAAEDAEEEDEDGGQDAEGEKKPKPRSKCPADTPGAITANQTLIQWLPGRSLIDDLLVASPGDRLRSPTVDGGAHVMVTYQCPVNATWGADTLELKSRTLEEAFAYENLAWCQKGEHREVGLFWAKSPTMSLEDLAAKIHKRVKGENFKKTNFALGLLASSDVSWVVPTYIQKGLDWLTTHVALTDETNESAAAKPEPDSDAALNADEAAK

SEQ ID NO: 62625 - protein, 629 aa, Acidithiobacillus ferrooxidans ATCC 53993
MTSRAGNPDTLADIELRSLLDNNASTGFVMISGAGSGKTTSIIKALDHLRKTRGPYLRQRAKKIACITYTEVAVGEIWGDVGNDPLFHVSTIHSFLWAAIKPFQTDIASWVDRRVDQKIADIEGEIAAFTNRTQEKTRVKAVADIERYREQKLKIVSVDRFTYGVGSDYQKGILGHDDVIRLSTELIRSQPLIATVVGQRFPFVFVDESQDTAPDVVESLKAISEALGSKFCLGFIGDPMQKIYTTGAGAIEPLPGWKRIEKPENFRCPVAVLNVINNIRAGGDGLTQTGGKTEVVGEERKPVQGTAKLLVVPKDDRSRRLAAARQWLADQHADPLWLSDEPEADVKVLVIAHRMAASRLGFGDLYGAFRDKTSEGLKDGFDDGSHWSIQPFLKFLMPLVLANGVGDQFEVMNLLRRFAPSLQREYARANAIPTILKDLDARVKALAEAYGATSTIAVFEALKLLRDGMMFRLDDRILTAMAEYNQAVPPTDSGDAAALQKLLHTPMKELWGYRTYIEEQSPFETHQGVKGAEFSRVLTVLDDEEGSHNQFSYGKLFGITPPSNTDLTNLREGNETTFDRTRRLLYVCCSRAGKDLAVVFFADDPAAAHVAITGLGLFPAEDVHNLTAF

SEQ ID NO: 62626 - protein, 648 aa, Vibrio fischeri MJ11
MYLSKLKAEGFRCFDKGFSVKLTDELNVIVGENGAGKTAVISAIRQLFQDSESGRYSVTSDDFFNPFVAGGKAATSFSICAEFDGLDVKDKVAFLPWVGSSDTALLNLQAENKEIRGRFKKVIWGGKSKSSQFDPELLDLVQCIYLPPLRDAESKLSNGRQSRLSKLLKALNRKQLKQCRKDDKLHPLEASLKSFNESLATDDKLSIKDANKLITENLTKAIGHHFGQKTSIQFAESDFTKISESLTLMFFPDLSAEDQELFRDLSQNSLGYNNLLYIASIMAELTLDEDDEEQPIFKLLLIEEPEAHLHPQLQIRLLTHLKSVAEKNKNVQVIVTTHSTVLASSVELESIIHLSRSPEPVATPLRTCGLPTASSQFINRWLDVTKSNLLFANGVILVEGIAEQMIIPTLAKIVLKEQMDGRNSLEDLGISTINLNGIYFKHFMQLYCNVSTSDDTEEETVGESIPVRCAGITDLDPPKTIKKQVPNPQKDGETVEVTQDFIPYEGNMQDGTNHAIKLVDSINKSTNARLYVSKYKTLEYDLAMEGNNAALMYEVIASLWPKPQKGESRIIQHCTALSKVDWTKKTPEDVAVAAHNILKRIDDDNIGKGLFAQVLTDKISANYATFSIPTYIKNAILWASSVNVGEEV

SEQ ID NO: 62627 - protein, 585 aa, Vibrio fischeri MJ11
MKIEFTSEQLDYINSSIEEHIFLEACPGSGKTEVVATKVAKEIDSWKKNPGGFAALSFANSATDELTSRVSKHLPNGREMFPHFLGTFDSFIYKNIVSPLSIELTGYAGEGGDASIRIIEPTAHMGYRTKYSYAKRGKVKAHHYSFDLIKDCVVFDTGDSILNRTLSSISLKDWQLDDLIATKSKMLKGGFATYRDIEYLAIKAITEKKYEHFVHLLVKRYPLIIIDECQDLSEEQLAILQVLADKGIKLHFVGDLHQAIYGFRDVEPAKVKQFVEDNNFSTLQLTRNFRSCQNIVTLCAKLTGRTGIVGNVSWLEPRCIVLQYNNCPTELTDTLEDKCDGFSNNVVVSRGHSILRKFQTSVTEPNNIQKLALAVKLFRSKDMEALNQSLQYFSEFLRYHLKESYKPNSFNSPQSITSNLSWRKFLYESLNYLICNNLQKIDIKWSDWTKIAKSLIRDLPKQSFCPEDISSILVPLEVVNLTSPSGSAKLEVALSLGATKISSFSYKKTTIHGAKGETHDVTIVVSSASAGNDSHWKSWLKDPDSEAARFAYVASSRPKEFLIWVVKTLKRPERKQLEAVGFTII

SEQ ID NO: 62628 - protein, 568 aa, Acinetobacter baumannii AB307-0294
MHISSIKVKNFRAIKDAELKLDPNQKQDLTLIVGKNNSGKTSFIMVFDKFFKKEDNFNFHDFSTHLREKIYKIDSETIEEAIIGLFLEISYSKDDNLEYLSEFIIDLNSKNNTVKLYFECLIDEERLRNDLINIDKKYKKKFIEKNITSYLIKNLYIYEKDEDIENNKQKLIKKEVSAINSLINYQVIHAKRNLASSETKEKSSLPLSKLSTEYFNKENMFSEKDFIKINNAILEMDENLNNLYDTHFEGFFENVRDFLGSTALKVLSNLESRQIMSNSSKVVQIDSEENFLPESLNGLGNLNILYLLLQIDLKKRFFIQEDRSINLLFIEEPEAHTHPQMQYIFSKKIKKIIENIPNLQTFISTHSSHIVSQCNFEDIRYFHNHNGNVKIKNFYLELEEKYKLQTELFKFLKQYITLYSAELFFAEKVIFIEGVSEKILLPYFIKNFDEKNKGKQDYIPISSQNITYIEAGANSKAFQHLLNFFEVKSLILTDIDSVGGENRSACSVDKGIASSNATINHYLNYNENDPDWFNLLKKEVLKLLIKILIYSTKQKRMDITPEVLRIHL

SEQ ID NO: 62629 - protein, 697 aa, Acinetobacter baumannii AB307-0294
MDQSIKAIESVKEIIINNQFQKDGFRNFVLQGGAGSGKTESLKEVIEFISNSYPNQKIACITHTNIAVDEIRSRIKNANLWVSTIHSFLNEQTKNFQKNLQEVLPYIFYIDNSDINDYEDYKKRYEKLSKLSYKLNNRRMDKVVGKRDYNADIINYNNILLGEIKSINSMILEVISSKDFRDIKYNETVFDSISDGTFSHDSLIKVSYFLAEKYSLFSKIISDKFDYIFIDEYQDTDKVLVDLLLKKIAINKKTTIGFFGDSMQGIYDGIGSLDDYIRDFNLIYIPKDDNYRCSQQVIDFLNIIRNDDIKQKVALKKGESLDSRQGSVKIYINKIQKVKSNGHQEDKEKYIALINDAIKKVKEKSDILNLNILQLTNKSIASELKFSKLFKVFEDRYLNLEQTQIESNLKKIQVKDVVDLIFLYKNNRHNDLILKLKKNNLKIKKLDDKINIISRLSYICDNDLGLNEALDYCYENKLLIKSPQRIDFESQSKRHFEQCDSDPVFKDLKTLLERDNLNTYNRAKQHCTYDIDQYDYDDFMSSYRKIKFSDSLLSNNLLLSEVLNYFNYIEENSNSNEKYLTMHKTKGTGIENVFVVLEEFFWSNYSFRSIYDSSYSNFKVKEKSEKLFYVACSRTIKNLMILINYETNDELELIREKFSGFEIIELNSSDTNLLITNPDVENFTLPAAIESNIQVSI

SEQ ID NO: 62630 - protein, 556 aa, Acinetobacter baumannii AB0057
MRLVIDQNLSDSARQLKLSDFWDGCDLFTKPQIEVHLDFTDFENDPDLTALLTDYRLASDPHTVRLSYIFRCKAECTGLPTSSEDFEFLIYGGDVEEKPINNQVRRRISLDLLDALRDAENQLGSWRNSPLRPLIENAMRAIDSTTLTTISADLEAANKKIVEQPQIKVLDSSLSKQILSLSGKGHDLKPSLRFSNADPLRLFRSLGMYIDEGKRSINEASLGSANVILMALKLEEFSWRKEKNERNYSLLCIEEPEAHLHPQLQRSVFKNIFNEKDSAQALIITSHSPTLAAVVPLRSIVNLRQINNSTKAFSLANLPIDEDEKDDIERYLIATRSEILFSKGIIFVEGDAEEALIPSFAELLGYDLDGFGITVCNIGGVNFKPYVKLASSLGIPFTIITDWDPLDGTKQPLGKKRTVEIWDAAGEVNLSTFRLTQEQREWCDNASYDQFSAQWAKYGIFLNDQTFEVAIAQTPNLSEILLDILDEQGFGPQRTQRIKEWRGDHTKINNENLLSMIKDIGKGRLSGKIKKRITASGTINPPAYITNAIEYMVKNV

SEQ ID NO: 62631 - protein, 593 aa, Acinetobacter baumannii AB0057
MSNYSRLKQALLELEKNEEQFAAVNCRNHCVVLAGPGSGKTKTLTTAIARTLHEEIINPRAIACITYNNECAIELEGRLSKLGIENNSQNFIGTVHSFALTQIIVPYARCLQGLLPNDFKIANKNECNLAVENAYKAIYNDGGDPHAQWEFAKEKRNREVDRTHPAWKGHNKELAEFIEEYESELRKKGLIDFDDMPLIAFKMIKENLWIRHALECRFPILFVDEYQDLGHVLHELVHLLCFDGKIRLFAVGDADQSIYGFTGANPELLQSLTERDDVETIQLRYNYRSGTRIVKASLAALDEERNYETPEGTPEGEIIFNPVKGTLEEQANFIVDKLLGELASKGLKNEQIAILYKAAWLGNKIVEALEAKKIPYHRTDSNSLIKRSSKLACFIEDCAKWITGGWKRAEPPFNKLSKQALNIVYGNNYTQAEKQILDLQLINFLQKSRFVSETANAWLIRFEKELMAHWSSICRNNIQEWEVCLDLIKKTSPQMNKDMSLELFSGKTEGTGRLILTTFHSSKGREFDAVIIFGANKGILPDKRDLKTFKSLKEVKRLFYVAVTRPKTILHLVYESKKHSEFLDEFYRRTQQS

SEQ ID NO: 62632 - protein, 615 aa, Oligotropha carboxidovorans OM5
MRVRRLKITNFRGISQGSVDFDGHTLLVGGNNIGKSTICEALDLVLGPERLFRRPVIDEHDFHCGKYLDDDGAPIEVRIEAILVDLSDEAKRRFCGHLRRWNDTACVFIDDADDALDHADAADAMWALPLLFVGRYDRDEDDFIGNTFFDHPSKDVDPLDEETEIRLGQGRVPFTRMHKRLCGFVFLRTLRTGSRALSLQRGSLLDSVLKLGGTGAVEMWQDTLARLQSLDPAIGEITQLKHIRDEIRARMGRFINLAPGDESTGFFASDLTREHLREVVRLFVAAQPGQHLVPFGRLGTGSINLLVFALLTFIAELKDKQSVIFAMEEPEIALPPHTQRRVTRFILAEMGQSIVTSHSPYVIEQFDPEQIVILNRNETGALTGQPINVDAVKPKTFRTERRQFAEAILSRAVLVVEGSTEASLFPVASSIMEASLGADAYTHLDLAGVSIFNAGGDGSVPRHGSVFSALGKLSFGFYDKPNAALTPAATEKLKEYTQFWESPEKGIETVLVKQMPVAVVRRFLDEVKDRSDYPAVGTYDPAAVDADVVALASKVLKARKGDAHGYAAMLVAQCQNADELPATIREILETIHKALSAVPEDIAAPPMDELEGLLG

SEQ ID NO: 62633 - protein, 567 aa, Oligotropha carboxidovorans OM5
MKIELCEKRKAIIAQQGHLLVLGGPGSGKTTIALFKAQKRFADLKPGQEILFLSFSRAAIRQVLLRCKEILTPAERRTVTVQTYHAFCMEMLEAHGRLLGGKPIRFLYPGDERLQKSAFEGDWSVERRRQAAEMGLYSFDLFAAGTAELFERCGALRDLIADRFPMIIVDEFQDTDDNQWRIVQALSGVTDVFCLADPEQRIFDYRDDIDPRRLEILRETTKVSEFDLGGENHRSPNAGILKFADAVLRNQAPLPATPDVKQVAYWPNAFAATAHAAVIWTFSVLRKKGVTNPSVAVLSRSNALISDLSTILSEPHTYNNQPLPVIEHDVVWDAELSAAAALVVASILEWPTSPANESLVRTLRLICAYYKLKNAEDPTKAAADHARKYDEAAGKVEKGEAPRINAAKALVTAHANGIDLIGEPVADWKAARTVLQDVPALAELFREVRLVRLFRATDALASGLGEQWLALGSYAGVSDLVKRILEQERLIAVERDPQGCVLMNMHKSKGKEFDGVVLVEGAFKSGFFNEREKPPFEPSRRLLRVGLTRARALVTIVRPQNARPLVD

SEQ ID NO: 62634 - protein, 594 aa, Rhodobacter capsulatus SB 1003
MRISRVRIANFANFSDLDVETGESIVIVGENKVGKSNFIRALQLILDPGLSERDRQLGLEHFWDGLGEDKLGEAIEISIDLTDFTNDPRLMAHLNDCVVDPGPPMVARLTYRFQPKANLGRDPESLADYEYVIFGGDDPDMAIGSSLRRMLPLDVQVALRDAEKDLSIWRNSPLRPLIEQLATSLDEDARDEIQEQVNEAQAELAGHAEVVATAQRISDRLIAIAGEQHAVPLTLGLAPTRVDALLRSLRLLIDNGARSIGDASLGTANLIFLALKSLELDRLVTDGERDHTFFVVEEPEAHLHPHVQRLVYRYFLGGAADDQEDAPPLTTILTTHSPHIASVTPIRSIVLLRYDAGEDATTAVSTATAPLTERDEADLQRYIDVSRGEIFFARGVILVEGDAERFLIPAFAEALDIPLDMLGITVCSVSGTNFTPYVKLLGPQGLNIPHVILTDRDPNGTRPPLVRRRLIEVLNLVENGVDYTPLDADAVIARAEPLGYFVNGNTLEPELFCGGLADAMQEIIEEELPINQATRDLLQGWVDDTDTLDEERLIKLIERIGKGRFAQALAPYVEEDTCPDYIRKALEYIRDALA

SEQ ID NO: 62635 - protein, 605 aa, Rhodobacter capsulatus SB 1003
MPLRSVSAAYLAQAADLASNPGQQAAYDSTGHCVVLAGPGSGKTKTLVLKLARIMAEDVRAPRGAACITYSQECARELTRRLERLGLREAPNLFIGTVHGFCLRHLLMPYGRLANLPVPFPLAVATQRQSDQAMNRVGDRLFGVGHPNKPMDLGRHRRSILDRTSEAWTDEEELAAWAEGYEAELRRTGLVDFDDLVIFGQRLVSEHDWVLPLLQAKFPVLAVDEYQDLGVALHRIVKRVAFDGGVRLFAVGDPDQSIYGFTGADGALLEELAERDDVERVQLQLNYRSATRIVSASEMALGEDRGYRSNDPDRQAVIAFLECDDGLVGQAAHAVAEIIPAALAAKPGRALGDIAILYRDYRAGDVVAEAVASAGLDFVRVDTAAPYRKVALTSWIEDCAAWCSGGWRKAQPQLRGLLDRWIGFHRARISDAQASAELQSLTRLLWSLRVEEGLARNFVAALRAGMLDALMVDEPSLADQREQVERMSAAVAVGGPLADLDLASLAGRDGSPLHLNLLTLHSAKGCEYDVVIMVGLDLGSLPWRNEAPAAQRESRRLFYVGLTRARDEIHMLYSGFVDTRFGRKYWGRSPFLNELEARMREAEGD

SEQ ID NO: 62636 - protein, 671 aa, Desulfatibacillum alkenivorans AK-01
MYLSKITIENFRCFGERDKKFEMSLKPGLTTLVGENDAGKSAIIDAIRYVLCTTDQEWLRIKENDFHVGANPKEIRIVCKFDDLEAHHQRAFIEYLTHDASGAKPPVFFLHWTAKETGEIMKGRPYRRIELHSGEKGEGPSIDPKVRELLSVTYLRPLRDAERALSAGRGSRLSQVLYHTEEVKSSGKPYGEGVANEELSVTGIGELADALIKNQPGIVETRKQIDNHLEKLTLLGNPICSKVEVSGAAASPDVRLRQLLEKLDLSLDEIGKPGLGSNNLLFMACELLLLAQENEGNRMLLIEEPEAHLHPQRQLQVMKTLQEEAEEKKIQIIVTTHSPNLASAIKLKGLTLIHENKAFSMAEGETKLEKSDYQFLERFLDVTKANLFFARGVMIVEGDAENILIPTLAKLIGRDFTENGVSIVNVGGVGLRRYARIFQRVHIEKDGLLKIPVACVTDLDVMPNCAPAIIDKLDKEGHVPEIKKRQWRMKHDYNEEKPLEQKYFSTEQKATGQCVRTFVSDEWTMEYNLAIGPQDDNGEFPGGLGYQTFAAAYLASKDDSLYTNKKTTSQWQEEIKKNYKKIILESEAQDGCLVEEVIASKIYNFFVNKKASKTIAAQHLSYILQLHVQRGDLSEDQLRAVLPTYLVEAIEYVTGNLILEIKDGKEGHDGE

SEQ ID NO: 62637 - protein, 676 aa, Desulfatibacillum alkenivorans AK-01
MENNAPFVPPEITDADIEWATELLGLPKNAFLGEDGDDPRKEVLKDMTTFDVSACPGSGKTTLLVAKLAILANKWSHRTSGICVLSHTNAARDEIEKRLGSSAVGRQLLNYPHYIGTIHGFVDQFLALPWLRSKNCPIKIIDTDICQNFRWKYVFFRTSKWSSQMQKILKEKSLRGDKILIQSSDFTLTNVKYGEKTKLYKVMKDSCVLSTEKGYFCFEEMFMWAKELMDTTPSIILTIRKRFPLSFIDEVQDNSDSQTAILQRIFTENGNSAIQQRFGDENQAIYSSPESQSAPGNILPIDEKNKKVLPNSHRFCQHIADLSGPLSMTADTCSLEGHGPKCRHISCYSEDGNHTIFLFDDNSINRVLDAFGHLLIATFSDESLRHGVFTAVGHIHKPKRDEPKPCHVQHYWPDYNPELCKKEPRPSSLLQYIHVGLGKSQRAGISHPAAEKIAEGLFRLAGMSENPTRVSRRGFCHRSVLKALENRPKAKGVYLDLLHSLVVDRNLPTRDEWKAQSPIYYKLASIIAEAPINKPEANSFLQWHEFAAIPQPDEEPTTCMDNIYRYSHDGREVPIRVGSIHSVKGETHTATLVLETYWHKHNLESIFDWICDNNAGCCKKEKRNNPRLKTHYVAMTRPTHLLCLAMKKSCFEDQEGNLNQEKIDKLTERGWKYQVV

SEQ ID NO: 62638 - protein, 601 aa, Desulfitobacterium hafniense DCB-2
MRIFCVKVSNYRNIDGITVIFHPDCNYIIGENNLGKSNFLSLIGTVCAGKGFDEKDFADPDKAIEVELDIKLLQNEQGFFGDNFSPEDASLLKIRYRQTIKEAYPTIVSVDSNESIQARLLRKINFLKYETTAVPSRELRLDSQKGAGLLINGIIERFIADGEPAFLNDEQIGGLMKFINEHLGKIRSFHDYSIKATIAPNPTEMLTSLFYLSDGYRKIDTTGSGVQYMAMASINILCQIMELYKSKSSPFGEQLYTDDDGRKLLPLVLSIDEPEVHLHPYLQRSLIGYYKKILCNEDVKFVELLKSCFGVDGLDGQLVIVTHSTDALVGDYRNLIRFHKNGDRTAVISGYALRPIEGANNEGRIKSENEKHLIMHFPEIKEAFYSKCAVLIEGETEYGCIHAFADKIGVALDDCGICVINAKGEKSIKPLRQLLTLFAIPSIAIYDGDVREGHTAAADEFFTNESCYEIEIVKSLYSQNKQDIVKQIAKELDSQYATVPLDFDFVSKHFKKMGIELYSQKTCENCGHTKKVKDASGYTPRSLADVDDNDEEDFCRMYSAWFMAKKGVLLGRIVGESLPVELIPACYSDAIKKAQEVASHV

SEQ ID NO: 62639 - protein, 602 aa, Desulfitobacterium hafniense DCB-2
MSDANLAEIKGKISSQHEGDEKQLEVIFSGSHRLIVEAPAGYGKTTTMISRIAYLFASGGIPNPKRILGLTFSVNAALKVKREVAEKLPALLGTQNSPIAISEKVTVTNYHGFCKGVIKKYGFLIADALRKDVNLFRTVSDSEIERQATLKTALSADEYEELKSVEIAVKEAHVPDSQTIQGYNEIVIKKLLPLGYITHNAVILFVLEMFDRFAEVKKFYQSYYPLIVVDEFQDTNCIAWNLLEAIISERTQLIFLGDPLQRIYGFIGALPDIMTTVADKYGMTKVALSKNYRFRNNSEMLKLDRNIRANAATCFEPNIQDDDVARVPAFWGSTQQEEARQVVAKVQGLMGDGTDKITILFRGRGRNAEIVETELADKKVPYFYGMFTDEDADYVDFHNKCQEMFIKRFGKSKNINKKALTAFSDRVKTAYASATGKTVDSLLRLLDALVEKVSIDYSDLLADDKYNLLLDIFENRQLKQAMEYVDSQVILSTVHGAKGLEWDYVVLCDVEQWVFTFLCRDCPSLRASGNSTACRLPQSIPDQMLNPLLDDLCVFYVGLTRARKQAFISASGERFNARGQRFTNGKVCCLALVQGVKLLQHT

SEQ ID NO: 62640 - protein, 623 aa, Methanosphaerula palustris E1-9c
MFLEKISISGYKNFNENFEICFSSGLNVLVGENGVGKSSIIDAIRLILSEDEYGRSGISEKDFHRPFVKDSVASNKIKIVAHFDELSDFEEIAFLPWREDKNEARLSLVIDDTQNNRGRYNRKIWGGVSQSNPYEKELVELINCIYLPPLRDAEAKLREGRGSRLARLILNLNKEEFLKAKRDGKSLKIEEKVNSFYNDIVNDKNEPIFKANELIKNSLKNAIGTVFGQDTRIQFSETNINRIIENLRLFFFPEINQNGQEFNYRSLEENSLGYNNLIYLATVLAELRPIKEVESDEPEFLKILLIEEPEAHLHPQLQIKLLKYLQKETENSNIQIIITTHSPVLASAVSIDAIIHLSFSKDRKTIATPIRKCGLPSPSKAFLTRWLDATKSTIFFAKGVILVEGIAEAMLIPELAKRVIKKYNSEYKTKLPGTLEEQGISVININGINFKHFMQLFCNINEDSQPAFSIPLRCVGITDNDPPSNSTHLEPIEGNNPILQLVNRINKSENSRIFSNLKTFEYDLALEGGNLTPMIQIFLKCLDTNGPIRKEFTDYLEVKWEDASRDTKEIVAQKLLLRIDSSKIGKGRYAQELADLLLKDCTSFEIPKYIKDAINWVCEIKNV

SEQ ID NO: 62641 - protein, 669 aa, Methanosphaerula palustris E1-9c
MSKRKEELFQQISSILCYNHHLSHDDCYLLHRYSDSPCKNYKMCRIAEKTLEQLEFIVHSLNENSYLKACPGSGKTEVVGLKTAYEIGKWQKKTRGIAVLTFTNAAVDVIIERVLQFNGSSGISHPHFIGTIDSWLYGYILSPFAHLITHYPGDNEDRSIKIIENSSQAHFLQNRKFSIFSPTFKKGGKIFANQYYMNPECDKIYFSSGNIPTDTIRNNSSLTPGLVEKLSRMKQEFWKSGYLTHQDTEIICYNLLKENIEICKLIVGRFNHIIIDEYQDMSPIKIKIFNLLENQGTVFHFVGDINQSIFNYNNVNFEKNSQLTQKRESKVFLLTKNFRSVQRIVDTCSKIVNNTEDIKGEDDKPRQDHCLVFSYKKDTIPEISNLFESYLSRNNYDVKKSAILVRNNSRKEVILGQVVSNIPKAKVPPIAIYFWSQMDIRLKIESLNLIGKYLAANLFFDKDLNYRNYHCPREIKNYQWRIFLANVLESCNKSDVIADFSKKWTDWKNNYNSIFPKILENYQTQYDWIDSSRFDKSKIKSAPNNEKDSRVIDTIGTNKPQLNSEKSIQVSTIHSAKGKEFDAILLFSSDRSSSSKEGSGYWEDWLNIKNAKGESARLAYVASSRPKFLLAWAIPEKDYKDHNKIEKLKEYGFVPAGPFRNEESLFSFN

SEQ ID NO: 62642 - protein, 674 aa, Thioalkalivibrio sulfidiphilus HL-EbGr7
MKLRHAKIKNFRLLADVQLALEDLTTVVVGRNNSGKTSLSEIIRRLLAEGSAAFQLEDFSSACYDRFCTALEAHNNGQDDDVVRALIPFIELRLTFEYDPAQPQLGPLSPFVIDLDPDCNEVLAVVRYELKDGQLAQFFSGQPDTPLTDETRIAFFRSLRERIPTSFAVRVWAEDPNDAENNRQLQPSALKALIKTGFINAQRGLDDITSRESDVLAKTVELLFATASSSSADEADKQIAQALKEAVQDIQSQIDSSFGGQLNNLIPALKNFGYPGLGNQELHTETLLDVRKLLSNFTKVRYAGYSGVTLPESYNGLGARNLIFILLQLAGFYKSFLAEPNSPGVHLVFIEEPEAHLHPQMQEVFIRQLAKTAQLLVEGTESKTAWPVQFVVSTHSSHIANEAGFESIRYFLSGEVQGAAAGVRQTRVKDLREGLDGVSEPDKKFLHQYMTLTRCDLFFSDKAILVEGLSERLLLPAIIEKLETAEPDRPKLSSQYVTTMEVGGAYAHLFFGLLRFLELPTLILTDLDSVEKPGGSACEVHKGTYSSNACLKAWFSDDNPFTLNGLLTKDESEKAKHGNCIAYQCAEEENGPCGRTFEDAFILANRALFGLNGATREELEAGARSQASKIKKSEFALKYAIEEKAWTTPKYILDGIRWLAAGIEPAIPDPIHPS

SEQ ID NO: 62643 - protein, 579 aa, Thioalkalivibrio sulfidiphilus HL-EbGr7
MPDPQSPAEVASQRALDAMFRSLDAGEHFRLEAGAGAGKTYSLIKALHYLIERHKSTFPRKNKQIACITFTNVARDEIAARTDRSPMVYCDTNHAFCWSLISGFQKQLRGLVEAMPAWQERIAEAGGGLGNRVIEYNFGHRSIREDRVSLHHDDVLPLTVSLMEHAKFRHIVTDRFPIILVDEYQDTDKDWVEAIQRLFLGNPPSPLFGFFGDHWQKIYGNGCGRLEHPQVKEIGKEANFRSVKAIVDCLNRMRPELQQFVEDPDAIGQVSVFHTNAWTGGRQTGAHWGGDLPSEVGHDTLEGVKASLTQEGWDFSPESTKVLMLTHRLLASEQGYASLPSVFRYNDSFAKKEHPYIAFFVDQLEPACDAFSANRFGAMFDALGGNTPLLRSQADKAAWHDAMSQLLAIRENGTVGEVIDHLLNRRKPRLPEAIEKRERELREFDRASGEEMPAALAEIEKLRAVRYAEIKTLRSYLDGHSPFETKHGVKGAEFENVLVVIGRGWNQYNFGEMLELAGSAAIPPGKQAAFERNRNLFYVACSRPKRRLALLFTQQLSPDAIATLERWFLPESIRAVAFS

SEQ ID NO: 62644 - protein, 685 aa, Caldicellulosiruptor bescii DSM 6725
MYIDKIKIRNFRCFGPEETVIEFDKLTALIGANSCGKTAVLHALMKIFGSDNKEIKRSDFHVPKSMDPQEIENNDLYIEVKLSFPELRQENTELNSIPSFWNYMVIREPGVLPYVRICLKSSWQKSNTPDGDIETEILFIKAPEGREKDSDYEKAKREHLSRILFVYVPAIRDVSPQLRNVSNSILWKILNSIEWEEDFKSKIREKTEEIDKLFAKNPGVSLVKEIISNTWKKYHRDYRYKEAHMRFSRGDLDTVLKKVEIEFYPTSEPKSYTVNELGDGLRSLFYLTLVNSLLEFENRILQSKHSSKSPFNKEPSTLVLLAIEEPENHVCPHLLGRIMDNLKDISSKQNAQVILTSHSASIISRIEPTEIRHLRIKNEDLCTKVSRIILPEQIDEAFKYVKEAVKAYPEIYFSRLVILGEGDSEELIIKKMIEKSGLSADSCAISIVPLGGRFVNHFWRLLQDIGINYITLLDMDIERNTGGWEKLHYIMNQLIQSGYDEKSVLADLSKEEFDNMPNWSYDEYSREKIEKFAKHLQQFDIFFSFPLDIDFSMLSTYEEAYKKLIPKKGGPRIPDKITKKEDYARYIDNVVKSVLKSDNATGITYSDNEKELMVWYKYLFLGRGKPNTHFQALIELGDSIKSNMPDVFKNLINRAKELLENDPYSDISNLGDEKYADTKGTMETC

SEQ ID NO: 62645 - protein, 641 aa, Caldicellulosiruptor bescii DSM 6725
MLIPKEQWKPADGIELEKNAEIVVKSNCNYLVIAGPGSGKTELLAQRACFLLQTGICYSPKRILAISYKKEAAKNLAERVQKRCGQKLANRFVSLTFDAFAKSLLDRFLYGLPEVYRPDVNYDINPSVLREGKRSILLRFEGKEPKHLLTGDYVDGIHSLSIENIINKKMTDKKLPFNNEPNNLEEWMINELWKLFLKGDKDFKPALTFPMISRLAEYILRENPFVLKALRATYSHVFLDEFQDITGVQYDLLKTCFLGSNAVITAVGDNKQRIMEWAGALRNSFELFEKDFNAQRINLLMNHRSAPRLVELQKVFIKEAFGEKIDLSDLKIENSKKWSKDDGICEVWIFNDYIKEAQILSENIKKWLNSEDLSHRDICVLVKQRPSKYTNMLIKTLAENSMNARDEGEVSDLLNEEIIQFIINLFSLALNINGNNSYTFVYDFIKILNGYDDDTPERFLIKLESEITELLRFANEKLLKIDNQKQIVELYKIIIRYLKMDRLISYFPQYRNTAWFNDLMNKSIKLLWNEFEITNNWSKAITNFIGINSIPIMTIHKSKGLEYDTVVFIGLEDSAFWSIKNQPEQDTCAFFVALSRAKRRVIITFSKYRDVGANPCQTAENVKKFYELLAKSGIVEYRDFM

SEQ ID NO: 62646 - protein, 688 aa, Bacillus cereus 03BB102
MYISRLTLKNFRTFKNETTVQFHEGTNVIVGHNNAGKTTIIKALELLFDANKSKRLSIDDFNKNTTCDQLKESAPKITISATLVESEKEEIYSDDLVTVSTWLTKLEKPYEAKLTYEFFLPEKELEDYYNDIRKIEGTNINDYWNEIKNNYLRKYVHKIYVGNIENKNLIDTDSINKFAFQFLTAIRDVERDLFTGSNTLLKEVIDFFIDYEIKTDISITDEEKKIKIREKKELFSKGAQSLIQSLQDRMREGKKHMLQYVENTGAAFDKMQPSFEGGILDTELYSALKLIVENETGIKLPAVNNGLGYNNLIYISLLLAKMQKDASGEYLGTNAKVYSILAIEEPEAHLHPNMQYKFLKFLKQNRETEVRQIFITSHSPSITAAVDLDDIIVLYKNKEETKVAYPGKVFNESPDDIKSKKYVKRFIDVTKADIFFARNLIFVEGLAEQLVIPEFATALGYDLTDTHTSVINIGGRYFEHFLKLFDTSKNPNAIEKRIACITDLDPVRKEKGRKGAKWVTCSVLALNNDIEKYDYNSCSNLFVNKSKSNSSNHIKTFTQKENESCTFEYDLILHNITCEKLITDSTSNQEEIRDLMLAYKEDKSINDMLEYIKNKEYKAKKEIELQNTPILDDDKKKHIIADRYLMSISKGELAQELAHEISIMEPSDNMIVCPIYIKEAIKWICQPQ

SEQ ID NO: 62647 - protein, 571 aa, Bacillus cereus 03BB102
MDLSTAIKLKSSNDKIQIDNHFKLCAGPGAGKTSFLINHINSILSHSTRLSKSRRVACITYTNTGVETILSRLNNMTNEIEVSTIHSFLYNHIVKPYLWLLDDIIFPLDKLDGHDDIKPGYTLLKTYKEKSNQNWITDNQKLSKALNKLTWYINEQDVIELKFLKSYHGKLSEKTSVKRDSYMLYKELCWEQGLLSHDDVLYFSYLLIKRNKKIREIIRAKFPYFLIDEFQDTSPLQVAIIKLLAKKEMVVGVIGDPCQSIFSFQGANVSTFSQFYLENMSLYVLENNHRSTEQIISVLNYVRKDEHFVQHSPDNKLGNNPTILVGDALTCYYQFKQDCNDEEWCVLAYRNETTNGIEFGIEDLLLDDINDLLYKDGKRGKMIYFLIHGIEYGRQLKLKEALKFIKKAYKDEKGFMEKDAIKVLKNLLNEYEVFNSMSIKEFYNTYIFNQYGVKKQIKSGNISDFYQNLKYINMAALVNVADDASLFKTIHKSKGDEFDNILLIIPESKYPTFLTFLLSPDMNKEEHRVYYVALSRAKKNLYVNLPKLSEEEMKLIKNFDKKILSKELVIN

SEQ ID NO: 62648 - protein, 615 aa, Acidobacterium capsulatum ATCC 51196
MRVRRLKITHFRGVAEGSVDFTGHTLLVGGNNIGKSTICEALDLVLGPERLFRRPVVDEHDFHCGRYLDKDGNPIEIRIEATLIDLSDEAHRRFRGHARRWDDKKCSFVDEEPEGVDKADNDGVIWALPLIFIGRYDKDEDDFIGNTFFDHPTGEADALDDELENKLGSGRVPFTRAHKRLCGFVFLRTLRTGSRALSLQRGSLLDSVLRLGGSGSVEMWQDTLGRLQALDPAIGDIAQLKQIRDEIRARMGRFVNLADGDESTGFFASDLTREHVREVVRLFIAAQPGKHLVPFARLGTGSINLLVFALLTFIAELKDRQSVIFAMEEPEIALPPHTQRRVTRFVLAEMGQSIVTSHSPYVIEQFEPTQIVILDRDHDGQLTGKPIDQTAIKPKSFRVERRQFAEAILSRAVLVVEGSTEASLFPVASTVLEENLPSDDYMHLDLAGVTIFNAGGDGAVPRYGATFSALGKLSFGFYDKPNSPLTDDAVKNLANYTQYWESPKKGIEALLLDEMPIVVVRRFLEAVKDRSDYPGEPKYQEAMDEPTALSLALKVLKARKGDAYGYAALLVGHCATAEELPKTIREILTTIHDKLQAVPEDLDAPSLLAPEASAE

SEQ ID NO: 62649 - protein, 566 aa, Acidobacterium capsulatum ATCC 51196
MCDQRKAIIAEPGHLLVLGGPGSGKTTVALFKAKQRFSTLKPSQEILFLSFSRAAIRQVLLRCKEILKPAERRAVAVQTYHSFCMDMLRAHGRLLLGHPVRFMYPGDERLQKAAFEGDWEAERQRQAKEMGIFCFDLFAQGAAELLERCAALRKLIGDSFPMIIVDEFQDTDDNQWRIVAQLAKVADIFCLADPDQRIFDYRDDIDPLRIEGLRTTLAPREFDLGGENHRSPNAGILNFANAVLHNQSPLPDTSDIMQLRYWPRAFASTVHACVVFTFSELRKLGVENPSVAVLSRSNGLISDVSAILAEKHAYNGRELPIVEHDVVWDAELSAAAAVVVASTLEWPTAAAEVAVARTLALIAAYYKLKNAEEPTKSAAEAAQKYEAAASKVASEETPRIKAAKELLAAHQSGIQMVGDPVADWKSARRVLQEISALGELYREVRLVRLFRATDALASGLSNRWLATGSYEGVSDLVKGILEQEKLIAVERDPRGCILMNIHKSKGKEFDGVVLIEGAFKSHFFDERKEVSPYERSRRLLRVGLTRARHRVTILRPQGARPLVDPI

SEQ ID NO: 62650 - protein, 767 aa, Burkholderia glumae BGR1
MPAPAALSSGSITLRYVELCKFRRLGKVQLDLDPQTTILVGANNSGKTAILTALRHFLAESSPFGAFDISLSEWPTLRALGVRWEALTEDPVTAAPNEGDNWEDQLATLLAAMPTLDLWFDAEAGMFHYVHPFLSKLVWKGGAVGVRLRLEPASDVASLKELAWSYNLARQPVKGMSSESLAWPIDLLDYWLREPKKLGQVRPYSLDAANNPIQGIKTYRTQALASDAQPADRKHLAKLIRVDFVAAQRGLGSEEADSKSTSSSHPVGLFSNQLLKFARQHLNVAVTGHGQRADLIQAVANAQKDLDQKIHDALASSVAEVKLLGYPGLHDPQEIRFRTRIHTADLLDHSTAVQYSMKGGTGEDMLPEFSIGLGYQNLQSLSYQLVSFKTARMNPEKGSPPPVHLVMIEEPEAHLHVQVQRIFPDKAHKLISPTDKDASALQSQLLISTHSSHLAHAEDFDRLRYVRRIPPSAVHPTPSTEVVDLGEVFGDDNETRQFAERYFRVQHTDLLFANAALFVEGVAERMLVPLFMELKYDRLNSRCVSLLDIGGSHAHRLRPLVEKLQIPTVVITDLDPTEKKAGPKGKMRWMATANTGQAGLRCGNATLREWHPRLQNVDDFKAPTPAQLIWIGAHDCKVRFAWQLPVAEAGNQWPTTFEDSLILTNIDWFKGLNKLAEEAAGQGEERKVKLPTGALADAADVVAGAATHADLLNALHALMRDSFSKGDFAASIFERVAAGENVTCPKYIADALTWLQDELDPTESVMP

SEQ ID NO: 62651 - protein, 652 aa, Burkholderia glumae BGR1
MTCAAAHEGNDRDAGVVEEICGYLTEPPPRSFFLFAGAGSGKTRTLVEVLRRLTGVVPHERGGRLANRLRLYGRSIRVVTYTKNAVAIIGGRLGSNDLVAVSTIHSFCWELIGGFDEDIRAALIADKAVQLEDAKTKAAAKVRGISDTDRRKFAEIEAEIEALRGVPTFIYHPDKDTYGEGAMQHGQVLDATAWLLSNRPTLRTILQDRHPIILIDESQDTMKSVLDVLMKLAEPRGSGLTLGLLGDHRQRIYMDGHSNLPGLVPPGWAKPELKMNHRSQQRVVQFINKIWAANLAGRTQPASGIEQHHRTEKTGGTVRLFVGRTSLSTPEKRQKEAWVASQMQQATQSDAWTTPAGYQSLALEHKLVAARGDFLNVYTAVTLIDPNAAAPSGRGENTGPSAARLVLQDLAQLAVCVAADGAVDDFTATEVLRRTGCLDQLPSDANQRIARTEEMHEALAAFGAACVKPDATVAEVVAPIIKAQVFKVDARLLQQFADPTPPPAAPIPRKETETDDARRRRGWCGLFRAPWAELERYRRYLAGNSELATHQVVKGSEFTHVMVVMDDDQSGGNQISYDKLFGATELGERDWDNVRAGKETTIDRSLRLLYVTCSRARESLALVLWAENPTEALKFARERSGWFATEEVVEIA

SEQ ID NO: 62652 - protein, 629 aa, Methylobacterium extorquens AM1
MTAFVGNNGSGKTAVLAALGRLFGVSPSQRSVRKGDFHVAKDRDGVERDAKLVIDCVLGFPDAGEEGLDAGVPEVFGHMAVAGPGEPMKLRIRLEATWSDDLTSEGVVEEDIRWVPAIAEDYVWETCQRIAPLERGLIQLIYVPASRNAADPVTSLLKGRLWRAARWSEEMTGSASEAGTALQALFDREAPSRFIAERLERRWDEVHRGDTTARPVLRLVENQLEDLVRQAEFVFLPDETGHARHLHELSDGQRSLFHIALTAATLEIERDAFAAPAGDGPFERDRLRRTYLTLLAIEEPENSLSPFFLARIMSQARDIGGMVGAQVIVSSHSPSILGRVDPEEVRYARMAPETRTSSIRSLSLPSDDVDAAKFVRLAVKAYPELYFARFVILAEGESEAIVLPRIARAMGVEFDRSFVPIVPLGGRFVKHFWKLLNDLDIPHATLLDLDLGRQHGGAKAIEYIVGELEGVDRNLADSFLIEIGLVDPAAVAAIDEAGLVAEGSRHDWLQALSELDVFFSWPVDLDFAMLMAFPDAYMRVERPRRGPRRSPEAVSTKRNVTLKTDGKPALYEGQARFDAAFVWYPYLFLGESKPVAHLYALGSMEDAAVAAAAPPELRRLVEHVRGHLA

SEQ ID NO: 62653 - protein, 615 aa, Methylobacterium extorquens AM1
MATVRPEDWRPQGIDDLEDRAWTALRETGRSVAITAGAGAGKTEILAQKAAYLLQTGICPSPRRILAISFKRDAAATLGDRVRLRVPEAQARRFVSLTCDAWTKGMLDQFRRALPALYVPPSDYGIALPDRDEIRSFLDRVGSRLNRDQFETLLAETAIPLGEQGLDDAVLATLRAYWSQQYGAVPGPMLTLPMINRLVEYVLRTNPRIREALRATYPFVFLDEFQDTTSAQFGLVTTAFDPIGTRVTTVGDVKQRIMGFAGAMPDGFATFRRLFDAREVTLLFNWRSHEELVAVQRVVASQIDPATEPVRARRAKSVDGAHCAIWSFPDRTAEIDAIAGWVASELAEGRLEPQRLAILVRFYANQVEGELRPAFEAHGIRLRNVARSVGGVAIQDLLTEELTILLLPLLRLGTSRHEPGAWTAALRTVGLVRAIRDDDERRLGHVMRDVEALAVALRRLMTDTPPDPALARDLVAMMLEGVGEASVRQATAAYHRETDFLRIRSGFTALLGECLAQASSWSDALDRFEGKGQVPLMTIHKSKGMEFHTMIFFGLDDRSWKGLHRGEAEELNSFFVALTRAEQRAFFTCCTQRGGPIGWLETLLGDAVPKVPGGP

SEQ ID NO: 62654 - protein, 650 aa, Tolumonas auensis DSM 9187
MYLSNLKIQGFRCFDKDFNVQLTNGLNVIVGENGAGKTAIISAIRQLFHDSESGRYSITSDDFYSPFIAGGLAATSFSIGAEFDGLDVMDKVALLPWVGASNTALLNIQAENREIRGQFKRVIWGGKSKSSQFDPELLDLIQCIYLPPLRDAESKLSNGRQSRLSKLLKALNRKKLKQCRIKGELHPLEESVKEFNESLAADDKLSIKDANKLITENLTKAIGHHFGQQTSIQFAESDFTKIAESLTLMFFPDLSVEGVVSFRELSQNSLGYNNLLYIASILAELTLDDEDEYEDQPLFKLLLIEEPEAHLHPQLQIRLLNHLKKVAEENKNVQVVVTTHSTVLASSVEIEAIIHLSKSPVPVATPLRTCGLTPDSSKFINRWLDVTKSNLLFASGVILVEGIAEQMLIPILAKIVLEDQKEGGKSLEDLGISVINLNGIYFKHFMQLYCDIESADDSEGKTITENLPIRCAGLTDLDPPKKVTRQVPDSDKEGETREIIEDLIPYDGNMGKGTNHAIELVDSINKSANARLYVSKYKTLEYDLAMEGNNAALMSEIIASLWPKPTKMESPVIVEFTAMSKEDWTKKEPLEVAEAAHKILKKIDDDKIGKGLFAQVLTDKIQSNGFNFSVPKYIKHAILWASLLDMVKEE

SEQ ID NO: 62655 - protein, 585 aa, Tolumonas auensis DSM 9187
MAPEFTNEQLDYVNSSIEEHTFLEACPGSGKTEVVAAKVAKEIGSWKNNPGGLAALSFANSATDELTIRVSKYIPYGRGIFPHFLGTFDSFIYKNIVSPLSIELTGYLGENSDASIRIVEPSANLGYRTKYSFARRGQVHAHHYSFNLINGSVVFDTGEPELDRVFNSTVLKDWEYQHLVETKNKMLKGGFATYRDIETLAVDALSQDKYQHFVNLLVKRYPLIIIDECQDLSEEQLTILQILADKGTKLHFVGDLHQAIYGFRDVEPAKVKKFVNDNYFNKLQLTRNFRSCQNIVNLCAKLTGRVGIVGDVSWLKPRCIIVQYNSCPTELTDIFKELCNGFHNNVVVSRGHSILRKFQTSVDQPNNIQKLALAVKLYDPKDMEFLNQSLQYFSEFLRYHLKESYKPSSFNCPQSIDSNLLWRKFLSDSLNYLIRNNLQKMDITWSNWTTTAKLLIRSLPKQCFCPEGIVSVLASLEAVNLASPSGSAKFEVASSLGTAKTPSLSYRKSTIHGAKGETHDITIVVSSDRAGKDSHWKSWLNDPDSEAARFAYVASSRPKEFLIWAVKKLKPLEKKQLEAVGFKII

SEQ ID NO: 62656 - protein, 595 aa, Tolumonas auensis DSM 9187
MRISRVRLINFANFSDVDIKTGDSIVIVGENKVGKSNFIRGLQLILDPGLSERDRQLSIEHFWDGLVEDKIGKIIEVSVDLTDFTDNPRLMAHLNDCVIDPGPPMTARLTYRFQPKAGLGRAPESLKDYEYVIFGGNDPEMHVGSAFRRMLPIDVQVALRDAEKDLASWRNSPLRPLIEDLAESLDEDAREEIQNQVDDAQRELAGHAQVVATANRISERLISIAGEQHAVPVSLGLAPTRVDALLRSLRLLIDNGIRGVGDASLGTANLIFLALKSLELDRLVSDGERDHTFFVVEEPEAHLHPHVQRLVYRYFLGTGGDENEEDAPLTTILTTHSPHIASVTPIRSIVLLRHDVGAGKTVAVSTANAPFTQRDEEDLQRYIDVTRGEIFFSRGVILVEGDAERFLVPAFAEALDIHLDMLGITVCSVGGTNFTPYVKLLGPEGLDIPHVILTDYDPVNGKAPLVRRRLINLLDVVEDEYDHSEMETDDVIELAEEFGYFVNENTLETELFAGGLAESMRDVIQQELPQLRQATREALQQWVDDLDQVDEERLLKLIERIGKGRFAQALARSVSEDTCPHYIRSALEHIRNAVA

SEQ ID NO: 62657 - protein, 604 aa, Tolumonas auensis DSM 9187
MPSRSFSTAYLAQAAELAGNPGQLAAYNSQGHCVVLAGPGSGKTKTLVLKLARILAEDVQAPRGAACITYSQECARELTRRLEMLGLREAPNLFIGTVHGFCLRHLLMPYGRLADLPIQFPLSVASQRVSDRLIRQSGDELFGANHPYKAIDLGRHRRSVLNRNSVAWRSEEELAAWAEAYEAALRQGGLIDYDDMVVYGQRLIAEHDWVLPLVQAKFPVLAVDEYQDLGVALHRIVKRLAFDGGVRLFAVGDADQSIYGFTGADGALLMELAEREDIEPVRLQLNYRSGAGIVSASEMALGEDRGYRANDPTRQATIEFVLCPDGLADQAAHAVAQIIPVALDSKPGRTLGDIAILYTDYRAGDIVAKAVAAGGFDYIRVDTAAPYRKVALTSWVEDCAAWCAGGWRIARPQLRGLIDRYLAFHRANLDDAQARREGQELTALLWALRADQQSARDFVASLRNGILDRLLVAESSLADQKEQLDRMTAALAEGGALATLDIASLGGRDGSPDHLNLLTLHSAKGCEYDVVIMVGLDYGSLPWRKLSPEKLRESRRLFYVGLTRARDEVHMLYSGFVEGRYGPMRHGRSPFLDELEARMRAANL

SEQ ID NO: 62658 - protein, 763 aa, Rhizobium leguminosarum bv. trifolii WSM1325
MRIKFVEVSNFRKLKSTHIDFDKKTTIFVGANNSGKTSAMVALRYFLLSPNRLALRDITIANWTKIDALGDAWETEAETDINLDDLLPALDVWLDVPLSEIQHVVHILPTLDWSGGLLGVRLKYHIEDIGSLKAEYLLQRNAAQAAVTKGLGGEAVKIDIWPKSLTDFLERRLRAHIGIEAFALDPSAVVAPAKGLAAPQILPTTALPLDKAPFKNLIKIDEIAAQRDFADSHEKSQSGDEGSESSTRRFKRRLSDQLRSYYDRHLDPAKTPSEQDYEALGAIQTAERNFDKRLEVGFAAAFGELEELGYPGMANPKLKISTLLQAIDGLKHGSAVQYQVADPSGDGTKTLKLPEDYSGLGYQNLIAMVFMLMGYRDEWMRVGKASFDSGGGAQEQIQPLHLVLVEEPEAHLHAQVQQVFINKAYKLLRKHDRLGDKTTHCTQLVVSTHSSHVAHEADFANLRYFRRRPAPSMGDTPTTTVANLSYIFGEGDETRRFVRRYLKATHCDLFFADGIIFVEGQAERILVPHFIRHQFPDLSRRYVTLLELGGSHAHSFRELVDELGLATLIIADLDATVATKVPIKGGGEAIRWKAAKPKRGAEQKSANQVLKEWHPSKVLIDELIALDPADHQSSGSDGYELYVAYQKPVSVLAPDGKTQEVIPRTFEDALILENLTVVADVEGSTTSAKIKAIVNDNPNGEELEDELFELLKTAEKAAFALDCLMLSDPTALKPPQYIRRGLEWFERAVGKDIAASEPKGASA

SEQ ID NO: 62659 - protein, 639 aa, Rhizobium leguminosarum bv. trifolii WSM1325
MSPLAIKRGAPDTDRDADLAISACLNPNDPKSFFLYAGAGSGKTRSLKEALDGFRDRHGDEFRRAGKKVAVITYTNAAADEIAARVGQDTLFPISTIHSFCWSHIGTYYTDIQAWLLATLPNDLADLREKQSKGRAGTKAADDRERAIAATIKRLGWLSVPRRFTYSPNGDNFGADSLSHSEVLKITATFILAKPAMQAVLVNRFPFLLIDESQDTNKILIDAFFALAATNRGKFALGLFGDTMQRIYADGLPDLGRNIPPEWARPVKRMNHRSPQRIVQLGNSLRSAVDNQIQLARDDSMVGTVRLFIIAADATDKPDKERKARERMAELCGDAGWKEDATVKTLTLEHHMAASRRGFAPMFQALDKDSRLSTGLRTGELAGLRLFTERVAPLLAASTAGEEFAVMAHLRKNSPLLKRSVLANSTTPDDPLLPARVAVGALLALDPENPSTRLLDILECVAEHRLFEIPAAMRPFIETEPAPVAPETTVQNLEDNEAEEEAETSPSSLQAWRAFLETPYNQIAPYAEYISNRGPFGTHQGVKGLQFDRVLVILDDSEARGFLFSYEKLFGAKPLSDQDRKNAAEGADTGIDRTRRLLYVTCTRAEKSLALVAYTESPDTLAAAVIKQGWFSADELERL

SEQ ID NO: 62660 - protein, 553 aa, Ralstonia pickettii 12D
MLTLNVLVGPNNAGKTAVVDALRVLLSAGDEGALRVSSYDLHVTDAGAQSAQATFSYVFAGLSKSEEADFLTALKPTTNAKGETEYEAHLTVRYSNPDDSGRLRVRRWCGDHEDNPIASEMLEDLRAVYLPPLRDPAQGLRPSRSSQLARLVQRLSDDASRQEVVETLTKLDTELRAKKPITDTQAAITKRHTDMLGKVLSQKLAVGLSPSDFQRVAARLALAVADFDVEQNGLGFNNLIYMAVVLSELSLNKEAAYRALIVEEPEAHLHPQLQAVLLQYLKSVETPAVNENPVQVFVTSHSPNFAALADIDSISCIYEASEAVGCLAPREIAFEKRKKEKLQRYLNVTRAEIFFARRIILVEGTAELFLVEAMAHKLGIDLRKHSVSVISTDGLNFDAFLPLFGETALKVPVAVVTDGDPTGIYPQPGEHHEPSATAKSIQAQSDTFVRPFLAAKTLEYDLAMTATNRATMLEALKDLHPGIAKDLAADVEAAKDEDKAKVLFKGMFERGEGKANVQKGAYGQALAQAIVSDGLDIEVPDYLADALNFITAE

SEQ ID NO: 62661 - protein, 573 aa, Ralstonia pickettii 12D
MGFIATPEQEAIIGGDLVPQCVIACPGSGKTVTAVRRLVEVRRRLGDSHGYVALFSYSNVAVDTFKQEFGTLLRTLPGLSQRVLIGTVDSFLTTYVLRPHGARTMGASRSPFLVHGTEPFLRGFTVFDGKYPHPISELRVQFKSDGTLEYLLQAAGKPPVPVEAWKAQDVIEKLGKAGAYTHELGRYWALRALAEKDWLLQALCYRFPHILVDEAQDVGPLHGALLDALAGGGSTVSLIGDPNQGIYEFAGADGSFLREYGTKPKVVNFSLSQNRRSVNSIVNVANHLAGAGCTPIREPGPRRHGAFHLPYDEDKLDDLMATFAGILEANQYDKEDAVVVCRGNSTVQRLTGGQSDIGVGATGLFARAAIFRDRGGDIAEAFRCVVDAFVRLIENAPNDFKQDVLTSTAEGSARQARRLLWEFLRSPAEGLPAATLQAKSTWHPQLKARVEALLEAVESQTDIARSQNWGRNLTIKDLPDKPLWETDLVAAGGAGIRVDTVHQVKGEGVTAVLYLARTADINKLVEGTTTEDGRIGYVAVTRARDLLLLAVPNTAKKALLQAIESKGFEAWVE

SEQ ID NO: 62662 - protein, 677 aa, Ralstonia pickettii 12D
MKLSEIAIMNFRLLQYARMRLDTTGITTILVGPNNSGKTSAIEAMLTFLQRPIKQLSINDFSLGCRDALKKFEQHVLAPPAAAAPAGGEAAVAAPPPLPDLPVLSLRLKFDYDDTGPDLAIAGELLMDLEDASASVMVEIRFAPANPEQLAQAYLKDRDDDQSLFDYLAATLHDHYKLDQFKLSPDGSEAERLPDRGILQRLIRIDVVSAQRHIDDREEGSKATRLSTLLHTHYERRYKVDAPNDFKALEKTLRDQSTILGPQYVKAFDGLMKGLAKFGHPESPKLTVRAELSADGLFKDTTRVYYSAASATTPPAEGPAAALDQAFELPERYNGLGFKNLIYIVLCLKSFREDVESDLEHRPRVHLVVVEEPEVHMHPQMQAVFVQKVSEFLTPAAGETGVQLLLTTHSSHMAANCGFAPIRYFRRNKGTVEIKDLLSFECSATTDPEKAAMEFLRKYLTTTRCDMFFADKLVFIEGQVERMLLPRLIAALDIALRDKLTSTYVCTVEVGGAYAHLFRKLIEFLQLPALVITDLDSIDGTTKKKAPVANGHVSSNATLSQWLPGSSDLPVLMAAGEAQKTSGRVRVAYQVPEAVGQPCARSFEEAFVYANAAWLTANKAKMLATGETFTHADAAALTADAYNVSLPKVDFALDLLANEGWATPMYIREGLEWLAKQ

SEQ ID NO: 62663 - protein, 585 aa, Ralstonia pickettii 12D
MVGEAVAAAAPEKTADERIAECLAEGRSFVLDAGAGAGKTYSLVEGLKKLCAPTVADRLRRDGQQIACITYTNVAKDQVIDRIQGNSLVRVSTIHDFLWSTLQPHQQALRQALLDFNAALPTGSSRRVDQAELAARVAARLEVKYSDRGSKFLEGRIYHDDLLSIARIAYTRYDKLARIVASRYPYIFIDEYQDTSEAVIDILLCRMLPLAGNKLVLGFFGDKMQNIYHHGEHKGIGELPAELAAPLEVIVKRENRRCSLRVMDVLNNIRTDITQIPGSNNAQGDVAYIRVAAGADEAGLQRARDLLTDTLNWDLASQGTRELYLTHRLIARKAGFADLLQAFTDRGSFAKDALTDGSDRRIAFFLEKVEPLALAWEKGQIGETLGRLHGAGHRLASRTAKSGVRDALNALTAKRAAGTVREVLETIRDRQLFPLTDDLALRLVNTQPILTAEMDDAAKEREQLEATLYGAFFALPYQQVAAFARFFMTSTPFATKHGVKGDEFDTVLVVLDDSGAAWTFYSFDKYLSGADETAKPERAKRSRNVFYVCCSRARQRLAVIDLTGASAAKDERMRTLFGLDRCYEV

SEQ ID NO: 62664 - protein, 677 aa, Ralstonia pickettii 12D; identical to SEQ ID NO: 62662

SEQ ID NO: 62665 - protein, 585 aa, Ralstonia pickettii 12D; identical to SEQ ID NO: 62663

SEQ ID NO: 62666 - protein, 570 aa, Zunongwangia profunda SM-A87
MLDISDFNYETILELKKAILDTSIEPKNISYPKIVIKATLKDWDLKQEAVITDWMSNSDFTEATLTYTFAPISSFDKIEEITLQRQFLQDYEKEIGPEEFKKIPQSEILILINFPISKYHYRIHGGNQNESLANAYHLNQLKFELLDALRDAKSELSASRNNGLLFRVLNANEETDYQDLKKRLVGLQRAIEQNVAISGIKNRISEQLDKISLSTETSNNVVDLIFSLPNVSDLLRKLSLIYNDNPIKIERNGTGRNNLLFISLILSFIEDPERAQSTFFRIVGLEEPEAHLHANLQNHLASNLEGLIKKEDGTYRKDIQLILTSHSNHITTKIDFDNTVVLHYKNGNVQAHYILDGFGTTAEEKRQVNYLKKYLDSENVNLFYSRRLALVEGISEKLLFPLFYKIQTGETIDQSATAVVNVNGLAFKNFLQIIVNGFHTKCLVLTDSDIGTQSENRAQELKNKYDGVNEIDIQISQLSTFEKDLINCNKSGSGKTILCKVIPIVRPNAGKKYVEELGTNDIDIEEYFALIEDYKSEFALQLSLSLTEDQSGFSIPKYIEDGIKFLDPLM

SEQ ID NO: 62667 - protein, 521 aa, Zunongwangia profunda SM-A87
MVNVGKPKLVIAGPGAGKTHGMVDEIIQALKLLERHRYMIVVTYTNSATKNIKKRLGKKIAIPPNLFIGTIHSFLNKFIVIPYSSLHNDDVNGEKLFIQCGTDDVLKRMFDNSGETPDYKAKNYIKSRLTTSLHKNGYITYDQTLSLAEKAITNKRIKEMLSNRIQFLYVDEFQDTGNKMFSIIESLRKEKKTIIYCVGDPEQYIQSFDSSIKNFQNIPILKASRMNQYETELNKTNRRSVKTIVTFLNNFSKRVYQDNTFEQHCHNEIPGTPVKFINATQNITSMLPEFFARCEKENIPHKERGIIAKKNDVVKKAIAALNGNVLAPDKSAKISAVSEIKDTLLSSLGTNQSAFCEAHGLTPFDLRIMAVQIIRAIRSEMITNENSFAIFVKDTFGYIIKNDIPFKLENLRQIIVSNTNAEAIMVSNIHRFKGLELDAILAVAKNEAELNLWLETSTDFRDAHSDRGTSDYPRLGYVAFSRARKVLCIACLESISDNTKQKLNNLGVEIDTPTLQFPSLI

SEQ ID NO: 62668 - protein, 643 aa, Zunongwangia profunda SM-A87
MYLAKLTIENFRGIKKMILEFQKRINILIGENGSNKSAVIDAIRLLYNMGEQLRDLSVGFSDFHESVTTNTDGSITIDRSSKIKISFEFRGLSASQKGALYEYMVIDPEDDENEYAGITLTFEDKGGKYPVSSYYTGNVEGQRADYKTFEIFQHYYLSGLRDSTKDLLSNRGNVLGRVIKRRVEKNESEAKIEQIMTDANDRLLEQPEVSETRSGVNDNLSSIYQRFRDNQIGLQIEQSKTEYIVNAIKPYLPHDRVLLSGDGFSLWQNSLGQNNLIYIATVLGDIKHQIEENKIPHFALLIEEPEAHLHPQLQLSLCGFLRDSSTSKNSQLFITSHSPTLTSKVPLKNLILLDKKAFRLSKQFKNREDESIIENTRAGTKITNARFQFRQDQLERYIDVTKSQLLFAKAILFVEGISEELLITAFTELKNYRLEDYRIELVNVGGTSFYPFMHLFNSSKNEKAILKPITILTDNDKFPKSKRKEFKFEKLILDDYDVLDTLDAEIQDAAPNCRVANLNSVANAQAHIKIFDAEKTFEYELALANVPKDKNELENNFLFKYIRKKDKNKADNILEYTATIDADDWDDASRRKTAILMWKTITSKGTFAQNFSIYLLKHIKRARKEFEVPKYILKGLKHLKQGV

SEQ ID NO: 62669 - protein, 360 aa, Zunongwangia profunda SM-A87
MNIDITSELQAYLDASGKVVLNACPGGGKTTAIAQKIINLEPQYLKKYDAYSGIACLSFTNAAKDELNETYSRLCGKTLSYPSIISTIDSFINIYITLPYYYLLQRDFARPRILENNKKLNKFWNITYTQNGKVKQGISRPLLEFKNKAGKYLYFVYPPADIRIEPDGTFSLKGIVPSEDKVDPEKFINYCKYIKNWQFKRGLITTNDSSFIALTLLKKFPKIAIWLSKRFPHIIVDEAQDNSLLQHQVFDKLQEHGLKNIEFIGDPYQSLYEFRDANPQLFLSKFQNDSYQGLELTDNRRSPQHIIDCFSLLRPDTASKINTACTEDLKEPILIYRYSTEDRSKVVQHFDDYCYVNNSD

SEQ ID NO: 62670 - protein, 659 aa, Dickeya paradisiaca Ech703
MKITQMEIKGFKSFDNVGQTININSFTSLIGGNGTGKTAVLLALTRMFGVKSSDRIIQVDDFYVPPGDEIDTQDERELSVRVKFEFADLEDGEDNTVADFFKHLVSSEAAEIPYCTAKLKAKWTKTNLAEGDIESDLVWEIGEYEKNITAYERSKIHVHYVPAYRDPAQQLKQTAGTIMHRLINAVEWSDQMASTVDEVAVSIGNQFQEEVGVQTITSSLGRNWKTLFTGGYFEKLQIKPVVNGIEDVLKHIDTVFLPSPDTQPLPTERLSDGMKSLFYLSLVKSAFDIEDEIINSDGKQLSISVEALAPPNLTIILIEEPENHLSPQYLGRIVKLCEEISENDRAQVVLTTHAPSLLNRVEPENIRYFRLHDNKNTIVKEILLPREDKDDAENVDTFTYVKEAVKAYPEIYFAKVVILGEGDSEEIVIPKIAQVNGIEIDTSLITFAPLGGRYVNHFWKLLNELSIPHVTLLDYDFRRGGGGWGRIKYAVKQLISIGVDKNILLKMSDGVLSDEDLEVMHSWDEDRDEEIAWIESLKEYGVYFSFPYDLDWLMLNEFFEDYKKFAPENGGPRLPKDDDPEYNKKVKAAIASVLKKEEKDIDISKFDDFEKYFWYRYLFLGRGKPLSHNYVLSKMEDDKLRDNSPEVLNELIETVRGLL

SEQ ID NO: 62671 - protein, 615 aa, Dickeya paradisiaca Ech703
MPIIKDDDWVLKDIQEVEDEAMKVIRNSTEHNLVLAGPGAGKTELLAQKACFLIETGKCRDKRIIALSFKKDAAQNLQDRVNSRLDLKYRQKFESTTFDAFCKSIVDRFKSTLPVAYRPSDDYEIYFPENKKFVEEVKRDAVGFEGLTAEELKKLKHNNFENNYIVRPYKKGEEHSVDARIKRFVWYRLLEGKSKVSFKMINFLANYIIRNNKFLSNAINSTYEYAFIDEFQDTTYQQYEIFKSIFLDKKIKITAVGDTKQRIMGWAGALHSAFEIFKNDFAIEHHNELLSNRRSLKNLISYQRMMEAFMNHADNKPEMELIENEGSAKLIQFDESNIEGAYIALCIQKWIEKGVDEREICILFRNPSKHYTDKIISSLQDLDIKCRIENTYQELLNEAIVQLILKMLMFTCDKKSIEGWNSTMELLCNIRGVNKSRDITRLEKELSRFIKSNKDINGNVVDYIYGLISIFGIDEIKSYFPQYINGNGLDYTINSLSQHLETLGIKDNKLAAIDMLLGNKTIPLMTIHKSKGLEFKKVIVVGLEPGAYFGDEEEQIENQKTVFVAFSRAIEEVILTRCAKRANWWDEVCSQNFSEIPLITDMLTYCGLEAEIYKD

SEQ ID NO: 62672 - protein, 695 aa, Paenibacillus sp. JDR-2
MRIEKVKIKNFRLLHDAEITLDEKTTVIVGRNNSGKTSFTEVFRRLLSDTTAKFKLEDFSIPVHEDFWRAFLLMKEGQEDQQIREVLPYIQVTLSLKYDIETDNFGPMGEFVIDLDPDSTHCVTLLRYQLSDGKISSLYGDIEYTGEPDKTEIEKMNFYRVIKERVPLLYSTSVYAIDPQDSSNQKKLDLTLFRELLQTGFIQAQRGLDDTTYKDRDILGGIVERMLDIAKSDNSKSADNTTVSLLESAVKEIQLKIDSDFNQHVNKLLPALSLFGYPGLSTLPLLTETTLDVKRLLENHTKVNYPGINGVNLPEAYNGLGSRNLIYILFHLFEFFKMYKARKTAANFHLIFIEEPEAHLHPQMQEVFIRKLTEIADEFSRQFNSGQPWPVQFVITTHSTHIANEASFDSIRYFLNKEMNTHVKDLNLGFNNDSQNGDKEFLHKYLTLTKCDLFFADKAILIEGPTERILMPKMIEKVENESSHVRQLSSKYLSIIEVGGAYAHHFIYMLNFLEIRTLIITDIDSVESTNQSRRKKCLVSQGTFTSNACIKYWFNNNDISPIALLSKNETEKTKGLVRIAYQVPDEIEHGMIEINKMLKETAASVESIAKKGKDKMAPEKIVYGPTGRSFEDAFMLANTPQFDIEGNTIFELESSAWEKASNVNKTNFALKYALEDTTWNVPIYIKQGLVWLSDK

SEQ ID NO: 62673 - protein, 576 aa, Paenibacillus sp. JDR-2
MKESYVLHPALLAANQAMEKVSICIRDKKSFVLEAGAGAGKTHTLIHTLKQVVEVDGEIFVRNKQKIACITYTNVAREEIESRTDHHPAIFTATIHAFCWSLIKDYQTRLRNHLYLLEKWPQRLEEIDNIASYIISYDLGIPKVKDKQIMLGHNDVISLTILMLDDLKFRKIFINRYPILFIDEYQDTDKHFVEALTTHFLDNENRLLLGLFGDPWQKIYPSGCGKVEHQNLEEIGKRANFRSSTKIVESLNRIRPELTQEVCDTENHGEVSIFHSNAWVGNRRTDGHWKDDLPSEIAQYYLERTKNELIKAGWDFSPEKTKILMLTHNLLAQEQGYRNLAEVFPRNELFIKKEDPYIAFFVEILEPFCIAYENRKFGEMSKLLGGNIPLIRSHKDKEKRAMQMKELLSIRSRGSVGMVIDHLLKVSYPPLTENVQSLEELFKSTEELTGSQNELMERIKKLKEISYQEVVALAQFIEDKTPFATKHGVKGAEFENVLVVLGRGWNLYNYSQMLEYAVIGPPPDKRDNFERNRNLFYVACSRPKVRLALLFTQKLSDVALNTLEAWFGSETIVSLQ

SEQ ID NO: 62674 - protein, 674 aa, Chitinophaga pinensis DSM 2588
MKISTLTIKGFKSFGPQETRITLRKNLAAFIGLNSAGKTSALEALKRLFGSSLAEREIYREDFHIGKDENSDEITERELSIEVRIDFTEEEQEAVPHFFSNMVVDDMDMDLYIRIRLEATWKKSDMTPQGEIEIKNYFIKVPEGSTEQPDSKQPFPNHFRSLIQILYVPAIRRPAEQLKYASGTILYRVLRKINWKDDFKEEFDAKIEEINEAFKGLPEFATVQTSITGFWQQFHKDERYRDTQIGFSGSDFETVLKRLEVSFNPTGTHKSFGIDELGEGYRSMFYLTLVCSLLDVEEKMADTEDEESIGVNRPLLTILAIEEPENHIAPQLLGRVIKILKTIAEKENSQVVLSSHTPAIIKRLDPESILHFRITENYETEVNKIKLPVKKSEAYKYVKEAVHNYPEIYFARLVVIGEGDSEAVIFNRLMEVMNVDFDDNIITFAPLGHRFVNHIWKLLDALKIPHITLLDLDREREGGGWGRVKYAIEQLLEVNVEKKDLLELKDGSVLPDEDFRKMHTWSIKDKDDIKKLNDWVNSLKEYNIFYSVPLDLDFLMLTHYTDAYKKAIPKGGGPEIPDKEKNEQGFKDKTEGAVKATLKSEKATGFTYSQAEKELMIWYNYHFLGRGKPSTHIEVLSNMTDEEIIKDLPPVFNDVFNAISSILKPTSKNEKSKA

SEQ ID NO: 62675 - protein, 615 aa, Chitinophaga pinensis DSM 2588
MKRVKPEDWQPADDMTLERTAMNIARRSNNKLVVAGPGAGKTELLAQKACFLLQTNTCRFPYKILAISFKRDAAHNLKERVRDRCGDDLSKRFESLTFDSFAKQILDRFKQALPEGYKISDDYDVELSDRKILDNYRFEDENYLNSTDPEVVLKLHAATLPHSARTKAERIRNKIWKEMLSSSPSQLSFKMIMRLAELIIKTNPKIKKYLQQTYHYVFLDEFQDTTDIQYDLFKTCFLGSGSHFTAVGDDKQRIMIWAGAQNTVFEDFMDDTGAARVALSTNFRCAPRLVTLLNHLTEHLLEKTDFATPSDKWQPDQGECSIWLFENAEKETQILFREVKEWITTEGINARDICILVKQQLTMYAGNLIEYFNRNGIKARDENKYQDMLTQEVSVFIINVLYLIYDPQNTNAKKDAFDFLSNIHTELEDQQLLKLEFAFTKFVKTLRKDYPNQFFGGDEIETMIAAIVDFAGKDRIRAHFTHYKNIGVLNKAIDDLEKELLHCYDVTNDIVDALDMLIGKDTIPVMTIHKSKGLEYHTVVFIGLEDGAFWSYEKQPDEDKCTFFVALSRAKERVVFTFSEVRPSKFGPREQSMHTIRQIVEELEKSGVVEIVEKN

SEQ ID NO: 62676 - protein, 780 aa, Chitinophaga pinensis DSM 2588
MYLKTICIKNYRRLKDVKINIQKDTTIFVGANNSGKTSATHIFQSFLSGKADFSLHDFSVDCWKLIKDISQSTNIVEDIYKLPTISLDLWFEVSEDDLNYIIDLLPNLDWASQPVGIRLMYAPKGHDNLLLEYQTAKADAQKKGKDMFQPWPKDLSDYLTKRLNQEYEINYFVLDATQFDRNYNIIDPSYTPHALHEDKDNKKTGAAIIRSLIKVDFLNAQRHLSDNISTGRSEDLSKRFNRFYDRNLEKRENDPEIYKALFDSESLLTQHLEKVFQPTLDSLNKLGYPGFTNPKLVIKAAYSQESVSQYAQLHYSIGDLDLPDKYNGLGFKNLIYMVIEILDFHERWKEDTDTKAPLHLILIEEPEAHLHAQLQQVFIRQILNIINPSGQNDGFNTQLIVSTHSPHIIYESGFLPIRYFRRTSEVSKSPVSEVLNLSTFYNESEKDSREFLEKYMKLTHCDLFFADAAILVEGNVERLLLPLMIEKCQKSLQSNYLSVIEVGGAFAYRFEQLISFLGLTTLVITDLDSVFPPKPLPPNNETTESADKSEKSEEEDNEEDIEEDDYDDEEDSEEEEQKGKTKKKTGACSYSTPDAITSNYTLRHWLPKKTKIAEILTCSEQERTRIQSATNRASVQVCFQNKVEINWEGKTDTNCGRTLEEAFAFENLEWTQKIENKHLNLRVILKTKQLTVSEISARISRRVQSSNFEKTNFALGLLMANADEWNVPVYIKDGLYWLDKMLNPPHPFNTLPEYVNIHEDTILQPTFPAEEGEKEPNTFE

SEQ ID NO: 62677 - protein, 628 aa, Chitinophaga pinensis DSM 2588
MATSRINKPDTSADHELRNCIDTKQSFVMIAGAGSGKTTSLIKGLDYIRSRYGNQLRAKRQKIACVTYTTNAVDEIIGDVQGDSLFHVSTIHSFLWEIISPFQKDIKDWVKQRVREKIAKIQQAIQEYGPRVQQKTKDKDQAEFLRLEEVSRLIDSVNNFRYETGADYTKGIIGHADILRMVPELIQGKTLLKKIVIQKFPFLLIDESQDTAPNVVECFLSVDAQKQSDFCLGFFGDPMQKIYLTGIGKIPDRDNWKTIVKPENFRCASAVLELINLIRKPADQIEQTGGKMENVGGMLTPVVGSARLFILPANEERSTNVEKVRNFIAREEQDPAWRDDSGSDLKILVLEHRMAAKRLGFEQLHAAFKDGTPESIGSGFSEGNSWALSLFQKYILPLIEAQSIGKQSNVMTLLRAFSPILEKEYLQKHKISAEDLKVLDQTIKELVALFADPNISVAQILDLIETRRLAVLDERIAAKLRDEPLLIENAEAISRVLEKYFQCSVNQLLGYDKYIREESVYSTQHDVKGSEFKRVIVILDDEEGKRSTLYSYEKLLGLKPLSDTDTENISEGTESVLDRTRRLFYVCCSRAQKDLAVIWFVQDVDEALAVLKDSIFSDDQIIMEHKLG

SEQ ID NO: 62678 - protein, 661 aa, Kangiella koreensis DSM 16069
MEIEKISISNFRCFSEAEAVIFMESDITCFVGNNGTGKSALILALKRIFGSTREERTVIREDFYVGSGEDYKEISGRELYIEIIFSFPELQTAVDESREVCPAFSSVIYADQDDKRLKARMRLESKWDENEYEDEVQSQLYWITTSNKVDFGDDAENKFPVSVYDRKHIKLRYIPAFRDSKSTLKNEVKSLTNLLDGYTDLNISSQEKIEAISRDLSNEIQSLESIKTATSLLKQVWNNTHDKTLKHYQEPKLEAASTEIGELLRTMTVKLSPSEDGGSRDINELSDGQISLLYFTLSVVLYILEQKHHSGELRGFKSLDRDIPVFTIFAFEEPENHLSPFYLGRVIEVLSTQTNSLKATGIITSHSTSVVRRMQRVEQIRHFRQEVNSTDRYSIVNQVLLPSEKAEDDYKYINQAILAHPELYFAKLVILGEGDSEEIVIPKLAEALGFDLDPSFVSFVKLGGRHVNHMWRLLSDLNIPFLTLVDMDLGRSGAGPLRIKYIIDELEKIDRPFAFPEGVSTQKLQEKQLTYRQLNEMAILLEEYGVFYSFPLDLDMAMIFAYPDYYDASNAQDSDREVLDRAVLGENYDDYDDNGVEIYSDEELKKYRYLFCTKSKVASHYKAIADLLELEVDDVVTECPDFLKRLINKSSNLLSESKENE

SEQ ID NO: 62679 - protein, 610 aa, Kangiella koreensis DSM 16069
MSKYQSVESWKPSDGFISTEVANEVIKEKNNNLAILAGPGAGKTEILAQRANYLLQTGLCKSPQKILALTFKVDAASNIKNRIDLRCGRELASRFESSTFDAFFISLVRRFSTLLPSWIDIPSDFDVYPFDHNWWSDYEQNQLGGRPFVFKNNYSPLDLTARPNDEITRLWKYCAENKIADYKMCRSMAFTIIKNYSQVRYLILSTYKYLFLDEFQDTTDEQFAFIQTVFKGSNTIISAVGDTNQMIMAWAGANPQNFEKLAKDFNSKTVHLMVNHRSNTKIINLINHVIQDLTTSMETPVVYVGTRKGAPPYNCIGAKAFDSPESEAAYISKHINLTLSENPTLAPSDFALILRQRAQDYYKNAIGEFLSNDLSLRNEDALVVSNGVKIQDLMVEPLSIFWMLLIRYKAGLINYSQEKKLDKIASFFTGYNLGQERERKKLKAYIARLMSCINFSEPVENTITKIFDIVGSAKIKLVYPQYRSQYFNKVKESFCILFQDALNNNPKDLKQAINDYEGTNQVKLMTIHKSKGLEFDTVFFVDFHDDSWWGLRRAVQEKNEKSQREEKNTFFVGLSRAEERLYFTKNRGNWPPVLVGLLKDSNLVVQLPDI

SEQ ID NO: 62680 - protein, 696 aa, Anaerococcus prevotii DSM 20548
MILKKMKVKNFRLLKNFELNFKDELSLVIGKNNCGKTSSIIVLDKMLNSSKLFWEDINLECQKDLYKKIIGFDITKLDEVQLLETINMQLFIEYNDNDSYENIQKFMMDLNPDNNIIVLEFISVIAAKKIIELKNIISEKNIEDFKSFSKFMSKNFANFFETKKYSRGFDVEANKTTQDRSEEIDNKDIQKVIKVAGIRADRAVSNDDRNHVLSGLTGKYFSSYKAAKDESESVFTRLEEKLEEADKELYKIYNGEKSEGEEPIDGIFSDVIDVIKTYGGAENGIDIAIESSISEKNLLSDNTNLSYRQGGDYSLPETYNGLGYLNLIGILFEIETNIQELFEQPADINLLYIEEPEAHTHPQLQYIFIRNIKSHIKAHRNKLLKEKNKQLQILITSHSSHIVSECNFDDIIYLKKNGNTVIAKSFNSLKEEYGGDEQKGFKFVKQYLTMNRSELFFADKAICIEGDTERILMPVMMHKIDNKEKPRADIIPLLSQNISIIEVGAHSHIFMPLFSFLGTKVLFVTDIDSVKAEKKIDKNGKERTVYTSCHPDEGTHTSNASIKEFFKDTGIDTSNNQFKELVGKNAEDKIKDNMRMAYQIPESYGEYQASSFEDAFIALNKDFILKNKEGFYQYGALKDFSNDEIENGDYYNFALNNVKKKSAFASSLLYFDNENGEEDEKWAVPHYIEEGLLWIR

SEQ ID NO: 62681 - protein, 634 aa, Anaerococcus prevotii DSM 20548
MDTLTLEKEVLEALECIKNGENFILEGGAGSGKTYSLISLINALTEELPDIKIVCITYTNNAVAEILSRIENENIWVSTIHEFIWSLIRKYQNEIKNILVELINDDNEKNFKKPKDFSEDLISKEYFENLYVDYDEYYSVTPNEENRVKISHNHILIVAEKMFEKYKKIADILKDIADCIFVDEYQDTSPLVADILLKHLEQSDKKNVIGFFGDSMQSIYDDGVGNLNQYNLTKIVKTQNRRNPRVVIEVANKFRDDDIEQRPSEDINAPNMENGTIREGSIKFLYGTEINDFISVKGKNIFESWDFSDGKQTKELRLTHKYNAEMTGFKDLYDLYNADLITKLISGIKKKIDKGNLDCNKTLGEITLEVKPTYNKVELLDQINGNEIYQSIYSVLEDMSWEEAYEKCRITKESLMSYKLNGMSGRYEANSYRDRILRRLDILEEIIELYEANRFNDFLRITKFSIHNRNDKICLKQAIDYLVSEDNQTIENVLKFAEVKGLLKEDELFSDYISNKGFYLWERIKKITFNQYRKSVLYLKEFSPICTQHSVKGSEYDNVLLVLESDWNKYDFRTLFGKGSPNSNVQKRTKKLFYVCITRAKKNLIIYMPTDDSDILEKAKEYFGEENVIELSSI

SEQ ID NO: 62682 - protein, 380 aa, Meiothermus ruber DSM 1279
MLTRLLVRNYKSLGKVDLELGKLAVFVGPNGSGKSNLLDALRFVSDALSLNLDYALRERGGINEVRRRSSGRPNNFRIELHLTLEHWAAKYAFDIEAVRGYDYQVAREECRVFSLQTAVSSERYFVLERGELKASNPRLSAASNRQDLYLRAVSAEKGFNEVFDYLTRIAVYNPNPAAIRNLQDPDAYPILRRDGSNLPSVLRQMRNAPQRLERVQEFLSKIVPGVTKVEPVILGHKETLYFFQRMDNKNDWRFYASSMSDGTLRALAVLVAAFQTAVTVAGVEEPEVALHPGSAFVLADALIEASESRQILLTTHSPDLLDHEGLSPDALFMVGMQRGTSEVRPIPEEQKQVIRDNLFTAGELLRQRQLELPTVQDALL

SEQ ID NO: 62683 - protein, 809 aa, Meiothermus ruber DSM 1279
MPDLRLTDEQQAIVAHNEGPALVFAVAGAGKTTALVHRLERLVRERVFEPRKILATSFSRLAVDDLKRALARWPHTQAIQVSTLHALGYRIVRKAASEGLLKLAEVRDEGSEQALLQRTLRRARELKLEWVSELENLEAEDFLSYVGACKGNLQYADLKGAGLPPAALRVASQAQAPEELEWYLELYKLMEQVRLEEGLLTFDDMLMTGWEVLVRHPGILQTVQKAFQAVLVDEFQDVNLAQSEMLDLITQPHRNYMAVGDDDQTIYEWRGASPRFILEFAQRYGAKKYLIRDTFRCPAPQVVLAGRVIAHNQQREPKRLSLTKGFQGRVHLRLEPHTPAQAQGLVSDIAGLLAQGRKPGEMAVLVRLYAQTPYIEQCLIERQIPYRVVGSTPFYQRPEIQGLLAYLQLALNPTKHLWLQVYNTPKRYLSRALADAVWRRVERGASLVEALRAELAGAEERVARRLRELAELFEWLGGAIAQGPAHAVLVALEARLDYCRHLLRSSGFYEVGVGRAEGVRAFLEYTRDKGRVFELLQHLERLAQEHLGDEPAPETRERLSLMTIFRAKGLEWPLVFIPDCNEGTLPYSGSENLEEERRLFYVALTRSSQHTYLYALSSLPLSPFLQEAEYQQVLGAVERVGEALEMKAEELSTAQTLALARGAHELGLERFLHRWWKAEQAQPIAAKVLRLFAHAERAGWLEALGLTPEARGLWEAFDIEPGEGMAGEFADLERFLLEPKAPEKPPGLSLGQKVRHFQFGVGRVVGLEDGVATVAFADGVRKLVLRYARLEVVGSASLGRPKMGLQGQD

SEQ ID NO: 62684 - protein, 596 aa, Pectobacterium wasabiae WPP163
MRISRVRLINFANFSNVDVETGESIVIVGENKVGKSNFIRGLQLILDPGLSERDRQLGFEHFWDGLGEEKLGETIEISVDLTDFTDDPRLMAHLNDCVVNPGPPMVARLTYRFQPKTELNRAPESLKDYEYVIFGGTDPDMHIGGALRRMLPIDVQGALRDAEKDLSSWRNSPLRPLIEELTASLDDDAREEIQTQIDEAQRELAGHDDVVATAERISERLVAIAGDQHAVPVSLGLAPARVDALLRSLRLLLDNGIRGIGDASLGTANLIFLALKSLELDRLVDDGERDHTFFVVEEPEAHLHPHVQRLVYRYFLGTDGDNRDESTPLTTILTTHSPHIASVTPIRSIVLLRHDPEEEETIAVSTVNAPFTQRDEDDLQRYIDVTRGEIFFSRGVVLVEGDAERFLVPAFADALGIPLDMLGITVCSVGGTNFTPYVKLLGPQGLDIPHVILTDRDPVNGRHPLVRRRFISLLELVEYEHYRDYENMDAEDVIGLANDYGYFVNENTLETELFESGLAEEMIDVIRQELPQLRQEALNTLQQWLDDGEVDQGRLLKLIERIGKGRFAQALASSVSEDVCPDYIREALEHIRDAVA

SEQ ID NO: 62685 - protein, 606 aa, Pectobacterium wasabiae WPP163
MPSRSVSAAYLAQASELAGNPGQLAAYNSLGHCVVLAGPGSGKTKTLVLKLARILAEDVQAPRGAACITYSQECARELTRRLEALGLRDAPNLFVGTVHGFCLRHLLMPYGRLADLPISFPLSVASQRVSDRLLRQSGDRLFGSGHPHKTIDLGRHRRSVLDRNSTAWRSEEELAAWAEAYESALRQDGLIDYDDMVVFGQRLIVEHDWVLPLVQAKFPVLAVDEYQDLGVALHRMVTRLVFEGGVRLFAVGDSDQSIYGFTGANGALLMELAGSEGVETVRLQLNYRSGAGIVSASEMALGEARGYRANDPNRQTTIEFVLCPDGMADQATHAIAQIIPAALAAKPGRTLGDIAILYRDYRAGDIVADAVTAGGFDYIRVDNAAPYRKVALTSWVEDCAAWCAGGWRVGRPQLRGLIDRYLAFHRTRLDDAQARREGQRLTALLWALRADQQPARDFVTLLRNGIVDSLLGTEPVLADQAEQLNRMSAALAEGGALAALDIVSLGGRDGSPDHLNLLTLHSAKGCEYDVVIMVGLDLGNLPWRGETPEKLRESRRLFYVGLTRARDEVHMLYSGFVDGRYGPMRQGRSPFLDELEGRMREAGLRQ

SEQ ID NO: 62686 - protein, 714 aa, Vibrio antiquarius
MKVARIEISNFRLLKSFTLDLEDELSLVIGKNNTGKTSVLACLDKLAVQSDKKAISYEDFNVDLMSSIEAVLLGEQTIGNEEEYSPLGIQLKLFIKYSESDDLSKISSLIMSLDPVDDNVVLSFEYKIAFDKIVDLKAAYENDAEKFENSPRLFLKENLSDYFGPVVKKSLLKGDESQFIDLNKENINLKDILSIQFINAKRSVTNKQNDKTLSNQTSSLYKQVDESDEQVDASNEFKKELRKTDTKLSGIYQNMFKDVIEKVNRFGGISPTDTTIKVASTLQHRELLEGNTTVMYQHQSHDLPEHYNGLGYMNLISMIFEIEMLMSRLRKSLKEQPATINLLFIEEPEAHTHPQMQYVFIKNIKKLLKENRIREDGIEIHLQSIITTHSSHIVSESSFDDIKYLKKEPQSHQVQAKNLKDLELEYSSKEDPEKDAELKQSYRFLKQYLTLNRAELFFADKAIFIEGDTERVILPAMMKKIDQENEVDNMQPLLSQNISMIEVGAHSQTFEKFIDFIGLKSLIITDIDSNKEVPKDDDPTKTKREKCRPNETGASQTSNSSLEFFFGTKELDFYKTLSFSGKSLSKCPEKKLWEQDQDGLIKIVYQVEENSYLARSFEDAFFHINNELLNIGHDAFPSLTKKHYDKYQAGDIDVFEFAEKAVNSKPSLAIEVLLNSKTSTSDGVESEGDSREIEFSNWNVPLYIKEGLLWLQQN

SEQ ID NO: 62687 - protein, 634 aa, Vibrio antiquarius
MATAELDLNKISDESIEAFKLIKDKKHFLLSGGAGSGKTYSLVEVLKAVINDSPSLNIACITYTNSAVAEIEDRVLHDNLYVSTIHDFLWNNIKNFQSEIKETLIELINEPEQLLIKNPGEELVEDDFFDDCELIKYKEYVKIANGIISHDQVIVLAAKMFEKYERLCSIVKDRYPFIFVDEYQDTDPIVVKILLEYMEKSERPNVVGFFGDSMQSIYDGSVGDLDIYTKSERPIVYEVFKTQNRRNPRKVICLANKIRTDGLKQQPSDDKYAPNMDEAGEVKQGEIKFLYSTSNSLEAVRQHLGWDFNCAESVKELNLTHNLIANKANFPELMRIYDKDKILEYLRTKVRKALVETEPEYDSSGKTFAQVLEHVGNPNPTPTQQAYIDNNLKYFEIAKSLPYDHISKLYVDKDQLLDDKKNYVGDDSKPSSNRDDLIKHLFKIENCIRLYDSKKFNQFIKATDYSIISVKDKVKLNAAIQDFKLGEDISIGKVIELAHNLGLVIKDDKLDKFISDRHYVYTQVCDVKYQEFRNVFNYLEGFLTFSTQHKTKGSEFSNVLVVLDNGQWNQYNFKYLFEKNGTDSVRQRSEKIFYVCCTRAKEKLAVFFPNPTPKTIETALEWFGEGNVVNLDAS

SEQ ID NO: 62688 - protein, 594 aa, Klebsiella variicola At-22
MRISRIRLINFANFSDVDVETGESIVIVGENKVGKSNFIRGLQLILDPGLSERDRQLGFEHFWDGLGEEKLGETIEISVDLTDFTDDARLMAHLNDCVLNPGPPMVARLTYRFQPKTELNRAPESLKDYEYVIFGGADPDMHIGGAFRRMLPIDVQGALRDAEKDLSSWRNSPLRPLIEELSASLDDETREKIQTQVDEAQRELADHDEVAATAERISERLIAIAGKQHAVPVSLGLAPTRVDALLRSLRLLLDSGIRGIGDASLGTANLIFLALKSLELDRLVDDGERDHTFFVVEEPEAHLHPHVQRLVYRYFLGTDGENGDEGTPLTTILTTHSPHIASVTPVRSIVLLRYDAEDKKTIAVSTANAPFTPRDEDDLQRYIDVTRGEIFFSRGVILVEGDAERFLVPAFADALDIPLDMLGITVCSIGGTNFTPYVKLLGPRGLNIPHVILTDRDPMEGGVPLVRKRLINILSVLENDVDHDDMDTDEVIEYAGEYGCFVNEITLEPELFTGGLGEAMKSVIEQELSLRRATLNEIQAWVDDTDQLDKARLLKLIERIGKGRFAQALAPSVSEDVCPDYIREALEHIRDAVA

SEQ ID NO: 62689 - protein, 605 aa, Klebsiella variicola At-22
MPSRNVSAAYLAQAAELAENPGQLAAYHSRGHCVVLAGPGSGKTKTLVLKLARILAEDVEAPRGAACITYSQECARELTRRLEALGLREAPNLFIGTVHGFCLRHLLMPYGRLADLPIPFPLSVASQRASERLLRQSGDRLFGPNHPYKAIDLGRHRRSVLNRNSVAWRAEEELAAWAEAYEAALRQEGLIDYDDMVVFGQRLIVEHDWVLPLVQAKFPILAVDEYQDLGVALHRMVKRLAFEGGVRLFAVGDADQSIYGFTGADGALLMELAGRRDVETVRLQLNYRSGAGIVNASEMVLGEVRGYRASDLNRQTTIAFQLCPDGLEDQAVHAVAQIIPTALAAKPGRTLGDIAILYKDYRAGDVVADAVTASGFDYIRVDTAAPYRKVALTSWVEDCAAWCAGGWRIGHPQLRGLTDRYLAFHRARLDDACARHKGQELTKLLWALRADQHPACDFVASLRNGLVDSLLATEPALSDQAEQLDRMTVALAEGGALAMLDITSLGGRDGSPEHLNLLTLHSAKGCEYDVVIMVGLDLGNLPWRNETPEKLRESRRLFYVGLTRARDEVHMLYSGFVDGRYGPMRLGRSPFLDELEVRMRGAGLQ

SEQ ID NO: 62690 - protein, 685 aa, Methanohalophilus mahii DSM 5219
MIVWGVDLYLSKIHIENYRSIKELDLDFKKGKNVIVGKNNSGKSNIIKAIDLLLGEKSPTWNKSNNITDNDFFEGNTDEDIFIWCEIIKNDEEHVDLSNFKGAFFKIKNKRGNHVKTNIDFNDKNSFLYYMSEDFAAELNKGYESKYKKEWIGDKPYCIRSCEEELENYGHFAFAFFCKKDEDGNYVKEMTFFYKQTNESDWYVCMNANLRNTFLQSAIVPSFRDPKSQLRIANYTWYGKLLKECIPNENPELDYAFECVKEASNKVFGDLQNRICSGNTQIAFPNTTISFQFNPDTRQDIYKSTLIYVNDGFNTKLEDKGSGIQSSVIISLFDYYVRNVAHTNGSLLAIEEPELYLHPHGRRVISDKLDHFLDDNKNQVIITTHSPEFVCTPDDSINLIVVKKDGNKSVATNFYFDDIKSKQILIKKQNSEMFFADAVILVEGADKYILEYIAREIGQRLECEDGKLGKNWMNEYNVSVISCGGKHEFWKYANVLKSINIPYLVISDFDFFRDGLDTYFNKTGFVEQKEKLGELKSQVIETIRNEDEIKNIPNICEEIINDISSENLDNAKKRSKEIFDIIKKNNGTYKRLDDIKNESVKKEIEQYLVKLRELNIFILTGELEHFYTTEPRKSKEQGVLEIIKKCEDKYISEFVDVEEFKEALIVFLESCLQLNLKEESDVHEM

SEQ ID NO: 62691 - protein, 1018 aa, Methanohalophilus mahii DSM 5219
MGDIKLNPSQSQAVDYTDGPLLILAGPGSGKTLTITEKVVNIVDEGFSPDRILALTFSEKAAGEMEERIENRIGESSGITVSTFHSYCNDLLKEFSLYAGINQGTRLISQEHSHVWGINNIDSFGFENIAIPNRPYDLITSLLEGVSQLHDHLVGPQELQEYVKRKLDENIDEQERDDLLKLADLARFYSHYQEYKRDHNFMDYDDMISMVCRLLESNEVVRNQIRNRYDYVLVDEFQDTNYAQLYLINLIADGTNLTCVADDDQCIYRFRGAYLSNIKQLQDYYASLEKIPLDRNYRSSSQIVQLSQQLIATNPEREDKTLHSHNGDGEKIKVVKTPDDTSEANWVADEIQRLIEEENIAPDEIFVLTRKRADGKKYSDALKGKMIPVEYVGNLQLKNYPIVQEALAYMHIVADPFNNGIAFARILAREGVSEHDLQKINTMAKKLSRETELEGDGIYSVLQHYLDDVPIIQKALVKSILTRLNELIDYRKNHLPSDTVKYLLSEKTDLYKSQLLADTFTSRRNIHILNSLTSMVEDLELVDGGSEFARAVEYLELVFNLDIGDEETSEENTVKVMTIHQSKGKEAKVVFVCDLADRHLPLRFTKKQFRVPRELEKGVQRDVEDKILHLEEERRLAYVAMTRAREKLYLTFPEKYAGNKRGVKPSEFVTQLDYESNPLIEYIETDRLQDTETVVTESPLKKKQDEYLRLMNMYAGQGQMKQALESLVVLTQLKEIEDKGNLAVFNIEDFLKTTPRDIEELEALVNEEMPPLVDSDMRFSASKVRQYMECPLKFKYSNVLNIPIPQKTFFQTGTDVHSVFEQLSRYRMQGKSIDMELANRILDETWDGSVFDSQTHEQQELDRVRQMLEYWFEFEKSNVNETIAVEEKFNLKLDGAQFGGVIDRIDQTPEGEYIVIDYKTSKSPLSKNKMPEDVQLALYCQAVRERYGKYPVKAGLMYVNPNIRDLRLMDVNQSQINSVLDGVREIVADIKAEDFEIREEPNCYFCDYKGICEWYNHQ

SEQ ID NO: 62692 - protein, 608 aa, Aromatoleum aromaticum EbN1
MRVSRLSIENFRGIANAVLHFSGHTLLIGGNNVGKSTICEALDLVLGPDRLNRTPPVEEFDFRNANYLADDGETIVPLRIEAILVDLTDDIKTLCAANLEFWHTSEKRLLTEGEIAAADDPQVELCLRLVTVGRYDIDEDQFVARTIYGRTNEEPDEEPKSIPTRVKRAIGFLYLRTIRTGSRALSLERGTLLDNILRMKEARKGMWESIRKRLAVLNPPIDADATELGPVLDEIEARLAEYIAPSGEGRSTRLFVSQLTREHLRKTIAFFLTMGQGEAAVPFQQSGTGTLNTLVLALLTFIADLKKDNVIFAMEEPEIALPPHTQRRIANYLLEETSQCFVTSHSPYVIERFEPEGIVKLDRNDQGELSGVVIKLPAGMKAKNYRQNFRRAIAEAMLGRGVIVGEGITEQDALLLVAHKLEEHNLDLFPLDVAGISVINADGDGNLEKLGAFFKEIGIPAFAFFDRKKRTDQEIIALQGTYAITKEITQKGAEMLMAEETPLDRQWQFLELLRNEDSEGRFGIPVVRPIDDAVRALAVKALKGLKGEGGAARLLELCAVGELPPTITGFLGEIYQRYPKPKRRLTAVAEAPADPAIEQEDTAVAAGD

SEQ ID NO: 62693 - protein, 579 aa, Aromatoleum aromaticum EbN1
MALVICPQRQSVLDAIGPVLVTGGPGSGKTTIALAKAQRLIAVGLPPGQTVLFLSFSRAAVARVVEASKAQLPKASQSKLSIQTFHSFFWEILKAYGYLLGAPRRLRLLLPHDETAMRHQFESEGGNWATERERLFRKEGLVAFDLFSTKAHALLAASARLRSLFSCRHPMIVVDEAQDTADDQWQCVRLLSENTQLVCLADLDQQIYDFRPGVSSERITHIMEALQPLRVDLQGQNHRSPNSEIVTFANDMLLGTPRGAAYQGVSRMNFRANADRRDAAIRSAVGIAIQKAKAAATPNDVENLALLATWGRGVNIISRALNGDGTNKSIPHRVMIDEASVLLSSRMVAFLLEPRPAESAELTDLADALDLAAAVFRARGGNGNLSQAQRLAISATQSRAGTAPRANGVAAKLLDALRTLRVHNFSGEPKRDWIEARRILREAGANPLESIANDAEQLVAFQRGRRIASSLTDLWQSQGNYCNARTALDAALAEDQLLSGGNDLHGIQVMTVHKSKGKEFDAVIIFDDPNSSPLIFCPEDAPHPRCRRLLRVGITRARHHVLMLTDMYRPSELMTGHRL

SEQ ID NO: 62694 - protein, 691 aa, Bacteroides fragilis NCTC 9343
MYISKVSLVNYRNFENSFFLFNKGINTIIGENASGKTNLFRAIRLILDDNLLSSAYKLNENDFNRNLINWKGRWIIISLEFSEISNEEAIQALFVYGSGVIADDKVKKATYNLFFRPKPEIRKQLSELKEGDHDGLNFILDKITINDYETFFTGKSTVDFNDKNVQRELMGDFENVIFNYEIDESKFGGRIPHQLSISKEVAFTFIKALRDVVSDFQDNKKNPLLTLLKSKSEELNDKDSELISNKVKDLNRTIEDLNDIKEITNNISETIKEAVGTTYSPSSLSIKSNLPNEAEKLFHALKLFIGEPGEDYEGSIHELSLGGANLIFLTLKLLEYKYRKGKDRIANFLLIEEPEAHIHTHIQKALFDKIEYEDTQIIYSTHSTHISEVSNISNMNIINRFKNYSEVYQPFIGLNDEEIMHIERFLDAIRCNILFAKSVILVEGDAEEILIPVMVKNTLGVSLDELGISLINVRSTGFENLAQLFHNQRIKKRCAIITDLDESITGKDTEASKRGLSRKAKLDSIKNANEWICPFYAPHTFEVEFLGNGNKDIVLSTVKDVYKDKDTIELSEQEINSSDIKEYGKRILTMANYKGKGWYAILLSNYITPSVCIPKYILDAIVFAKSKFSNELIVQMLEYVLDTYDEDEEIDNLKNELKSYNEGRTSFDDIKKSLEGVLNDNEPILYILNQL

SEQ ID NO: 62695 - protein, 592 aa, Bacteroides fragilis NCTC 9343
MFVWGKNDLNPEQEKAIYNENSILLIACPGSGKTRTIIYKIAYELSKLESNKQYIIAITYTNRAADEIKERIELLGVDTEQLWIGTIHSFCVEWILKPYHMYLEELRFGYDIINTNDTENYLVSLCASYSTPKKKITYWDCLCYCFTSEGLKINCTKPTIKETVELIIYDYYQNLKEKHEIDYGLILYYSYCLLKENQSICKTLSNIFPYILIDEYQDTKELQYMILGAILKTGKENKAFIVGDPNQSIYGNLGGFPMNKTQLENVTGLYYDELSLSNNYRSSSLLVSYFDYFKTYANKIEATGKTKDYQSVISYNKTISIEDLENEIVRIIQTNIDEYHIFPNEICILAPQWIHLSGLTRNLMARLPQYSFDGPGMAPFARDIDNFWYKLSRIILTDSTPGLYIRRLRWASEIVTNLISIGVTNVDLSAKQILYICNNILINEQDGLEYLKKFFNAFLDRVNIDINQNKYLKMHYDAFFDSSKKRIERLKKEGAEFITNIDTFRKVFQQKKGITISTNHGVKGAEFDTVIAFGLLDGYVPHFSELNKEESAKRILYVIASRARKNLYLISEQGRKKYPTQILDRYKYPYNG

SEQ ID NO: 62696 - protein, 693 aa, Pseudoalteromonas haloplanktis TAC125
MKLAKAFIRNFRRLEEVEVDFEKSETVFVGPNNSGKTSATSIFRCFLSSRDFKIHDFSIQRISEIDHYSPEGDITLPSIELDLWFDFDPENISFGRAFALLSSVSIETYEVGIRCKYAVDDISKLWAEYDTIFPIDDDGKRKRSLSHFLGLDGNFKNHFSVQYSSLSRLDNDEIEETILKLSDGKRILNSLVRADFVDAQRNMNDDEEASRSSKLSTAFASFYRNNLDQVDINDAAIQIIDENNEKLTEHYDEHFGSLMGVLNNLGVPAAHERRLKIISSISADVALRGSTDLIYIDAETAHELPEAYNGLGFKNLVLMAIQIRDFQLQWLQTLENRPLCHLIFIEEPEVHLHAQVQQTFIGNIWNILNNLDEDGIGSPQLVITTHSSHVLNSVDFEKVRYFRRCHRSEEDPTVSQILRVSEIHNLRDFQASAVSTDGGEVDADAALDFLKRYLALIHCDLFFSDAAILIEGTVERLLLPQMITKTSPNLNTKYLATLEVGGAYAHRFAELMTFLHIPYLVITDIDSVKPPEGGGRAKACCAVDAGAITSNASLKDMFVGKLLISDFNEIPAQDQSQADLDRFVAFQRPVEVDFLDERITVHGRTLEEAFIYENIQAFGGGEAFKGVVLPAEAKELNQSIYELIRESSFKKTDFALTVLSSDDWQVPLYIRQGLEWLERRLQSQEQAIEEVSK

SEQ ID NO: 62697 - protein, 615 aa, Pseudoalteromonas haloplanktis TAC125
MTKLFKPTTADKEIEECLVAAQSFSVVAGAGSGKTTSLVTALNFLRDKVGSDLRKNGQKIVCITYTKRATAVIEERLGFDELYLVSTIHSFLWSSISRFTKDIRVALRDSLIPNHIAKAREKDNGRNSQSAQRARARIVELTEELELLDQVTTFKYDESQFSSFSKGQIGHDDVIDLAAYLISESLILQRGFGFQFPYIFVDEAQDTFDSVIAAFNTICSGEGLPMVAYFGDPMQQIYDNGVGVFDGPEGFRLIEKEENFRSATSIVALTNKLRNDIQQMPAGDSALNVGSVLLTLIETEAPAGPRGRYTPEQLDLSLSKFDEALQYIGWQENKEAKRLFLVRQMIARRLGFSSLQNLFTGVYASNKAQDEYIDGDHFLVKPFIKSLCPLIVSMQNGNKKQIVGILREETPAFDILGINKDRPLKEMLDIAKDLVNELSEMWVERPIGDILRYAKENRLCTISERLAATLDREPRVEAYDNAIHAEEKSDWLADEFLSMSTNELLPYYGFVSDHTALSTQHGSKGEEYEDVLVVFDDIEASWNMYSFNKLLTPAAAGDGTEGQLARSRKLAYVCFSRARMNLRIFLYCQDAKAARAELVGSELLDSEQIEILPSR

SEQ ID NO: 62698 - protein, 594 aa, Herminiimonas arsenicoxydans
MRVSRVRLINFANFSDVDVETGESIVIVGENKVGKSNFIRGLQLILDPGLSERDRQLGLEHFWDGLGEDKVGATIEVSVDLTDFTNDPRLMAHLNDCVIDPGPPMVARLTYRFQPKAGLGRAPESLKDYEYVIFGGNDPEMRIGGALRRMLPIDVQVALRDAEKDLASWRNSPLRPLIEDLAASLDDDAREEIQNQVDQAQRELAGHEEVVATAERISERLIAIAGGQHAVPVSLGLAPTRVDALLRSLRLLIDNGVRGVGDASLGTANLIFLALKSLELDRLVSEGERDHTFFVVEEPEAHLHPHVQRLVYRYFLGTRAEDEDEAPPLTTILTTHSPHIASVTPIRSIVLLRHNATDGKTVAVSTANTPFTQRDEDDLQRYIDVTRGEILFSRGVILVEGDAERFIIPAFADALGIPFDILGITVCSVGGTNFTPYVKLLGPKGLNIPHVILTDRDPVNGKPPLAHRRLINLLNEVDDEYGYDDLDIDEVLKYAAEFGYFVNESTLESDLFAAGMTEAMKSVIEQELPLRQVTRDALQEWVDDPDQVDEDRLLKLIERIGKGRFAQALAPSVSEDVCPAYIRSALEHIRDAVA

SEQ ID NO: 62699 - protein, 588 aa, Herminiimonas arsenicoxydans
MAGNPGQLAAYNSQGHCVVLAGPGSGKTKTLVLKLARILAEDVEAPRGVACITYSQECARELARRIENLGLQQAPNLFIGTVHGFCLRHLLMPYGRLAGLPISFPLSVATQRVSDRLLKQTGDALFGQNHPYKVIDLGRHRRSVLNRNSVAWRSEEELAAWAEAYEAALRDEGLIDYDDMVVFGQRLIAEHDWVLPLVQAKFPVLAVDEYQDLGVALHRIVKRLAFDGGVRLFAVGDADQSIYGFTGADGALLMELAARRDIEPVQLQLNYRSGAGIVTASEMALGEARGYQASDPARQTTIEFVLRPGGMADQAAHAVAQIIPAALASKPGRTLGDIAILYKDYRAGDIVAEAVATGGLDHIRVDTAAPYRKVALTSWVEDCAAWCAGGWRVGRPQLRGLLDRYRAFHRASLDDSQAKREEQELTALLWELRADQQPAREFVASLRNGVVDHLLAAELALADQKEQLDRMTAALAEGGALASLDITSLGGRDGSPDHLNLLTLHSAKGCEYDVVIMVGLDLGNLPWRNETPEKLRESRRLFYVGLTRARDEVHMLYSGFVDGRYGPMRFGRSPFLDELEARMRAAGI

SEQ ID NO: 62700 - protein, 682 aa, Escherichia fergusonii ATCC 35469
MCPTNYAQGFTFLFNTLKLFYFFAKSLALDFKQKKQFADVIRMVTHMFLSKLKIKGFRCFNDEFNISLNEGLSVIVGENGAGKSAIINSIRQLFIDSESERYNITENDFHSPFSNPPKASDSFTINAEFSNLDAKEIIALLPWTGNSDVAKLNLHVENKEIRGRYKKSLWGGDSQNSQFDYELLDLIYCIYLPPLRDAESKLTNGRQSRLSKLLKAINRKDLKTLKKSGGVHPLVDKVNTFNDELSNSDLYSIKAANQLIKNQLQNAIGLNFGQNTAIQFAESDFTRIVESLRLIFFPDLTENDTKLFRNLEQNSLGYNNLLYIASILAELTLGNEQESSTCRVLLIEEPEAHLHPQLQIRLLEHLKKVSEDKENNVQVIVTTHSTTLASSVSVDSIIHLSKSTSPVATRIKDCGLAKKSQEFIDRWMDVTKSNLLFASGVILVEGIAEQMLLPVLAKEALASRDAGKNSLSDLGVSVINLNGIYFRHFMGIYCNFAIPSEKTKHEGLNIPVRCAGLTDLDPPKKIKECVEENKFIEKIVIPHDDEMYDGTNHAIKLVGEINSSKYARLYVSKYKTLEYDLAMTGNNIAVMSTVLYEIWPTDGEIKKKIKKIMDVNDDWSKKKSSERAVIANELLQYIENNELGKGYFAQSLSDNILNNRVKFETPEYIKNAILWVCQDGEV

SEQ ID NO: 62701 - protein, 594 aa, Escherichia fergusonii ATCC 35469
MPRWRGIKMTHFNSQQMDYIESSIASSIYLEACPGSGKTEVIAAKVAKEINNWTLSPSGIALLSFSNSATDELFSRVKKYSPDTVSRFPHFIGTFDSFIFKFLIGPNAKCLTHFEGECNKNTLRIIESASPLFIQTKYAYNKRGKIKAHHYTFDRRNDSILFNSDSPELDRMRNAINLQEWQIKDLIETKYKLFKSGLMTHDDSLFLAAEIFINEKYKNYALLLSKRFPLIIIDECQDLSYEHLFILQGLHDLGVKLHFVGDLEQSIYGFRAVDPKDTIKFITDNEFERMPLKINYRSCQQIIDLCSKLTAHDGVNGQFSSIESPCIVLQYNETPLELIDKIGQLCFGYSNNVIVARGHSILEKFTFNGVEDNIVKNLVNAINIFSLHGTQNIKNSLQLFSTVIRARSNHPIRESKYNCPNEIESSVQWRAFLFYTLEYFIENKLNNFELTWSKWCKNANAILINLHQQPFITDELKPIVEEVFSLSIKAPSGLAKINVSEFTAIEKVNTENYKYATIHSVKGETHDVTILLSSPSNSGNNGSHWKQWISNQKSESTRFAYVASSRPRYRLVWGVKKLKNSEADTLRKLGFTIE

SEQ ID NO: 62702 - protein, 696 aa, Lactobacillus rhamnosus GG; identical to SEQ ID NO: 62508

SEQ ID NO: 62703 - protein, 595 aa, Lactobacillus rhamnosus GG; identical to SEQ ID NO: 62509

SEQ ID NO: 62704 - protein, 695 aa, Streptococcus suis SC84; identical to SEQ ID NO: 62538

SEQ ID NO: 62705 - protein, 605 aa, Streptococcus suis SC84
MVKSDDWFPKGVIKLEDAALEVVKDVTNSLVIAGPGAGKTELLAQKLDYLFSTNKCISPKKILALSFKTDAAANLKDRVKKRYGDEYASRFTSLTYSAFEKRILDQFRDVLPEDIRPSRDYLIEDWDTIKELLSMNGINVNGWRMSDIRNFVENIILNDGNTHKLKKDLLKGTQDNKPVLLYRQITKLSTQIIATNEYIRKALQMTYDFVFLDEFQDTTYAQYNLLKTCFLGSSCKLTAVGDNKQAIMRWAGAKPDIFPDYIRDFNSNEYQLLMNHRSVPKLVKFQKEVHQILNSNHSSIQPNNYPEFQEGEITLFEFENESLEAELIANDIESKIQGGIRPSEICILAKQKVDDYSSKLITTLNSKGIKARIENEYQELLKDPTCNLLLDLISCSQGKRDPLIWENISNFYGNINGIDEFTDELILAKSYKEIDNIVSDITYLISNFIPNEESMLNLIDCIIEKIDEKRIISNFSTYNGKSDLDIIVKNFSMLLYKEYSQTQGEWLDIVSSFKGENSISIMTIHKSKGLEYEAVYFLGLEDSAFWNFNNQPEEDKSAFFVALSRAKSHLIFTYCKLRNNRAQNNRNINEIYSLLTQSKLVKVGN

SEQ ID NO: 62706 - protein, 695 aa, Streptococcus suis BM407; identical to SEQ ID NO: 62538

SEQ ID NO: 62707 - protein, 605 aa, Streptococcus suis BM407; identical to SEQ ID NO: 62705

SEQ ID NO: 62708 - protein, 729 aa, Staphylococcus aureus subsp. aureus TW20; identical to SEQ ID NO: 62500

SEQ ID NO: 62709 - protein, 597 aa, Staphylococcus aureus subsp. aureus TW20; identical to SEQ ID NO: 62501

SEQ ID NO: 62710 - protein, 728 aa, Streptococcus mitis B6
MFISTLQIRNFRNYESEIFRFDNETNTIIGENDSGKTNALTALRILLDDSYYYSSKTLKESDFFHGIQNGWQGHWIIISATFEGISEEEFDNEICASISLNSESQTILEELISNADKGVGSISLFIRPNKAIRKQLFDISTELDSHQFNEFRNSIRLSDYEFYYTSKSNLNFCINENYDKLVGRLNDNIASNPEEDDEALLGSRIDMSDIFKHISVVYVDALRDVLREMKNNRNPVKRIMETIESKISSDNVESLKTIIQQLNETITSVPEIRKIGENINRQLNSIIGSVYSPNLLSSTMSDDMGSLAKFLSMKPEQNIDLDLLGLGHLNMIYLALKIVEFEACRSRELLNIMLIEEPEAHIHHHIQKTLFEGLNLQKNYTQILMTTHSVHLAEVSEISRMNVLKSFNGKSIVMNPANNLNSFAKEKLKKNNLNLINAVERYLDVKRNGLLFSKGVILVEGDAEEILIPQIVKKLFGINLDELGIGLINVGSTSFEYIASLFDDDRIQRKCAIVTDLDEQAIPSEHRLYKSTAQEKGQARKEKLSSLFNENNWVNCFYANTTFEIEFLDVNKENILTYVSPIIDDAFKDKKTITAYKEEIQSEQYLERNLAMLKLANHVGKGWFAIELGEKIDFLIKIPKYILNAIAFACQEIVDLSIYKKILLHTIDLYEETTELSALSASLKTSDTADLNIAIISLLEYFGKDEDVVYLINQIENYTKILYAEVSK

SEQ ID NO: 62711 - protein, 597 aa, Streptococcus mitis B6; identical to SEQ ID NO: 62501

SEQ ID NO: 62712 - protein, 656 aa, Streptococcus gallolyticus UCN34
MDSLYISRVVIKNYRNFKDLDVNLQHKSVIVGENNVGKTNFIKALQLILDPSLSDEDRMLSESDFNDSLKNPMENNQEILIQIYISNYRRNVAIMTMLSDATVLDAEGNEVLLLSYKFFPHIDEFGKKEYQYEVYMRDDMSRKFGSRERKYLNIKVIKALRDVEADLRNSKKSPVKKMLDDYKISKEVLENIASEYKECGDRVLDLDEINDMTMHINERFSEILGNHDYDISLQAMEVDPTRVLGSLKMLMANRSVSDSSLGLDNILYISLVLQMLKDKTVPTFVSGSEYSELLTKENSEIIDECYISNAGGNYVLRTDLNEENYASLYTFMADNGHGNNAVTLLAIEEPEAHLHPVYQRLIYKDVINRNGFPILLTTHSTHITSVVPIKSLVHLHQEAGNTVAHSTASMPMLEGEFLDVERYLDVKRGEIFLGKGVILVEGIAEEYIIPKLAELLGKPLDEKGIVVCNINCTNFKPYMKMLNSLSIPYAVITDGDFYIENVDDRDDSNRNYHVMEKDVKDNDTCGSLGRENAIKTFEALDDSVPENVDLALYFSERGYFIGKYTFEVDMMECTSTEAGERAFTDTFDQLVESSRKQNNFKNRLENQDYEFCLRRIEDQSVGKGRFAQIFSGKCVTDNCPDYVKNAIEYIYAKVDE

SEQ ID NO: 62713 - protein, 609 aa, Streptococcus gallolyticus UCN34
MSTTTYIEKLSRIEKDEYQKAAFDSQSNTVVLAGPGSGKTTVLTLKAMHLLNGVIAEPRGLACLTYSREAAREFTERLKELGLVRGNNIFLGTVHSFCLTEILGKFCDVYSLNIPTPIKIASEKQRAKLFEIAKKNVGCNDKYFKIERMNCTRMLSISGVSNICVDRDETAEIIANEYEKLLNQAGVIDYETIIIESTKLLQEKPYVRECISAKYPWLLIDEYQDLGRPLHEMVLTLIDNTKIKFFAVGDPDQSIYGFQGAVPDYLIELADRPDVQKITLLNNYRSNQDIIDGSELVLNQQRGYVAKTRENEDAVYKFIEVNEELDDQIEYFVKRIVPGLVKNGIPYEEIAVLVGNNSECNSIALRCQKENIPYYIVKHQFNRSDFVKWVENCASWIEGDKDIVFSDIGDFWISLITVNGAMYLTDEEKLIIRERLYKVLVESKDYEKSLTKWFEYVRKELCFDKYLEQNTYFQDEKDNIDNLMKEMSGSEYKEYGIDKFSKIGKPENQIVISTRHSSKGLEFEAIVMMGMEEDHFPSYYVKNDARLLAEANRLCFVCVSRAKRVCILMKSSYYTIKTKNGPWRKEFKPSMYWNILYSKYGNINTKQLH

SEQ ID NO: 62714 - protein, 679 aa, Clostridium botulinum A str. ATCC 3502; identical to SEQ ID NO: 62576

SEQ ID NO: 62715 - protein, 593 aa, Clostridium botulinum A str. ATCC 3502; identical to SEQ ID NO: 62577

SEQ ID NO: 62716 - protein, 698 aa, Flavobacterium psychrophilum JIP02/86
MKINKIKIENFRLLKNFQLDLENELSLVIGKNNCGKTSLLAVLDKFLNQSDKTKFSFDDFNMDFKNEIKTLVENPPVDDEVFEQKGIKLKLFIEYNEDDDLSNISRVMMDLDPNNNFIVLGFEYVLDLEKLNKLRIDYNEFAKKEAIKTKKKKDDEPKLVKDLIYFLKANHQDYFLFAKKSIEFDLSTNEENELNFIDLIKEKISIKEIINFKFISAKREVSNKEVDKTLSIQTSKIYKKTEASDEQQEAIDDFKDKLSDTDFVLSDIYSNLFKNVIEKVKTFGGIKKDDSIIEIVSTLQHRELLEGNTTVMYNHNESSLPEHYNGLGYMNLISMIFEIEILIQDFKNSKDEKPSDINLLFIEEPEAHTHPQMQYVFIKNIKELLKQGIKRDDGQSGELQSIISTHSSHIVSESNFDDIKYLKKNDNNSVIAKNLKELKEEYKANTKQYEFLKQYLTINRAEIFFADKVILIEGDTERILFPTLMKKYDIDEEKKYKNLGTVDDSLPLLSQNISIIEVGAYSQIFEKFIEFIGIKTLIITDLDTVGLDDKKCEPSIGVSYSNDALSFFFNDPTLTDLKGFTIQNKIFSNTNGLWNVDANGKLCVVYQILENGFNSRSFEDSFIHLNREFITPLKDEFKGLQNRTNFDNTANNAYLLAEHCIKKKTHFALDILYNSNDDFSNWQIPGYINEGLLWLKQD

SEQ ID NO: 62717 - protein, 633 aa, Flavobacterium psychrophilum JIP02/86
MVKTGLVLEKKDEFQEIMEHIKNGNNFLLSGGAGSGKTYSLVQVIKQVIEDNPTSKVACMTYTNAAVKEIEERVNHDNLNVTTIHDFLWDNIKHFQKDLKSTLVKLINDEDVTKIKIENETVPFDYFDSLEDEIQYKEYLRLKEGIISHDELLIVANSMFQRFPKLCDILKDRYQFIFIDEYQDTHKEVIEIFLTHLNQSKKKNIIGFFGDAMQSIYPDGIGNLDEYKGDEAEKVKEVKKDQNRRNPKLVYELANRLRVNADGLIQTHSDENNAPNMSVGIVKEGNIKFAYSNDGNLQTFRDYLGWDFSNSKETKELNLTHNLIAGKAGFRGLMEIYDRDRIIELKNKITKKIKEDNIEISEEATFGEVIDQVNLPVKSSTQVGQFITQNNDLYTTARNYPFTVFRKIYLDKDQLLDDKKQDKEDENKKGSKRDHLIKHLFKIQNNISLYQNRKYNEFLRITDFRYNFKNIEQKRLLQKNIIELIDVGDKTIEQIITEANEKGICLVDDNLMRFITEKEYVYNRVKNIRFSEFQKLYDYLEGATPFSTQHKTKGDEFNNVLVILDNGKWNDYNFEYLFLNIGSPSVLERTQKIFYVCCTRAKENLAVYYHNPKPTVIEKAKELFGAKNVVCLD

SEQ ID NO: 62718 - protein, 600 aa, Bordetella petrii; identical to SEQ ID NO: 62594

SEQ ID NO: 62719 - protein, 550 aa, Bordetella petrii
MGGPGSGKTHVALVKARDEIRSAKLLSGQRILFLSFARPTVARVLEKAKELITADDLRLLDVNTYHGFAWSVLRSHGYLLSNGKPLQLLPPPEGSARLAHFAKEQHHQEKLRLFHEEGLLHFDLFAQLTAELLRRSRRLAGIYTATYPILVVDEFQDTNADEWAMVRELGRGCRIIALADPDQRIYEFRGADPQRLKEFVDQFDPLPVEFEGENHRSAGTDIATYGSDFLTGKNKGAVYANVSVVEYGVYYGRGPHFHAKAQLIQAIKRLRKEPAWSIAVLVPSKAFMLQVSDYLSAESDGMPNLRHEVAMDAESPALAANVIATLMEGGPSELLAARLLSALHTHIRGRSGTKRPAQAELDMADAIDQYLVSGKIRGKNRQALISECARLAALRQDVVFTGHPEEDWLTARGLLATSAVGQLSRVAADAKYLRLLHKGSNLRASLSELWRSQGQYVGAIEAVRGALLQEHFTAAAKEWRGVHLMTIHKAKGKEFDEVLIYEGRYAGRIVPANADTSRQSQALLALRVAVTRAMKRATILTPSGDRSIFL

SEQ ID NO: 62720 - protein, 597 aa, Acinetobacter baumannii AYE
MHLKNLKIRNFRNFESIDIPLSDNIVLLGENRTGKSNLIFAMRLVIDQNLSDSARQLKLSDFWDGCDLFTKPQIEVHLDFTDFENDPDLTALLTDYRLASDPHTVRLSYIFRCKAECTGLPTSSEDFEFLIYGGDVEEKPINNQVRRRISLDLLDALRDAENQLGSWRNSPLRPLIENAMRAIDSTTLTTISADLEAANKKIVEQPQIKVLDSSLSKQILSLSGKGHDLKPSLRFSNADPLRLFRSLGMYIDEGKRSINEASLGSANVILMALKLEEFSWRKEKNERNYSLLCIEEPEAHLHPQLQRSVFKNIFNEKDSAQALIITSHSPTLAAVVPLRSIVNLRQINNSTKAFSLANLPIDEDEKDDIERYLIATRSEILFSKGIIFVEGDAEEALIPSFAELLGYDLDGFGITVCNIGGVNFKPYVKLASSLGIPFTIITDWDPLDGTKQPLGKKRTVEIWDAAGEVNLSTFRLTQEQREWCDNASYDQFSAQWAKYGIFLNDQTFEVAIAQTPNLSEILLDILDEQGFGPQRTQRIKEWRGDHTKINNENLLSMIKDIGKGRLSGKIKKRITASGTINPPAYITNAIEYMVKNV

SEQ ID NO: 62721 - protein, 593 aa, Acinetobacter baumannii AYE; identical to SEQ ID NO: 62631

SEQ ID NO: 62722 - protein, 654 aa, Proteus mirabilis HI4320
MHIERINLQNFRSFGPEGQSIAVDPDLTTLVGANGAGKTVLMQALQRMFGISNEQRTIRRQDFHIPSLEEEIPSKRTLTLEAIVAFPELDDEDGDHSVIPDFFHHMSVTDEGGKLKCRLRLDAEWEDDGSIDGYITSQFRAVTTWGEPEVADFQNVRPADRSRIQLIYVPATRCAVSQVSAFLKSRLWKAINWSEQVRSSFTQKATELNESFEGEKAISIVTGKLTERWHELHSAGTDSTPKFRPVDLRFEEFVRKVEVLLHPDESGRDRSIDELSDGQSSLFHIAMTSATLDVETEILAQPESEDFLGADLFLPSLTILALEEPENNLAPYYLSRIISQISSLVHGLRAQAVLSSHSPSILARIQPTQVRHFRLATESNTTVVRQLTLPYEENEAAKYIQQAVRAYPELYFAKVVVLGEGASEEVILPAISEAMGIPIDKSFVAMVPLGGRHVNHMWRLLTDLQIPFLTLLDLDWGRHGGGWGRIKNAVAKLIEYGLDPSEIFGQNLNLLGYQHNLAAFDNYPVSDWNNINQWVQWLRRHKVYFSSPLDIDYSMLKAFTSHYRVVPDESSNGPSMHGDPGNAVMGDEGYPGFYADDVLNLRWYRYLFLGRGKPSTHIRVLGSIPPDQLAQNAPEELRALVLAIHTTLQNQEAR

SEQ ID NO: 62723 - protein, 630 aa, Proteus mirabilis HI4320
MKFIRPDHWQPKGIDDLEPNAWQALRQRESTSIIAGPGAGKTEFLAQKAAYLLETGLCPSNKKILAISFKTDAAKNLADRVKERCSEEVSNRFISMTFDAFTKNLIDRFRMALPEHHRPSKRYEISFPSFHQEKQLISSFRNNFGNAVGIYSFTQRLQNMNQFIGSVRIGDPKLSWLEEEFLTFWLSQQINYPDGVSRVSFPALNRLAEYIVRTNDHVRRSIRASYPIVFVDEFQDTTFAQYDFLSSVFKSSEAEVTAVGDYKQRIMGWAGAKGDVFHQFEADFSAERHSLLLNHRSSPELVRIQHVIAQAIDHEVREVQTSNINLISGDAAWICCSYNINQEAAHLAEWIANDLLGRSLNPRNYSILVRQKPEDYEQQLSYYLAQHGLSLRNESVKIGQTTLQDLLAEELTILFSTLLRLGLVRRNAQAWNQLSSDIRILRNTNQEDEKALRQVERELTKFISTLRMLMQQPLTRENGRDVFERTIKFINSDDLRSSFSRYATGNLLEINLAALEEFFINCVDTQNSWAGLLDEFEGTNHIPLMTIHKSKGLEFDTTIFMGIDDNAWWSYKQGDKEGLSTFFVALSRAKQRAIFSYCQQRGQRTNVADFYELLTAAGVQEYAIQPSVVA

SEQ ID NO: 62724 - protein, 595 aa, Xanthomonas campestris pv. campestris
MRISRIRLINFANFSDIDIETGESIVIVGENKVGKSNFIRGLQLILDPGLSERDRQLRLEHFWDGLGEDKVGETVEVSVDLTDFTDDPRLMAHLNDCVIDPGPPMVARLTYRFQPKTGLGHAPESLKDYEYVIFGGDDPDMRIGGALRRMLPIDVQVALRDAEKDLASWRNSPLRPLIEDLAASLNDDTREEIQNQVDQAQRELAGHEEVVATAERISERLIAIAGEQHAVPMSLGLAPTRVDALLRSLRLLIDNGVRGVGDASLGTANLIFLALKSLELDRLVSDGERDHTFFVVEEPEAHLHPHVQRLIYRYFLGTGAEDGDEQPPLTTILTTHSPHIASVAPIRSIVLLRHDAAEGKTVAVSTANAPFTQRDEEDLQRYIDVTRGEIFFSRGVILVEGDAERFIVPAFAEVLNIPLDMLGITVCSVGGTNFTPYVKLLGPEGLNIPHVILTDRDPTNGNHPLVRRRLINVLDVIEGGVDHEELDADEVIKLAEQYGYFVNENTLEPELFAGGLAEDMQEVIREELPRLRRETLNALQQWVDDPAQIDEDLLLRLIERIGKGRFAQALAPSVSEDVCPAYIRSALEHIRDAIA

SEQ ID NO: 62725 - protein, 604 aa, Xanthomonas campestris pv. campestris
MPSRSVSTAYLAQAVELAGNPGQLAAYNSRGHCVVLAGPGSGKTKTLVLKLARILAEDVETPRGAACITYSQECARELTRRIEALGLRQAPNLFIGTVHGFCLRHLLMPYGRLAGLPIPFPLSVATQRVSDRLLKQTGDALFGQNHPYKVIDLGRHRRSVLNRNSVAWRSEEELAAWAEAYEAGLRDEGLIDYDDMVVFGQRLIADNDWVLPLVQAKFPVLVVDEYQDLGVALHRIVKRLAFDGGVRLFAVGDADQSIYGFTGADGALLIELAARSDIEPVQLQLNYRSGAGIVTASEMALGEARGYQASDPARQTTIEFLLRPGGMADQAAHAVAQIIPAALASKPGRTLGDIAILYKDYRAGDIVAEAVATGGLDYIRVDTAAPYRKVALTSWVEDCAAWCGGGWRVGRPQLRGLLDRYRAFHRASLDDAQARREEQALTALLWELRADQQPAREFVASLRDGVVDHLLAVELALADQEEQLDRMTAALAEGGALASLDITSLGGRDGSPDHLNLLTLHSAKGCEYDVVIMVGLDLGNLPWRNESPKKLRESRRLFYVGLTRARDEVHMLYSGFVDGRYGPMRLGRSPFLDELEARMRAAGI

SEQ ID NO: 62726 - protein, 596 aa, Sphingobium japonicum UT26S
MTVRISRVKISNFANFSEINLETGENIVIVGENKVGKSNFIRALQLILDPGLSERDRQLGLEHFWDGLGEDKLGETVEIAVELTDFTDDPRLMAHLNDCVVDPGPPMVARLTYRFQPKANLDRDPESLADYEYIIFGGDDPEMSIGPSLRRMLPLDVQVALRDAEKDLASWRNSPLRPLIEELATSLDADARAEIQEQVNEAQAELEGHAEVVATAERISERLIAIAGEQHAVPLTLGLSPTRVDALLRSLRLLIDNGARGIADASLGTANLIFMALKSLELDRLVTDGERDHTFFVVEEPEAHLHPHVQRLVYRYFLGTGADGEEDTPPLTTILTTHSPHIASVTPIRSIVLLRHDAETNATIAVSTATAPFTERDEADLQRYIDVSRGEIFFARGVILVEGDAERFLVPAFADALDIPLDMLGITVCSVSGTNFTPYVKLLGPHGLNIPHVILTDRDPNGASHPRVRRRLISVLQLREEGVSYRRLDADAVIARAEPFGYFVNSNTLEPELFTGGLAEGMQEVIEEELSIGDGTREELQGWVDDPDTLDEDALIALIERVGKGRFAQALARHVDVDTCPDYIRQALEHIRDAVA

SEQ ID NO: 62727 - protein, 605 aa, Sphingobium japonicum UT26S
MPLRSVSAAYLAQAADLAGNPGQQAAYDSTGNCVVLAGPGSGKTKTLVLKLARIMAEDVRAPRGAACITYSQECARELTRRLERLGLREASNLFIGTVHGFCLRHLLMPYGRLADLPVPFPLTVATTRQSDQAMKRVGDRLFGVGHPNKTMDLGRHRRSVLDRTSIFWTSEAELAAWAEGYEAELRRTGLIDFDDLVVFGQRLVSEHDWVLPLLQAKFPVLAVDEYQDLGVALHRIVKRVAFDGGVRLFAVGDPDQSIYGFTGADGALLQDLAERDDVERVQLRLNYRSAARIVSASEMALGEARGYRSNDPDRQAVIEFTQCADGLEGQAAHAIEEIIPAALAGKPGRALGDIAILYRDYRAGDVVAEAVAAAGLDFVRVDTAAPYRKVALTSWIEDCAAWCAGGWREARPQLRGLLDRWLGFHRARIPEAEARDEAQRLTQLLWSLRVEEGIARDFVAALRAGMLDALMAGEPSLADQGEQVNRMTAALAVGGALADLDLASLGGRDGSPLHLNLLTLHSAKGCEYDVVIMVGLDLGSLPWRNELPAARRESRRLFYVGLTRARDEIHMLYSGYVDTARGRMRWGRSPFLDELEARMEEAEDE

SEQ ID NO: 62728 - protein, 577 aa, Agrobacterium fabrum str. C58
MHLASLKIKNFRRFSETTIKFKSGLNVIVGPNNIGKSAVVDALRSLLAGADDPYPRFTVDDIHVPKLGEASGDIVFEFIFDDLDGNDEADFIHALREKPDNKLEAVLNVAFGDADKSGRLRPRRWCGAFEEVSMSSSMLDNLRSVYLPPLRDAEQGLRPSRNSQLSRLLHLLTDETGKEEVALHLKDLDAKLKELQVLKDAQSAVSGRHETMLGERLAQVLNVGLTGSDFSKLAARLSLLVDTFEIERNGLGYNNLIFMAVVLSELSKNAEASFRSLIVEEPEAHLHPQLQAVLLKYLSSIQNGVGERDVQVFVTSHSPNFASIADLNSIACLYEVDDNVASFHPGSVNFAKGKKEKLKRYLDVTRAELFFARRVIFVEGAAELLMVNLLATKAGFDLRNHGISLISVEGLNFDSFMPLFGEAGIKIPVSVITDADPQIEDAGGKKTAHYPSSTEAIIVSDNTKSMKALEDKYLKVFHGQKTFEYDFALEDQNRQAMLDALEDIHPVIAKNLRDVVAAEPDDAAKAKALFRGMFEREQNNVQKGRFAQTLAAKIEDEGLPIVVPPYIRFAVEHACQP

SEQ ID NO: 62729 - protein, 566 aa, Agrobacterium fabrum str. C58
MDLPAEPFVVSACAGSGKTKTAVHRVAAMQNRLTDRIGRILLLSFSNVAVETFQREYGMLVTNDKRRIGPIVEIDTVDGFLTKNLLRPHGHRVMGCDRCPFLVDGREPFLKHFTVWDGSKPARTADLRITMDGGKFSFRVGKWAGTAISRTPAVEALEKLGAVGAYTHESARYWAYRLLNEVPFVLRAIARRYSHILVDEAQDIGTIHQALLEKISDAGAELSLIGDVNQGIFEFTGATGDFLGNYHSRAGVTAKELNRNFRSVPSIVKIANQLSGRKDEPDRAAPDELSGAFYIAVDHDKRDEALLRFKKFLDKGSISQSKGVVVFRSSEVFNTWSGPGDPQGQGVIKSFVASARWRDQAKRFDQAFSQACAGIVGLLDDGHGDLLSLIKGQAVSQELRGVRREIWNFVKNPATGLPASNLDAVKEWHPQLVVRVKALLGRLEKQYGFVSGDNLGNRLKKTALPNGPLVEAPEGDEPQNLQFRLSTVHKVKGESLDGVMYVASRSNIEEFLAGTKTENGKIGYVALTRARNVFVLAVPSDAIAALKPLLDATGFQDGDVCALAGA

SEQ ID NO: 62730 - protein, 628 aa, Brachyspira murdochii DSM 12563
MYIRELIITNYKNIKNVKIDLQHEYSMIYLTGENGIGKSNIIDIIFKLFTYKKNLFEKEDFYKNEEKIEIEIKLELETNEIFKDYLYRDNNKYFMKIVYKQYSSNDEYEWFYKNLTEEYKLLNNILTNFICYKYSPREFDNNFMFNKSNRIGKFLSKIIENQIKKYQNDDNKLQKLLKENYENCKNELNEIFKPIFNKPNQELKLNIEIDDEIKFLLKLFELVHYHNDDNKLYLNQLGRGRGYYLYPFIDFLAFLYDKINNTKSQGFNTNIIILFDEPEVFLSPFLQRQFMDHWLSIFNNNQDYEIINNIINIITDNNNDEINYNITPIFFVSTHSAHIIPHLELNEKKNILSIQRLYYDKENNVKVASLDKYEAKLKQFMIFDRNILEGLFAKKIILVEGDTEIGFLPSCLNANGINIHQEHIYIIKAAPNNFPSLAKIFSKLQIKTYILTDRDCKNKDIKEQRNNKIYQTYVNKEYGYVNKRVYNLYESIKNCNNVKIFVSDYWDFEESILVCLKNHFKKIYISISKSNSNDKDKLTEKVQDENLDEEFTKKLLYMRKKHKNINDNYKLIKKIIKENLKLEQDEYKNEEKIDFGNMNSEAIKNAAEENYKLPKYIIDLIKELKNGK

SEQ ID NO: 62731 - protein, 540 aa, Brachyspira murdochii DSM 12563
MVNSDKIKKILEKHKDDKEQLDFIASTEQSLTIAPAGYGKTEMLISKLNYIIESKQIKYPKRILVLTLSNVAKHTIESRLNNNQIVDIYNFHNLASRILILQGKQYLNIDYKYEYKHYNLKDKLKKKYKNDKIEKILNYHREKISEINKKFHEIKFDDKIFQYVYTVNKNKEICYEYVIYIAIILLKYYKINEIYKNLYSYIFVDECQDINLLHFILLRSIADNEYNKIFFLGDTFQSIMKFADALGEQIEDLLKKYFNITKIIELQKNYRLEGRENISNFQKNIRNYDKKLQIELDENFQIKSFNDFEDEILFINNQINKITSENKKAKIAILCPTKYSLYDKNNKLIEKIESIFTNLKINNIEYINTLLFSDNLENEIYDKIKDIKRLNYNNIIRSIENYHFYNDDIKKLIEGYRNYCLKFGIDFNTIIEVIKEKDLIKYAPYCSVNVNILNIHKAKGAEWDYVFIPFVNKGKFPVFYKCYECRLNICDEIIDTKQYKEEFYQAFYVAITRTKCGLYITATKNNASCLFYHSLKLIDI

SEQ ID NO: 62732 - protein, 639 aa, Pseudomonas savastanoi pv. glycinea str. race 4
MKLCSLRISNFQSFGPQPTPITFEDITYLLGPNGAGKTAVLQALCRLFAFEPGLRRVRSSDFHVPVGLSNVEGSTTLWLEAEFSFAETEDDEDNDTVAPHFDHMRLQAAGDVPRVRYRLTATVDDEGDVEETLVYVTQTDADGNPTVSSIVPRHQRNQIHLHYIPARRDPSDHIAYGATALLGRLLRATQWGGDRNTVKDLTDQITSCLAGNASVTALGRSLNASWKGLHKGAFFAEPKLTFVNSDIEMLLRHMSVSFTPGHGENEVDFSRLSDGQKSMLYLSLVLAAHSINRDVRSGKNTAIDPAKLKPPAFTILAMEEPENSLSPHYLGRIVNALKGSIGVDAQALIATHAPSMLRRVDPENIRYLRLGSNRCSLVSGIALPAKEHVAHKFVREAVQAFPEIYFSRLVVLGEGDSEEIVIPRILQAKGAPVDESAVTIAPLGGRHVNHFWRLLSQLGTPYITLLDLDLARYQGGWGRLKYVNDQLALFEPPKVLPFTIPAWDSHEFKVRIQNGVSSTSPATLFDLLEQRGVFFSAPLDLDFAMLTAFPIAFSALPAVATSESQKAVLGKSHQGADQYSPQEQAWFDAYHHLFKLGSKPAAHLSALSSLSDAELLAGLPPSLDRLADAVIAALEESPE

SEQ ID NO: 62733 - protein, 560 aa, Pseudomonas savastanoi pv. glycinea str. race 4
MIHPDRWMHSPGLTLEANAWHAIKDTDHSLVLLAGPGAGKTEILAQRADFLLRTGSCRYPKRILAISFKSDASRNLKERVSLRCGWEQATRFDSFTFHSFANRIVSRFRVLLTDPDALKPDYSIGKEAIPGEQITFMQLLPIALKILRTSKIARNTIRQTYAHVFLDEFQDCTSDQYQMIKLLFEGTPALLTAVGDTKQTIMGWAGALDGIFKLYADDFAARPLRLYRNFRSKPRLLRMQNSVIRDIDPSALMPDEMIGGEDGVIRAGNFSSSAAEAVSLANLIHKWIEVEDLRPAEIAVLFRGEIDLYGEELMEQLTLRNIPFRNENTLQDLLKEPAARLMIDYLTCLYTRGSNKAWSRLMDLFAPFDDEWNSDRTHKSFELCYKQHQKKVKAAAKTTTPYADWWELAKAFFDILGHAVMTTLSSDYETKRRLKEIIRDTRDHISTLLQTEPDLLRALARFSDDNAVRFLSMHKSKGLEFHSVIVFGVEQQSFRGKIGEERQVFFVAVSRAKDRLILTTANQRQRPAGISASKRWDVARQPHVAFVTYVTEHLSPKQPQ

SEQ ID NO: 62734 - protein, 711 aa, Pseudomonas savastanoi pv. glycinea str. race 4
MHISRLQLVNYRNFKCANVVFNKGVNTIIGENGSGKTNLFRALRLLLDDTLLRAAYRLDEKDFHRGLGDWRGHWVVISLEFDEVSQDEAIQSLFLHGTGNIADGAIGKATYNLIFRPKAAVRRTLADLAAGDTVGLAEARSKITISDYETIFTGKSTANFLDPETYRQLVGDFDAVIFPQELTNPAIGGVIPGMLSISREVCFTFVQALRDVVADFQNNRTNPLLTLLKCRSGEIDPQSFEPITALVKGLNDAIEGLPDVGTIRTDIRDTITDAAGETYSPRSLSIRSDLSDEADRLFQSLKLFVGESEEEYEGAIHELSLGGANLIYLTLKLLEFKYQKQKESFANFLVIEEPEAHIHTHIQKTLFDRLNFDDTQIIYSTHSTHISEVNNVVNINILGRQDGRCEVFQPSAGLDAGQIGNIQRYLDAVRSNLLFAKSVVLVEGDAEEILIPILVKKVFGLSLDELGISLINIRSTGFENVAVLFHNERIRKRCAIITDLDRAFIDTTTDILDSDDKAAAKKKALGSQIAGLQREAALKELCARNTWLTAHFADHTFEVDFVSAGNVGTVVSVLGDVYKDGGTIATSKMELESGDIARFGTRVLTMARYAGKGWFAIILGRMITPETSIPDYILDAIFQAHIPVSIHTWARVLDYRVSILAASQLHALGDIDAMRAQIRRYHRGEIDFAGVRAEMLHAFPADGINTILAGF

SEQ ID NO: 62735 - protein, 557 aa, Pseudomonas savastanoi pv. glycinea str. race 4
MFVWDRKDLNDAQVAAIEHPGSVFLVACPGSGKTRTLTYKIARLLSELKSDKKRVVAITYTHRAADEIHERIEQLGVDTSQLWIGTIHSFCLEWILKPYGIYHSELKHGFRVINVHDTERMHEELCSAVQGTKLSSFDCAYYFTPNGYVLTCNKTNKHEAIGGVLQAYWKELRAERQVDFELILFYAYQLIENYPSISMLLGSIFECVLLDEFQDTREIQYAILASILKASKDGTSAFVVGDPNQAIYGSLGGYAITAADFGTQCGIAFKEMELSDNYRSSSRIVSYFGNYNVLPSKIESVGKDKDYASVVSFDHQTHRDALEEELVRLIKFNVETLGIAQHEVCIVAPWWVHLASMTRRLVAALPAYSFDGPGMVPFARDVDNFWYKLARIILTEASPQLYVRRMRWAGEVIADLRDAGVEVPSLDRKTLLRACNAITITITITITETDGLAFLRTFFDQLCSTFGIDRHTYAALQEHHDAFFECSQKRIDKLIKEGAEAIAELGMFRKVFADRTGVTVSTIHGVKGAEYDAVIAYGLLEGIVPHFSDPNQSRDSE

SEQ ID NO: 62736 - protein, 679 aa, Lactobacillus salivarius CECT 5713; identical to SEQ ID NO: 62494

SEQ ID NO: 62737 - protein, 563 aa, Lactobacillus salivarius CECT 5713; identical to SEQ ID NO: 62495

SEQ ID NO: 62738 - protein, 688 aa, Clostridium ljungdahlii DSM 13528
MNLKKLRLCRFRCFGDDEQEIYFNNLTTLIGNNSCGKTTVLQALLKLFSYNSNERNLIRSDFFLPKGVKPDEMQKQDLYIEAVFDFPELDDKNIENKDSIPIFFRHFIVEEPSGKPYLRIRLEASWEKGNNVDGSIESRISYIVCPEEDQIKEEDRKIANRHELDKIRMIYVPAVRDPSKQLRNVSGTMMYQIMKSINWKDDTKESVDKKIEELNEEFEKETGISILKDSIRTQWKNYDSDYRYSNADMRFNNVDMDSMLKGSEVVFSPTVTGRKYCIDEMGDGLRSLFYISLVNSMLEVESVIRKEMNLKSEKRSFNITPPVLTLVAVEEPENHIAPHLIGKLKNKLNDIAEKEDAQTIITSHSPAIVKRIDPEDIRYLRMYPDDLSTKVKIIHFPLEEKYEDRYKYIKEAVQAYPEIYFARLVVLGEGDSEEIVIPKLLELSNGNVDSSGISIVPLGGRFVNHFWRLLKDLDIPFVTLLDLDQERYGGAWGRIKYVLQQLIEVGENRKKLLKCKDGILSKDDFEGMINWTVEKDDKCMLSWIELLENYDVFFSAPLDIDFMMLECFGDTYKSILENNEGPYIKGKEDGKGKISYIEENEIDSAEYKERVEHDVHCTLKENGGDGQSYSKKQKMLMVWYNYFFLNRGKPSTHYLALSKIDDKELMDNAPDVLKRMIKRIEEKLNPTI

SEQ ID NO: 62739 - protein, 623 aa, Clostridium ljungdahlii DSM 13528
MEKIISEDKWFPADGIVLEENALSAIKEKNNVLVVAGPGAGKTELLAQKACYLLQTNKCNNPRRILAISFKKDAAENLKERVEKRCGKEQAERFDSMTYDAFAKQLLDHFYRGLPKEYRPCKNYAVNDDKSIEFSFKKSGFVNNSGKNISKFKKYFYDQLSSVTLPLEKSKSTNITERAWKLLLNGNGVDVKSCLTFQMISRLAEYMIRTNKYIKNALRCTYSYVFLDEFQDTTEIQYCLVKTCFMNSNCNMTAVGDNKQRIMLWAGALKNIFNDFCSDFSAVEKLLLMNHRSAPKLVQLQKMMYESLRDDTKEIICSEKWNKNDGEIYLYEFNDYHDEAKVVAMSIEKKYKSGFMLNDTCILTKQKPEKYTKDLIEELKKRGIRARIENDYQDLIKEPVTKLIINVLSLIFDNKRPDSWKYLVDYLSIAYKEQIDSDYDFLIEKESKLSHILKGYREDLSSCDDIKLFEDVVNGILNFCDIGTLKSIYPQYMQEDCFKYTVEKLITLLWNEYEEVGKNWSKTLESFKGLHSVPIMTIHKSKGLEYDSVYFIGLEDSAFWNFKKQPMEDRCAFFVALSRAKSYICFTFSKNRNVGFNNVQRHRNINEFYDLLENSKIAKVVRK

SEQ ID NO: 62740 - protein, 692 aa, Chryseobacterium gleum ATCC 35910
MYISQIKITNFRNFENTTVDFNDGINVVIGHNNAGKSNLVSALSLVMDNSKSKRLNIDDFYKLIPTAHLLTSPPKVSIEITIKKGSYETEDDLVTVSTWLTRLEEDYEAKLTYEFFLPEKHVENYQTLVREIPENENQNKNIWNTIKHDFLRLYVVKIWGGNVVNQSTADVDSLQKFDFQFLDAIRDVERDMLTGRNTLLRDVFDFFMDYDIKIHPTKTAPEKHMDIKERKIEFSEKAEELVGLLHRRIASGKEEILSYAKDTGASFNNAVPDFEGVISETELYSVLKLIVEYETGIKIPATRNGLGYNNLIYMSLLLAKMQVNNDVNYLDSNAKIFSMLAIEEPEAHLHPAMQFKFLKFLDENKTKRKVRQIFVTTHSTHITSAVGLDEIICLHNNEGETIVAYPGKTFVNAEGQPLDHSKKYVERFLDASKSDMLFSQKVLFVEGLAEQILATVFAGYEDKSLEDHHVSVINVGGRYFKHFLYLFDSEKDFSISKPVVCMTDKDPERKNRTVERSNFQKCYPFEYNSEAETFDYQQNSFSNEYQRETHPNITVYSQDSELGKTLEYEIAFSNPSLKLILTDSMKNRNELERLMDLYDHEDSTLENFFEILRESDENERIISGITLNTSLDLDGKKRSIIAARYLNSIGKGENALELAVVLKDNLLKKGTEEYVEFNVPQYIKDAIEKLCQ

SEQ ID NO: 62741 - protein, 561 aa, Chryseobacterium gleum ATCC 35910
MPVEISSDSLIEINKHFKVKAGPGAGKTHWLVEHIKNVTRNSTLISGAKKILCITYTNIAAETVLTRLGSSATQVEVLTIHSFFYSHIIKPYLSFIAEEYDFDVSSLDGHTDIIVSDYSFLQEWKALTGQKRITDDNLITYAFERLRWLLVDDELIVRTDYPFRFGGYPIKNSSYFDYKKMTWQRGILHHDDVLFFAYQIIKKFPFVIKIINKKFPYVFIDEFQDSNPIQVNIIEKLSTGSTIGIIGDVAQSIYAFQGATPALFDGFTLPEMEHYFLKFNRRSTNEIIDFLNIIRQDLPQDYHRTVSISKPVLYVGDMVEALRRAKTSCPDGYVYTLSRNNITSNAMKSEINGSGMDDKLLRKIKLEDSTKKRADLITACITAVALGQQSKFKEAIKVLENVINYRRNRLEGKKKALHYLTILMAKFNDYKDLSMLEFSEFIRLNINDSIPKATKGKGKIFYENNTFQSVYLCVNISEDLSYHRTVHKAKGDEFDNVLLILKEEKDLKFMYEPDLYNYTQEEHRIYYVGASRAKDQLFISVPTLDVNVEDIIKDMVNIQRF

SEQ ID NO: 62742 - protein, 703 aa, Chryseobacterium gleum ATCC 35910
MYISGLSIRNFRNFKSAHFKFTEGINTIIGENGSGKTNLFYALRILIDDSLPRYINFNSNDFNRGIGNWAGHWIVITVFFEGLDASEEAQALAVQSSGCMDTPSKGSYSVYFRPKYQFRKELYDYSILAEKDSEGLELLLDKITIADYEVVYLSRGSGDFSDDVTYEKYVGNFDKIEFPDPDEKEELVIGTYLPREISIHNEVSCTFIKALRDVEADLRSYSNNPLINLLKGKEKTVEITKQDEIITSIDNLNEKISSLDEIIEIKNGIDKSIKNAVGTTYAPSIDIKSELPNKMEKLFQSLKLWVGDPEDDYKGRVWELSLGGANLIYLSLKLLEYERVKTDRIANFLLIEEPEAHIHTHIQKTLFNNLSKSNTQIIISTHSTHISSASKISSVNVICRGKNEALVFQPSNNLLPNQIRRLERYLDAVRSNLLFAKGVILVEGDAEQILIPAMFEVVFGLSLDEIGVSLINIGSTGFENVANIFHEERIKKYCAILTDQDISVVKLPDSPENDTPNQKHFRASQKSGEERRVIITELCKDNEYLEAFYATHTFEVDLLMNENSPEFVSALDKIYRKESNIKLITKRLENPNIQVAGLEVLRLAKKYGKGWFALLITDELLYNTYIPNYILKAIAFASPHINLSSKVKSIMYRIEKIKNDKYCKTYYNAAKKFETKDKTDLEILEAFIKTFPQDQLTKFLSYL

SEQ ID NO: 62743 - protein, 591 aa, Chryseobacterium gleum ATCC 35910
MIFDKLNDEQRVAVTQSGNVLLTACPGSGKTRVIIHKLAYELDQLANTSKKKIAAVTFTVRASEEIFKRLNAMGINSDKIWSGTLHSFCLEWILRPYSCYLPELQNGFSMADESYCDELISSLKVKYKLKPIDPVNMRFDRNGNFLETKIIQKRLLEDYHSILKRKKLIDFELILFYSYKILQDLPRIPQILSKLFKIICIDEYQDTQDLLYAIISTIVRAGNGETSAFFVGDTDQAIYSSLGGVAKNIEQIKEELNDLPIEPLTLKGNYRSSQRIIDFYRQFQTQSIDIKAVGINAKTKGLITLNNTIDKAGIVEEISKLILLSLDKGIPEDEICVLVPQWWLITSISKKLRAVLPNVNFDASGLAPMARNRENIWFKLSRLFLTQPSPKLYSLRYRWAAELIDNFRIHTFSDLTEEYRNERSFLRLINSIKSNEIEGIDYLKDCFDQFLNIVGIDYKKNPTLVESWELFFTNIKKRLNDPEYVIPSDIQSFKSFYREMTGVVINTCVGIKGEEFETVIAYGLLNGYIPHWNEIFSGNANEASKKLLYVICSRAKTNLHLISETGRTTKRGDALTITSELEAVNFKYDNV

SEQ ID NO: 62744 - protein, 687 aa, Clostridium saccharolyticum WM1
MKLAKLKLYNYRSFGESEQIINFDELTALIGNNSSGKTAALNALNTIFSENSSDRILERGDFFLPKDKAPEDLEEQSLYVEAVFHFNELQKEKESTTYAIPTFFDSFVVESPGSVPYLRIRLEATWEKSSNIEGSIESKVYYITCPESEEIGEENKRIASRHDINRIRMIYVPAVRDPSKQLKNASGSMMYQIMNSINWKDSTKESVKGLIQDLNDEFLKESGVSILKNAVHDEWEEYHSDSRYSNAQLRFNSTNIESAIKKAEVLFSPTVTEREFSIDEMGDGLRSLFYISMVDSMLDVENKIREEIEKGKELSFSRTPPILTIVAVEEPENHIAPHLLGKLIGKLRDISKKCNAQTLLTSHSPAIVKRISPEELRYFRLIPDMLSTEIRHITLPDKEKLSDQYKYVKEAVKAYPELYFAKLVILGEGDSEEILLPKFLETNGDGVDSSGISIIPLGGRHVNHFWRLLNDLKIPHITLLDLDRERDGGGWGRIKYVLKQLIENGYNKKEILKVEGGVLTNKELDKMNDWDVNLIEDMNSWIEFLESYNIFFSSPLDIDFLMLENFEEEYKAILSKKEGPRISKKDEEDENTTIRIQDIENELSISPEYQERITCDVQNTLKECGGKGITYSDKQKRLMVWYNYFFLNRGKPSTHISALSQLDDSDLAWNIPSVISRLIDTAKKLLI

SEQ ID NO: 62745 - protein, 619 aa, Clostridium saccharolyticum WM1
MQERIPPLQWTPSGGIILEENATTSVKAEKNVLVVAGPGAGKTELLAQKTGYLFQTNICTYPKKILAISFKTDAAANLKERIESRYGKEYAIRFSSLTYDAFAKKILDQFRNALPEELCPSKDYIIGDKKTIDAAFKKSGYLNPRGLTPSRLAVYYENVIATTPLPVCGDSIGSNVWRLLIRGFDDNPSCLTFKMISMLTIYIFSTNPYVLRGLQATYSHVFLDEFQDTTSLQYDLVKMGFQNSNSKITAVGDNKQRIMVWAGARKTIFEDFQQDFNAMKIPLLMNHRSAPRLVDLQKLMYTSLQVDLIDLQTSKKWEKNDGDIKLYISENEDLEAKYLVADITEKISNGVSLKDICILVKQLPGNYIDTLVTVLSSFGIKARIETEYQDILKEFIVVLVLNTLKVSINRRSPTEWEYVNNAMEGLKGFDSTERSDAYDQEHINLINLLNATSEKLALDITETEFHEVINNIIQFFDIEKIKALYPTYAQGNFFEDIVNKMIDLLWKEFEECNNWNLSFENFQGLYSIPIMTIHKSKGLEYTAVYFVGLEDGAFWSFRNQPEEDRCAFFVALSRAKEFLSFSFCAYRHKLRNPNQKHTEINEFFELLKLPGISTVINCD

SEQ ID NO: 62746 - protein, 566 aa, Butyrivibrio proteoclasticus B316
MQLTYVEIQNYRNLGNLELSINRDISFIVGENNIGKSNFQKCLSNIFLCKQFSKDDFFDETLPIKVKFRLFLNYEEIGLFDDLTDPDDESSIEIIAEQSTPDDYIQYVHSQTGEAVKNSLIKRMNVITYDSLRNPKNEIDFSKTKGAGAFLNYLVSNYVCKNPEVGFYKKNELKKVQKSVSDALSGISAFDRFNIQPSVEENNVELLSKIVSLKDGNGVNVQSDGYGVQYNLLIILALLEKIMDFCKSKSDDETSFSSLIILDEPEIHLHPYLQRTLIADIQRLSKGQDEKFNALLRKQFGITEIKAQIIITTHSPNILFDDYHKIIRMYKHDGKTTAVSCSNLTLSESEEKQLYAQFMYIKEAVFSKAAIIVEGESEYSSFGLFAKKMGVDFDREGIALIKAGGAESIKPIMAMLDKLGISSVGVIDKDKKIEKNLPTQENLFYTTTMCFDSEIVKYLIKSRKRTALEKIITDTNLNGLTKKFQKKNLQKKADKFKFKGLVIDRDIAINECTEYTKMYELLCVTFFANEKGILFGRTIAENIDKADIPPCYKRAVKKVSEYARAN

SEQ ID NO: 62747 - protein, 603 aa, Butyrivibrio proteoclasticus B316
MLELIKKKISETHGSDEKQLDIIFSDADRIIVEAPAGCGKTTTLVSKIAYMIATKSFPQNKKVLALTFSVNAAYKMKKDLADKLPEMGLLDIREPADLNRRMFISNYHGLCRRILSLYGYLINPALKEINMFKAIGESDAKFDEFLSGEEIDLSEAQLEIVKKFGQAVSECDEETLKNSLNQYNEILILKFIEKKVITYNGYISLTMYLLEKNKELLNFYQKLFPVVVIDEFQDTNYLSWCFVKNLINDKTKLFFVGDPLQRIYGFIGAVPKLMDMAAYELNMVQMKLEKNYRFKDNLSMLSLDKNIRSNALNCKAPIIYNDSIVNLHISDSHEKECEWIADNVASLLKNDSDQKTSILVQQRGAGIDMIMEEFDQRNISYFYALFTDDDETYVSYHFDALEVFRKQIDRSRYHRVSKSVLDRTLSEIGSYYIGSSSKVIASLIDLTQAFFEKIIGEYAFLSDDEKYTFICDTFENRALKQNMDAIDARVFVSTVHGAKGLEWENVIIPDMEPYCFPNYYSLCGNCDFNTGRFSSGNYCKININNHDIDEFLEELSVFYVAVTRARKNLLFSASKSRYNNDGARKSSKVSCLLTLPGIKPQLV

SEQ ID NO: 62748 - protein, 385 aa, Desulfovibrio sp. 3_1_syn3
MNLFSILFELDATLNRIRRNKLETPSDVNILFIEEPEAHTHPQMQYVFIKNIKQLMSKKLVREDNISVNLQCLISTHSAHIVTNCDFDDIKYLKRLPSGLAVEAKNIQELQALYEKEGDAGKAAYRFLKQYLTINCSELFFTEKAIFVEGGSERILLPSMMLKMDKKHPQGLPLLSQNISIVDGAGSHSKIFAKFIEFIGLKSLVITDIDTYYDEPGDDGKPDHISCPSSASNALYTWNDSLRFFHCRDKNNDCKYFCGLDSTGKTVGYNPKTGTWQPMAGGNIFTAYQYGANGAYGGCSFEDTFIEENKQVIAEHGDCFESLRPKWFTDFKQTADSFTLAQKGIKKKSAFALDILLHDPEVLTASDDNPKNVWSVPHYIEEGLE

SEQ ID NO: 62749 - protein, 623 aa, Desulfovibrio sp. 3_1_syn3
MLSGGAGSGKTYALVKVLEKVIEENPHIGIACITYTNTAVDQITARISHDNLRVSTIHDFLWDNMQQFQNELQSTLLERIRDDEDKNFVLPDDVVVTDNLFSPLKYGIQYKEVLRLQEGIISHDEVILLANLMFEKYSKLCDIIKDKYRFIFVDEYQDTQIEVINILLRHASQSKKKNIIGFFGDSMQAIYDKRVGDLNDYLSAGTVHEVKLEQNRRNPQAVIELANKLRTDNIIQHPSDQIDAPNMDTKTGAVKPGTATFLYSSSSSLDLVRNFLRWDFSDALKTKELNLTHNLIADKANFPTLMEIYDKDKILDYRKRVKDFLRDNGIERDIYAGKTFGEVLDDLQTKFPKNKKLLPTAGMQEYINEHSDLFEAAKSYDFLEFFKIYIDKDHLIDDKKQTPEVEAKKGSSRDALIKHLFKIQNIISLYESRNFSQFLKITDFKIAKASDKKVLHDHIQKILNTESGKTIGEVIDLAHTLRLCLKGDALRRFVEKNRYIYDRVSQVPYAEFLSLYRYLEGQTPFSTQHKTKGDEFDNVLVVMDNGKWSQYNFDKLFSELGNPGSSPTNDAGILERTRKIFYVCCTRSRENLAIFFNSPSQSVLAGAQKLFMSDRIFNLDAAQ

SEQ ID NO: 62750 - protein, 729 aa, Staphylococcus aureus subsp. aureus str. JKD6008; identical to SEQ ID NO: 62500

SEQ ID NO: 62751 - protein, 597 aa, Staphylococcus aureus subsp. aureus str. JKD6008; identical to SEQ ID NO: 62501

SEQ ID NO: 62752 - protein, 711 aa, Pseudomonas amygdali pv. aesculi str. 0893_23
MHISRLQLVNYRNFKCANVVFNKGVNTIIGENGSGKTNLFRALRLLLDDTLLRAAYRLDEKDFHRGLGDWRGHWVVISLEFDEVSQDEAIQSLFLHGTGNIADGAIGKATYNLIFRPKAAARRTLADLAAGDTVGLAEARSKITISDYETIFTGKSTANFLDPETYRQLVGDFDAVIFPQELTNPAIGGVIPGMLSISREVCFTFVQALRDVVADFQNNRTNPLLTLLKCRSGEIDPQSFEPITALVKGLNDAIEGLPDVGTIRTDIRDTITDAAGETYSPRSLSIRSDLSDEADRLFQSLKLFVGESEEEYEGAIHELSLGGANLIYLTLKLLEFKYQKQKKSFANFLVIEEPEAHIHTHIQKTLFDRLNFDDTQIIYSTHSTHISEVNNVVNINILGRQDGRCEVFQPSAGLDAGQIGNIQRYLDAVRSNLLFAKSVVLVEGDAEEILIPILVKKVLGLSLDELGISLINIRSTGFENVAVLFHNERIRKRCAIITDLDRAFIDTTTDILDSDDKAAAKKKALGSQIAGLQREAALKELCARNTWLTAHFADHTFEVDFVSVGNVGTVVSVLGDVYKDGGTIATSKMELESGDIARFGTRVLTMARYAGKGWFAIILGRMITPETSIPDYILDAIFQAHIPVSIQTWARVLDYRVSILAASQLHAPGDIDAMRAQIRRYHRGEIDFAGVRAEMLQAFPADGINTILAGF

SEQ ID NO: 62753 - protein, 599 aa, Pseudomonas amygdali pv. aesculi str. 0893_23
MFVWDRKDLNDAQVAAIEHPGSVFLVACPGSGKTRTLTYKIARLLSELKSDKKRVVAITYTHRAADEIHERIEQLGVDTSQLWIGTIHSFCLEWILKPYGIYHSELKHGFRVINAHDTERMHEELCSAVQGTKLSSFDCAYYFTPNGYVLTCNKTNKHEAIGGVLQAYWKELRAERQVDFELILFYAYQLIENYPSISMLLGSIFECVLLDEFQDTREIQYAILASILKASKDGTSAFVVGDPNQAIYGSLGGYAITAADFGTQCGIAFKEMELSDNYRSSSRIVSYFGNYNVLPSKIESVGKDKDYASVVSFDHQTHRDALEEELVRLIKFNVETLGIAQHEVCIVAPWWVHLASMTRRLVAALPAYSFDGPGMVPFARDVDNFWYKLARIILTEASPQLYVRRMRWAGEVIADLSDAGVEFPGLDRKTLLRACNAITITETDGLAFLRTFFDQLCSTFGIDRHTYAALQEHHDAFFECSQKRIDKLIKEGAEAIAELGMFRKVFADRTGVTVSTIHGVKGAEYDAVIAYGLLEGMVPHFSDPNQAETANKLMYVVSSRARKNLHLISERGRSRGWSGDYQPTDVLTGCAFRYDQLST

SEQ ID NO: 62754 - protein, 778 aa, Pseudomonas amygdali pv. aesculi str. 0893_23
MHIETVWVRNFRRLKDTRIDLASDISIFVGANNSGKTSAAHALQLFTSASKDRFTLHDFSSECWDVINAFGEGADGVELPTISLDIWFCVTPADLHRVVDLLPSLDWQGSRVGIRVELAAADAGLLRSSFQEARASARHAQLQPAGEGVAQGYVEPAIAQDGYNPRPRDLCDFIADTVGDRLRRDFELRYYILDSAGFDTEFKQLDGYVPLRLVPDKGRSGRNVLGSLVKVDCLHAQRHLSDSNAGSRSEDLSRCLSRFYERNLEKRGEDYDAQRALYQSESLLNDHLERVFGPTLERLADLGYPGVNNPRLLIKTALNPATILSSHEGARVHYALGALGAAEVTATLPDRYNGLGFKNLIYMVIELLDVHGRWLDIEENRPPLHLIFIEEPEAHLHAQLQQVFIRKVLDILAVPEEDSPYCTSQLVVSTHSPHVLYERGFKPIRYFRRVADAGIQQSQVLSMAAFYEAAVDPNDPNDRTRDFLERYLRLTHCDMFFADAAILVEGNVERLLMPQMIAKAAPRLQSNYLSVLEVGGAFGHRFKGLIDFLGLTSLIVTDIDSVSPPAAGALAANGELPVDEDPADAEPDDNEGAEEAEARRKGRKACMVHEAGALTSNQTLIKWLPGHTTIDDLLAATAEQRTQLRDEEGGALVRVAYQTPVAVVWGGATQVRTGRTLEEAFALQNLTWTQHLDRKDLGLRIKGSNNLEIAGIAERLYRKVKSSSFRKTDFALGLLAQEPSAWTVPNYISNGLRWLEDLVAPPPPAVAEAEAPLNGGEV

SEQ ID NO: 62755 - protein, 632 aa, Pseudomonas amygdali pv. aesculi str. 0893_23
MTARIGQPDTQADIELRLCLDQRPQRSFVMVAGAGSGKTTSLVKALAHLGQTRRLKLNMRGHRVACITYTEVAVKEIWGDVGNDPLFHVSTIHSFLWTVIRPFQVNLKAWVIARIHEKIAEAQQHHDKPRTRAATRERLVKDIARHQRHLEAVRHLTHFNYGAGSDFGRGVLGHFDVISAAVELIEQSQLLRDVIASRYPVLFIDESQDTRPEVVAAFRRIAETTPVEFCLGFFGDPMQKIYLEGAGVIETAAGWEQITKPENFRCPQRVLQVVNAIREPDDGLSQTRGRMNWVDGNPEPVMGSVQFFLLRADDHRSMKLAKVREWMRRTNDDDHWVSDDPAADFRVLVVVHRMAAARLGFPNLYAALNDNDAPPSIKEGLKDGTAWPLRPFLNYLLPLATAVSENRKLDVMTFLRSECPLLQPTALVGSDPVAVLRALQASTTELARLIFSSDALLQDVLVHSQAAGLLRLDEAWTKYLGPDRTADDEDPEIPAVSAFLRCGVGELAGYRHYLEDLSPFATQQGVKGAEFERVLVLIDDEEGRGQRQFSYEKYFGIVEPSDTDLENLAQGKDSVMDRTRRLFYVCCSRATRDLAVVMFVQDIETAREKIAETGIFDSADIVDEETLEAALT

SEQ ID NO: 62756 - protein, 626 aa, Pseudomonas amygdali pv. mori str. 301020
MHLVRVRVQNFRGIAYGEVHLNGHTAFIGDNNAGKSTLLEAVDLVLGPERLSRRPVIDEHDFYAGTYVDPDKNEVVPIQIEVVVAGLSDEQLRHFRDHIEWWDSQAKTLLVGAPPEGTDAPHVGAAIRVFFNGWYDVEEDDFAGDTFYATPEMPDGSYLRFSAPDKRKCGFLYLRTLRTGARALSLERGSLLDVILRLKETRLTMWEDLLDQLRALPVGETEDIGELLVAVQDAVRHYVPSDWAEQPHMRVSDLTRDMLRRTLTVFMGTGAKRPDGSVYSAPYQHQGTGTINTLVLALLSIIAELKQSVIFAMEEPEIALPPHTQKRIINSLRQKSAQAIFTSHSPYVLEEFDPVQVVVLKRMAGVMTGVPATYPPAVKPKAYRTEFKARFCEALLARYVLVLEGRTEFDALPAAARRLAELDPTRFKSLENLGVAIVDARGETNVAPLGAFFRSLGKIVFAVFDKQSHEALATINASVDHAYESATKGFENLVLYGVSEVALRSYAAVVVAGGDWPQHLAACTPTPATPLADLQAALSSYFSWAKGGGDAGDLLASCPTASDMPEYVRTTLAAIKNVIEPPPLPTLPPLPPQLAGVPPPPEAAAESPPLAPAYGKFQPSPPQPLA

SEQ ID NO: 62757 - protein, 570 aa, Pseudomonas amygdali pv. mori str. 301020
MTKVWSDQKRDFLECARHALALGGPGAGKTHVALVKARNEIRSGILKPGQKVLFLSFARPTVARIIETASELISREDLKQLEVSTYHGFAWSILRSHAYLLNGRPNLQLLPPPEAAAHLADIDKAQHENEKRRLFEQEGRLHFDLFASLASELLSRSDRLSAIFSDTYPIIILDEFQDTNSDEWALIQQLGKGSRLIALADPEQRIYEFRGADPRRVGDFLENFGAAYFDFAGENHRSSGTDITAYGNDLLTGANKGKAYQQVKITRYDFMYGKSLHFTAKAAVFSALDRLKKVPDKSIAILVPSRRLMLEFSDYLSSAADGLPALNHDVAMDAEPPALAAGVIATLLAGGTASDVASRMLGALHSHIRGRRGGRPTPQTELDLAGALSGFLSSGKIRGSKRLLIVSEVQRISELRRQLQLTGDPAEDWLHLRGLLASSTAEALKQVATDARYLRLLHRGSVLRTNLGALWRAQGEYMGAEEAVRSALMQEHFAAAQKDWRGIHLMTIHKSKGKEFDEVIIYDGLYQRIAKVPQDPKICAQDLLVLRVGVTRAIRRTTIVTPKRDPCPLL

SEQ ID NO: 62758 - protein, 767 aa, Pseudomonas syringae pv. japonica str. M301072
MEELMHIQHLEIANFRKLLSVRIDLAAETTLLVGANNSGKSSAMLALRRFLVSKASAFRLQDLTLSHLVTIEAIGQAWEAAGAIPSANDWAEWLPTLDIWISAEQGELHHIRDLIPNFAWRGGLVGMRFRLEPEDMEDLYVDYRKQRERVEILKTEIQRLAAEGEDPPHLPLWPQSLHDYLNRRLGKMFKVRWYRLDPAQLQDPDPRTRSANRQSLSATSVALERNPLINLIRVHEINAQRGFGDSADEGHDDGKQSGGRKLSEQLRAYYNRHLDPGDSPDISDLGALRAIEAAQVAFDTRLSTSFEPALKEVAGLGYPNNSDPSIRVATRLAPTDGMNHEAAVLFELDSIGGAPGAPPLRLPETSNGLGYQNLISMIFRLMAFRDEWLKKFRTADEQSAAGVEPIHLVLIEEPEAHLHVQVQQVFVKHAYHVLCRDPLLERFPNLKSQLMVSTHSSHVAHEVEYQNLRYFRRLPAGMDGVQVPVSTVSNLSTVFGKKPQTKDFVTRYLRAQHADLFFADAVILVEGAAERMMLPHFLRKHFPFLDQCYITILDIGGSHAHRLLPLIDALGIVTLVITDLDAGSLRSAQPVQRDAGQQTNNPTLRHWTKAGGLPHSVDALLALADDLKTQQIDQLFAIRIAYQTPINIHLPLTGEQVEMLPNTFEDSLVLSNASHFSAKQARRGLMRAFARALNGAESSNNLASLLFESLRDGDKAEFALQVLGDPGFAELTIPEYIREGLTWLQSKLERKQRELLVVPTAITEVTA

SEQ ID NO: 62759 - protein, 631 aa, Pseudomonas syringae pv. japonica str. M301072
MSTTNDGLSEIVQRAEPDAALDADQIIQTCLNLDRPTSFFLYAGAGSGKTYSLVEAVRSFKERERERLIFEGRQIAIITYTNAACDEILRRLEHDPLVIVSTIHAFAWRMIQGFNDDIREWLRVKLGEDIAALQRQLVRSKGENKTTQTNRASRARKIRRLEELEQVTTFTYSPTGENRGRQALNHSEVIQMAAAFIQQQPLRDVMTDLHPVLLIDESQDTYGPLMEAFLIVQQQIPDRFCLGLLGDTMQRIYSDGKANLERAIPEHWAKPEKKINRRCPTRVIDLINTIRASADDHWQIPKEGAVEGAVRMFCTRQVAGRGFELEEEIAHRMAAFTQDAQWAVGQSGRKTLILEHKMAGRRMGFEGVFTPLHAAEHLRTGLLDGSLPILKLFMDDVMPILASAQQDSFSLMEAVRMRSPLLEPRHMKEAPDQLALMEQVSNATQELLALFEENDPLIADVVHLILSTGLLNVPDRLLAAQLLGVTDEEPPESIDRETLEIHAYQVVLGRRFSEMAAFAGYTQGLSPFDTHQGVKGLEFPRVMVILNDEEAGGFLFSYEKLLGVQPPSANDLKNQREGNDDSLARTRRLLYVTCSRAEQSLAIVVYTPQPEVAKQRVIDARWLKADEIEII

SEQ ID NO: 62760 - protein, 636 aa, Pseudomonas syringae pv. pisi str. 1704B
MFMYLRALDVDGFKCFGEPFTIEFHDGLNVLVGENGAGKTGVISAIRQLFNDSESGKRIISERDFYKGFDVGAVPAESIQIQATFSDLDKDDVIAFEDWCGNHDEAKLTFTALNQESRGRFRHHTYGGHEYTKALDTETLDYIHCVYLPPLRDAETKLREGRQSRLARLLKALCRKDLETARKAGELHPLEQHVGDFNRELSESDKFAIKLANQRIGENLKAALGMHLSQGTMIQFSEVSFSRIVEGLRLLYFPNISQADATQFRSLEENSLGYNNLLYIASILAELILEAEEDRGEETYLRLLLIEEPEAHLHPQLQLRLLRHLKTVAEARGMQVIITTHSTVISAAVSVDHIIHISNDEKPVAIPLRNTGLPDQSRRFVDRWLDVTKSNLLFSKGAILVEGIAEAIVVPELARIVLRPYGKGRDCLDDYGVSVTNLGGIYFKHFMQLFCDVNGEQPGADVPVRCAGLTDNDPPKSLKPIDDGKGGTKAVPFLPHADEHPVGNNPALSLQDPINRSQFGRLFAGMYKTFEYDIAMEGDNLKTMLTVAAGLWPVPDGSVVKGLEKNAKLDFAAMTSAERADYAGALLDRLDSDEIGKGLYAQSFADALEVLETDFVVPEYIRLAILWACGLEERPA

SEQ ID NO: 62761 - protein, 584 aa, Pseudomonas syringae pv. pisi str. 1704B
MMTFTQEQLDYLASPLDQHVYLKACPGSGKTEVVGAMVARIVQGWSRSPAGIAVLTFSNSATDELRNRIHKYLGEPIGMPHMIATFDSFVLNRLVASIASEITGYTGKEGDFRIRILDKTADIYRTRKSICDRWISACKYDYDLGANRFVFSTGERSLDNQLNAAAIDQDTFKDLIATKKRLWKGGFATFGDIDMLALKAFKDKKFDAYYSRVARRFPLIIVDECQDLSAEQLRIVEYLTEFGIKFHFGGDLNQSIYGFRRSNPDKVTELMAKLKFEPYELKTNWRSGQGIVDLCTNLLGGERISGNPDIASEQPRILEYKACPSELLPTIRAMTQAYTNVVLVARGHTTLQRLRNGETFEGIELLAVACIGASTGNLKDIKDSLRTFAKWLANKLELEVTKVGPYCPIVMESRLAWRKFIHESLKFMVANGAGNSDQTWSAWVRTAKLAIRQLPDQPFVPTELQDVLGGLRGLNLVARKGQGGKPVTVRVVSQEMLEGQPDTLRYETIHQVKGETHDVTVMVSSQQPGVHQSHWQDWLRDRGSEAARFAYVASSRPQHMLIWAVKKLKAEDRPVLAQLGFEVP

SEQ ID NO: 62762 - protein, 800 aa, Pseudomonas syringae Cit 7
MKLQAYRLQNYRRLRDVVIELDDEISIFVGANKSGKTSAVQGLYSMLRGEAKKFELFDFSAALWAEIDAIGRTPPGDEDAPKQLPSILLDLWFRVGEDDLATAMSLLPSTEWDGKCVGIRVAFEPQDAHALVRKFHELHEKANNAASALVARRSVGAEADAENAAAVVADPGEYKPWPESLTKYLTKELSKEYTFRYYVLDERAFVGFQPKEVDYAPLPLGKEPGGAAIIKSLVRVDFLRAQRHLDDPDAGSSDRAESLSRRLSRFYHRNLEKRGDDHAALKALDTSEKELNFHLKEVFSDTLKRLAKLGYPGVNNPEIVIRAALDPTTVLGQDSKVHYVVPGAITAQLPDSYNGLGFKNLVYMVVELLDLHEQWKAEEDKRAPLHLVFIEEPEAHLHAQIQQVFIRNVLRLLEDANDHATFFHTQLVVTTHSPHILYERGFSPIRYFRRVSEQLDHNTEVRNLSLFKTCAADAPAREFLQRYLKLTHCDLFFSDAVILVEGNVERLLLPAMIETAAKRLRSSALTILEVGGAFAHRFQELIAFVGLTTLVITDLDSVAVKTDAENAAEQDAGAGAVDGNNEEDDLKPFELEDDDEAAPGGKKKSKKRGSTCHAHVEGAYTSNQTLISWIPKKRLVAELWEVTAEQKTLSLAEGTSAEVRVAYQTKVLVTVGATTSQLCGRTLEEAFGLENSDWCQAEANRSVGLKLKRAPNSPEELAEKLHERVIGKNFDKTRFALEVLASGPLNCWKVPTYIAEGLAWLEAKVAHEIEADAAIANEVATIEPTAAGVVAVIAGAGQTT

SEQ ID NO: 62763 - protein, 643 aa, Pseudomonas syringae Cit 7
MSRRIDSPDTDADREIHACIAETPPQPFVVRAGAGSGKTTSLIKALDWVISEHGASMRAKKQKVACITYTDLAAKEILADVNDDPLVHVSTIHSFYWSITKTFQADIKVWLQNDLRRRITELEEEFKNYSSRVRQTTRDRNKADQQRYARSLETIAGVKTFNYGVGSDYAKGVLGHEDILQLADFLLQNRPLFRRVVALNFPFVFIDESQDTFPSVVKSFKEVEAQMRRKFCLGFFGDPMQAIFMRGSGDIPLEDHWRAITKPENFRCAKQILDVANAVRAQGDGMEQVRGLHERVDGELKPVEGSARMFVLPNTLNRIEALARIRAWSAATNNDEGWTTPDIALKILVIVHRMAANRLGFGGIYSALNDKTSEGMKQGMQDGTGWPVRPLLSFALPIVAAVKAGNEFAAMNLLRKFSPRLAPVALTGRRAAAVLRELHAAMSRLVAMLDEAGTTIGDIALHLFDTGLFEFDDRYVRVLGFVRDVADAAQEPEAADAVPAEGLSSDAAMAKFFKCSAQELWPYERYVSEGSPYATQHGVKGAQFERVMVVMDEEESDYRTYNYERVFASAEARAADRARALGGDENTWSRTLRLLYVCCTRAQRGLVLTFFVADPTTTLENVVASGILPRSAVFTQEVLAGWP

SEQ ID NO: 62764 - protein, 771 aa, Pseudomonas amygdali pv. lachrymans str. M302278
CRISLTEEETLLVGANNSGKTSAMDALIFFLDQKGRSAASIASGDTPAARKLSATDFTLSNWHQLNEFGQAWAAAEVGGDQLSDWQPLCPTVDIWLQVEKNEIHRVSHLIPTLKWDGGLLGVRMIYQPKNLELLKSDFVTHFKAAEQLKQTARDNAKKKRKDEELGQKEFVLSIWPSSLREYLDREVGRAFELKSYMLDPAKVEEIPNKDYKPQGLTEDQLPLDFYPFNGLFKVDIIDATRGFSDPNAATASQASTSNLASQINRYYNRHLNPTDLPGDEDLEALEAIALAQHSFDGRLNEVFTKPLEEIKTLGYPGFNDPHIRLSSKVNPIDNLDHEAAILFEIQKASLASGAPLLSLSEKYNGLGYKNLIAMVFKLMSYRDQWMRVGKAGKRKPDEDSFIEPLHLVLIEEPEAHLHAQVQQVFIKKAYSVLRNHKDLSLSKSFSSQMVVSTHSSYLAHEVGFEKLRYFKRKPAANSFQVPTAEVIDLSATFGKAKTRSEEVLQTAQFVARYLKTTHCDLFFANGIILVEGAAERLLIPHFIRNNPNKDTSLDNSYISILEVGGAHAHRLRALIDKVGLPTLVITDTDALAPPAAGAGPKAKASAVRPELGKGYKTGSHTLIKWLDVKDDTLDAVLALKFEEKISGKVRIAYQYGISIKFNDKEDGQAIPYTFEDAIALTNPAIFRNLVKPTGMIKKMQTALNLGTIELCCKALYDALEKGKAEMALDLLFCADPTLLAAPAYIQEGLDWLKTELEVASEDLVPGVIEPV

SEQ ID NO: 62765 - protein, 220 aa, Pseudomonas amygdali pv. lachrymans str. M302278
MKGKSMNTAISTPNAVVEQIFKYMNLDDPKSFLLFAGAGSGKTRTLVEALELMKQRYATELSMSGRKIAIITYTNAACEEIKRRIFFDANFMVSTIHSFCWDLIKTFTADIKAWLEVKLAADIEKLLSAIAKSRSPSGVTAIRNQRSLASKQKRLSNLEKIKSFTYSPSTSRAEKGALSHAEVLGIAAYLLASEALLRKILWNKFPVLLIDESQDTNKEL

SEQ ID NO: 62766 - protein, 598 aa, Pseudomonas syringae pv. aceris str. M302273
MQLTRVAIRNFRNFKDLDVPLSGNIVVVGENRVGKSNLLYALRLLLDPSLADSARQLGQGDFWDGLGEPLEDEKITILIEIQGFEEDVDLLAMLTDYRLDDDADTVRLTYELRPLPNLGRFPASDEDYEFICFGGETERKRFGHDLRRRITMDTLPALRDAEGDLAMWRRSPLRPLIERAFSEVSRDELGEVQEAIRTATNDLTQFDPVRTLEENLGAMYASMSGPNQYIEPRLGFSTIDITRLYRNVKLLIDGGLRTISEASLGSANVVFLSLKTLELKQLMNENRRDHTLLGIEEPEAHLHPHLQRSVYRHLFEEFGGAGDERLSILLTTHSPHIASVAPLRSIMLLRETRHEGTVGRSTAELNLTDEDEEDLTRYLDVTRAEMLFARGIILVEGDAEKFLLPVFAKSLGYDLDHLGITICSVSGTNFQPYVKFLTALEIPFSVITDWDPRAAARPLGFNRALELVRTILRIRNRRNPRRIIAELEALNFKDFEARCDGYGVFTNVDTLEVDLFEDGDFVAPILATLRDEDLSDERSAWVDGWEDDPDTLDIVNYIKVIEAIGKGRFAQRLASRVAGVEPPLYIQSAIDFVVRRVR

SEQ ID NO: 62767 - protein, 517 aa, Pseudomonas syringae pv. aceris str. M302273
MSDLGVEPGRRIFIGTVHSFSLTQIILPYARVARLGLPDDFHVATKSERDRALRAALDDMAKYPEPLREWEAKMNGYRQSILDRGRPEWLEINPELARLAELYEGRLRRMNLIDYEDMPLLALRALRENEWLRKALLAKFPVLVVDEYQDLGKALHKMVLGLCFTTGMRLFAVGDPDQSIYGFNGARPDRLRRLSERRGVETVRLRLNYRCATRIVAASGALLDEERDYDAVAGAPSGEVFFHPLRGRYEAQASVLINELLPQALARHPHLRLGDVAILYPAAWLGDTMVPAIQQAGVPFIRTDTNALYSRSSRLMHWLEQCAIWCCGGWQSGSPLFSQLTNTGKHLFSNAIRSDTQAAEFHRGLITKLWASREVALPLLGWLTDFRDRLLAPLGAECPDLADELTILADFIDRISPEGDSHGMCLGSLAGQSKGKDSLNLSSLHSAKGREFPVVFMFGADVGRMPRDGSTDPEVAEARRVFYVGLTRAEVEIHMIYTQGRASPFVSEVQRRIENGD

SEQ ID NO: 62768 - protein, 765 aa, Pseudomonas syringae pv. aceris str. M302273
MQIQHLEIANFRKLLSVRVDLAAETTLLVGANNSGKSSAMLALRKFLLSKASIFRLQDLTLSHLATIDAIGEAWEAADDSFPIPVANEWADWLPTLDIWLEAAQGELHHIRDLIPNFAWKGGHVGMRFRLEPDDMPTLFVDYRKERARVKELQQEIQKQAALGTQPPSLPLWPQSLHDYLNRRIGKTFKIRWYRLDPGQLRAPNPATRKANRQPLAATATPLERNPLTNLIRVHEINAQRGFGDSADEGVLEGGHGSGRKLSEQLRAYYSRHLDPGDSPDISDLEALRAIEAAQTAFDTRLSTSFAPALKEVAGLGYPNNSDPSIRVSTRLAPTDGMNHEAAVLFELDSVGGAPGAPPLRLPETSNGLGYQNLISMIFRMMAFRDEWLKKYRSPEEQSATGVEPIHLVLIEEPEAHLHVQVQQAFIKHAYHVLCSDPLLAKYPNLRTQLMVSSHSSHVAHEIDYENLRYFRRLPSGMAGISIPVSTVSNLSSVFGESNQTKEFVTRYLRAQHADLFFADAVILVEGAAERMMLPHFLRQHFRFLDQCYITILDIGGSHAHRLRPLIDALGIVTLVITDLDAGLLQVGKPVERKKGQTTNNPTVRHWMRAAGLGHDVDSLLDLSFDNKAQQIDDLFSIRIAYQTPITVRLPKTGLDVEALPNTFEDSLVLSNTEHFANKAGRGLMRSFTKALREAETSLELGTELFTKLKDGDKAEFALHVLGDSNFATLKVPTYIHEGLAWLQSKLERKSKELLIVPSAILEVTP

SEQ ID NO: 62769 - protein, 623 aa, Pseudomonas syringae pv. aceris str. M302273
MSRQPEAATDDVPDADQIIQECLSLDHPKSFFLYAGAGSGKTHSLVEAVKNLKSRERQRLTFEGRQIAIITYTNAASEEISRRLEHDPLVVVSTIHAFSWRMIQGFNTDIREWLRAKLTRDIGELNEKLGKARGQNKTFLANQASRDSKARRLDSLDEISTFIYSPTGDNRGRQALNHSEVIQMAAAFIQQPPLLNVMADLHPVLLIDESQDTYGPLMDAFLQAQSLIPDRFCLGLLGDTMQRIYNDGKVRLEEAIPRDWAMPEKRMNRRCPTRVVDLINVIRASADSHQQKPKPNAIKGTVRMFCTQQIPGQGFELEEDIARRMAAITGDGQWAIGKDGRKSLILEHKMAGRRMGFEGVFTPLYGVEHLRTGLLDGTLPILKLFFEQVAPILQAAKTNSFSLMEAVRLQSPLLDTKSIKEAPDQLALLDKAGAATESLCELFNANDPLIGKVAHVLFETGLLDLPDRLVTALLLGATSDAPPQTSDRDALETHAYQILLGRPFSEMAAFAGYTEGLSPFDTHQGVKGLEFPRVMVILNDEEAGGFLFSYDKLLGVKPASDSDVKNQREDKDDSLARTRRLLYVTCSRAEESLAIVVYTAQPATAKQRVIEAGWLKAEEIEIL

SEQ ID NO: 62770 - protein, 650 aa, Pseudomonas amygdali pv. tabaci str. ATCC 11528
MILKQMRVCGFQSFGAAPVIIDFRKLTFLIGPNGSGKTATLQALCRLFSIDPNQRRLRKSDFFVAHDEEDRPDERTLWIEADFYFPEIADESKEHPTIPCNFGHMRLDNIKGVPRVRYRLDASLGLDDDIEQTLRYVSEVDEDGNPVATSPVPRDERNQIQVHYLPARRDPAEHITYGTNALLGRLLRAVNWTEQREKISQLSADISDSLSTNQSVINLGDGIANAWGKLHKGKFFKDPSLTFVTHEIEALLRHLSVSFTPGHGEQQVDFSRLSDGQKSMLYLTLVLTSQAIGRAVLKGDDDSFDMDKLKPAVFTLIALEEPENSLSPHYLGRIVSSLKALVLDKGNSDTQAMIATHAPSMLRRVEPEQIRYLRLDDSRCTVVTKITMPPKAGEAYKFVREAVQAFPEIYFSRLVVLGEGDSEEIVLPRLMAAEGLIVDEAAVCIAPLGGRHVNHFWRLLNGLKIPHVTLLDLDAARNGGGWGRVRYVATELNKYLGDDGYLSKAQITALPKWNDPLNKFLKAERDRKSASHLTELEKFNVFFSAPMDLDFSMLVAFPAAFDVDDDDLVDPKLSQIKSVLGEKFHDRYQYTRTQRKHFASYHQLFKIDSKPKSHIEALSNLSDDDLREEMPASLKRLVKHVIKMARELHE

SEQ ID NO: 62771 - protein, 555 aa, Pseudomonas amygdali pv. tabaci str. ATCC 11528
MIEVEAWKPSNGIVLEPNAEIAAKEQQRCVALTAGPGSGKSELLAQRADFLLTTGVCRYPKRILAIAFKVDASNNLKERVRRRCGATYAGRFDSYTFHGLAKRIIERFRPVLAGDDALNSGFKVVVKGKAHPVQTEFKELIPLAIKILDAYPAAINAVRQTYSDVFLDEFQDCTDEQYELVTRLFKGSGRRVTAVGDVKQKIMGWAGALEGIFAEFVDDFEAEHLNIYRNFRSLPHLLKLQNEIIKVLDPDSEMPAHLLAGEGGEVHVLSYADCEEEASDLAERISHWVNVEGIAPSKIAILTRIQPEAYCMRLTAELDAWGISYRNENKAQDISTEPIAQVIVDYLLCIYGLREPKAWTRLTRRIIPVEDDAEGKLKTNWSRYIKEARKSASADMATKTFAQRWTLLEEFLAMAGPTQLAGLSHDYESREHLRELIEEVKKYIDEALAKEPDLLKALAQLSDDQSIRILTVHKSKGLEFDTVVLLGVEDQAYFGKDHHEVQCTFFVGVSRAERRLVVTTVRRRENLGQVNYWKLARTSQAEFLEYVNLWKTHSN

SEQ ID NO: 62772 - protein, 708 aa, Edwardsiella tarda FL6-60
MYIKNLSIRNFRNFQSTKLNFKKECVNTIVGENSSGKTNVFEAMRLILDDYLPYYKRFLSEKDFHRGCLPVFGQWILISLELGDISGDEESEILCQLNTTVDAGGTGRVTYIYRPQFYIREKLFKLSSIESVEKRKEAYEGLLKEYVIDKTTYEALIVYQGTCDFTDENDYIKVVGEFSNFIFSNPSIEYIDLLGNRQRGYNLLDHISCTYARALRDVVSELKNNRFNPFQKLLDFISKDISKDDELTNNIKDVNNKISTIAEVKKLSTGILTSITNAVGSTYSPLLNISSELPCEVKDLVKVLQLKAGDSLSDGYTSELSEMSLGGANLIYLALKLYEYEEGVSKNLLSNFLIIEEPEAHIHTHIQKTLFSNLKNKKTQVFISTHSTHISSVSNISSTNVLVKKLGYTQACSPSLGLDEPTINKIERFLDAIRTDILFAKNVILIEGDAEEILIPHLVKNSFGVTLDELGVSLISVRGTGFELLSSLFHPTRITKRCAILTDDDINIYKDGKPEYVTQVMYDDAVSSEKSGKDRIKILESITANNDLIKAFFTEYTFEIDLALSGSKKYFEEIARESFEKEFYLTPYLDAFQSSDDIKIGSFALKLANKHKKGWFAMKVVEKLDRDFPIPIALCKALGFTSDFNKLTLARVIKYRSDYYTQTTGENIIERVFSDDSLEYIVENIEPVLDVFKGHYSSDPLVYLLMEA

SEQ ID NO: 62773 - protein, 563 aa, Edwardsiella tarda FL6-60
MDNEKKELLKIKKNLFVSACPGAGKTKFLLAMLEDNIRYGSENKWHIVLTHTNAAADEINLRLDNQNVINDRIWCGTIHSFLLEWVVRRYAGAMVRTKNGFRLISEREHRDIIRKIEKDKFPNYKLKFKWDEYGGSQVEPFCLCNEPENILDVQKNEEMAREEYERYKMESRIIDFNDILTLSRDFLANNEKVSEYLSKLIGYIYLDESQDTSYIQLDALSSITKYNRTIMLVVGDNDQAIYQDLGVSIKNDVSIKKILKLNDLAVRQLTGCYRSTKSLVEYYKKYSYSKSDVQSIREEVGKFPVIRDTLQTELADRIINLIRKYNNLKGNVEGVAIIGPNKYYLNALINDLYDRSNEFVFDFYSTNPLYTLKDTVYYDLVRLTLLDVSVKNYRVRQALCTSIKDKIPEFDSLSCSDLKRTIKQFETKRTVFIFWLKDFYDFLFSNLPNSQKIISDYLICRSNISAFPVRADIVSIRKIINKEANVVKVTTIHGCKGEEYDYVISIGYHDQIVPHASVIEKGVEYSESVAKRLMFVAFSRAKNHMNIFIDDRKPVSPYFLGNS

SEQ ID NO: 62774 - protein, 729 aa, Staphylococcus aureus subsp. aureus ATCC BAA-39
MFISTLQIRNFRNYESEIFRFDNETNTIIGENDSGKTNALTALRILLDDSYYYSSKTLKESDFFHGIQNGWQGHWIIISATFEGISEEEFDNEICASISLNSESQTILEELISNADKGVGSISLFIRPNKAIRKQLFDISTELDSHQFNEFRNSIRLSDYEFYYTSKSNLNFCINENYDKLVGRLNDNIASNPEEDDEALLGSRIDMSDIFKHISVVYVDALRDVLREMKNNRNPVKRIMETIESKISSDNVESLKTIIQQLNETITSVPEIRKIGENINRQLNSIIGSVYSPNLLLSSTMSDDMGFLAKFLSMKPEQNIDLDLLGLGHLNMIYLALKIVEFEACRSRELLNIMLIEEPEAHIHHHIQKTLFEGLNLQKNYTQILMTTHSVHLAEVSEISRMNVLKSFNGKSIVMNPANNLNSFAKEKLKKNNLNLINAVERYLDVKRNGLLFSKGVILVEGDAEEILIPQIVKKLFGINLDELGIGLINVGSTSFEYIASLFDDDRIQRKCAIVTDLDEQAIPSEHRLYKSTAQEKGQARKEKLSSLFNENNWVNCFYANTTFEIEFLDVNKENILTYVSPIIDDAFKDKKTITAYKEEIQSEQYLERNLAMLKLANHVGKGWFAIELGEKIDFLIKIPKYILNAIAFACQEIVDLSIYKKILLHTIDLYEETTELSALSASLKTSDTADLNIAIISLLEYFGKDEDVVYLINQIENYTKILYAEVSK

SEQ ID NO: 62775 - protein, 597 aa, Staphylococcus aureus subsp. aureus ATCC BAA-39; identical to SEQ ID NO: 62501

SEQ ID NO: 62776 - protein, 656 aa, Streptococcus gallolyticus subsp. gallolyticus TX20005
MDSLYISRVVIKNYRNFKDLDVNLQHKSVIVGENNVGKTNFIKALQLILDPSLSDEDRMLSESDFNDSLKNPMENNQEILIQIYISNYRRNVAIMTMLSDATVLDAEGNEVLLLSYKFFPHIDEFGKKEYQYEVYMRDDMSRKFGSRERKYLNIKVIKALGDVEADLRNSKKSPVKKMLDDYKISKEVLENIASEYKECGDRVLDLDEINDMTMHINERFSEILGNHDYDISLQAMEVDPTRVLGSLKMLMANRSVLDSSLGLDNILYISLVLQMLKDKTVPTFVSGSEYSELLTKENSEIIDECYISNAGGNYVLRTDLNEENYASLYTFMADNGHGNNAVTLLAIEEPEAHLHPVYQRLIYKDVINRNGFPILLTTHSTHITSVVPIKSLVHLHQEAGNTVAHSTASMPMLEGEFLDVERYLDVKRGEIFLGKGVILVEGIAEEYIIPKLAELLGKPLDEKGIVVCNINCTNFKPYMKMLNSLSIPYAVITDGDFYIENVDDRDDSNRNYHVMEKDVKDNDTCGSLGRENAIKTFEALDDSVPENVDLALYFSERGYFIGKYTFEVDMMECTSTEAGERAFTDTFDQLVESSRKQNNFKNRLENQDYEFCLRRIEDQSVGKGRFAQIFSGKCVTDNCPDYVKNAIEYIYAKVDE

SEQ ID NO: 62777 - protein, 609 aa, Streptococcus gallolyticus subsp. gallolyticus TX20005
MSTTTYIEKLSRIEKDEYQKAAFDSQSNTVVLAGPGSGKTTVLTLKAMHLLNGVIAEPRGLACLTYSREAAREFTERLKELGLVRGNNIFLGTVHSFCLTEILGKFCDVYSLNIPTPIKIASEKQRAKLFEIAKKNVGCNDKYFKIERMNCTRMLSISGVSNICVDRDETAEIIANEYEKLLNQAGVIDYETIIIESTKLLQENPYVRECISAKYPWLLIDEYQDLGRPLHEMVLTLIDNTKIKFFAVGDPDQSIYGFQGAVPDYLIELADRPDVQKITLLNNYRSNQDIIDGSELVLNQQRGYVAKTRENEDAVYKFIEVNEELDDQIEYFVKRIVPGLVKNGIPYEEIAVLVGNNSECNSIALRCQKENIPYYIVKHQFNRSDFVKWVENCASWIEGDKDIVFSDIGDFWISLITVNGAMYLTDEEKLIIRERLYKVLVESKDYEKSLTKWFEYVRKELCFDKYLEQNTYFQDEKDNIDNLMKEMSGSEYKEYGIDKFSKIGKPENQIVISTRHSSKGLEFEAIVMMGMEEDHFPSYYVKNDARLLAEANRLCFVCVSRAKRVCILMKSSYYTIKTKNGPWRKEFKPSMYWNILYSKYGNINTKKLH

SEQ ID NO: 62778 - protein, 679 aa, Streptococcus sp. oral taxon 071 str. 73H25AP
MEIKKIYIQHYRLLNDFSLELKNDLSLIVGKNNCGKTSVLSVLEKIFNKNSNRNLVWEDINLNHRREIFENIKRVSDIPDSELSSILGINLQIWIQYSELDSYQNIQGFMMDLNPENNFIILEFSYIIPTQKLREISSLTCDFADDFSKFESFMKKNLNKFFEIQIYSRGYNPITQEMTEEKSDLHEMKDVHKIIKVRGISASREVSNKENNHSLSKTSNRFYKLNNGEEINSNANNLLQSAILKADETLTRAYSGDDSVEGIFTSVFERVKRFGGNDSEAELAIHSSLSEKDILSNNTTLYYKHDDSLLPETYNGLGYLNLYGIIFEIETLMADIKNEPADINLIYIEEPESHTHPQLQYIFIKNIKDLLKEHNDELKESGDFSCIQTLITTHSSHIVSDCNFDDLIYFKRDAGTVISKVFNSLKEEYGKDQLGYKFVKQYLTLNNSELFFADKVICIEGDTERILLPTIMQKVDISNPLNQSSMIMPLLSQNISIIETGAHSHVFRKLFDFLGIKVLIITDIDPANKNENNRLTSCSAVDATSTTNTSIKNFFDISGDEVFSIVAQKSFAEKITSDNRIRIAYQIPEDENGYQPASFEDAFISLNKQFIIDQKAGFIQFEALKDFDDSEIEDFYKFARDKVNKKSAFASSLLYFEGEENTWKVPNYISEGLLWLREQ

SEQ ID NO: 62779 - protein, 641 aa, Streptococcus sp. oral taxon 071 str. 73H25AP
MVERTVEPEVEKVFEVIKQGQNFILEGGAGSGKTYSLISIIEKISMEEPKKSIVCITYTNNAVAEIRSRIINDNLRVSTIHEFIWHVIENFQKEIKECLVELINDDAKILFVAPKEVLGEETISLDYFDGVCVEYTEWYSMSITEQNKVRISHDHVLIVAEKMFSTYPKLCDILIDIADYIFVDEYQDTSPLVVKILLEYIQNRTKKNIVGFFGDSMQAIYDSGVGDLSSYNLIKITKPQNRRNPKKVIDLANKFRDDGLVQTPSNDDTAPNMDNGSIIPGIVKFVYGNDINQLEILRGSQLFRKLEFNAPSKTKELRLTHKLNAEMAGFSKLFELYNTDLFVKLITGIKKKINVNKIDDNGKLFKDLVEESQIVVRRGGPLIVDEIKSNSELSAFYDEIKTCSFEEVSSKSKVNKESLLSYKFNGLSSRYEAGTDRDRILKRLDLVYELVELYKTGKHNEFLRITKFKITSSKDKISLSNVMTEISGDDITIGRVIELAEEHELISKDDLFTNFINNKGYYLWSRLKIMPFQEYVNSIDYLREYVSVITQHKVKGSEYENVLVLLDNGKWNQYNFDTLFGKGSSNENVQNRTKRLFYVAITRAMKNLIVYMPSNDRQIIEKAKDYFEQSDIVNVLSLVDE

SEQ ID NO: 62780 - protein, 669 aa, Paenibacillus polymyxa E681
MKSPFISRIKIKNFRNFKEFDVCLSHKQVIIGENNIGKTNLIRAIQLILDPRLSDDDRQLIESDFFNGLNAPMANKEEIEIMIEIQGFEHNKTLLAVLSDATVSTDPPTLRFTYHYYPITREDGSTEYMFNVYQGIDSTKMFSHRQRKYFNIRVISALRDVESELKNSKKSPITQLLKEYDFNKRELEEIASNLKTQSNQLLSMDEIKDLAFNINSRFNKVMGFQPDSQLHLETMDFDSNRILTTLKLVIGQNKRATNETSMGLTNILYISLVLLSLRDNTVPSFLKSDHYQFLLTLDNPEILKKCYEETEKGNYKLITDISEEDSNTLYAFLDDSNQNPKGFTLLALEEPEAHLHPTLQRIIYKDVMKGSTSVLLTTHSPHITSVAPLDSFVHLRWTSNGTQVKTSSSTNLSPSEKQDLERYLDVKRGELYFGKGVILVEGIAEEYLIPKFAELMGLPLDLKGILVCNINSTNFAPYIKYLDTLGIPYVCITDGDYYINVPNPKKNDGSLMRKYHTIRDSDDDIHKNFGYLGNELVGEILIDLKKITSDVLDLEWSEQNKHFAEHGFFLGRYTLETEIMLKSNSNVSARNAIITTFEELTNGGDQQKSNFKAELEAGEYDACLRKIENSDNKIGKGRFAQRLSTKCLKVHIPGYVKSAIQKIYDKVDA

SEQ ID NO: 62781 - protein, 600 aa, Paenibacillus polymyxa E681
MNYYLKKLEEIRKDPHQSEAYMSNNSTVVIAGPGSGKTTVLTLKIMRLLQEEIPLSRGLACVTYNRAAAKEFNDRLQLYGYNRRSNVFLGTVHSFCIAEVIKPFAHLFDYSIPMPLKIISQKEKKQIFNEVLSYLNISPKELSIDEMDKERSLSITGMSQVTIPRYDLALSAAAEYEDRLHSLGKVDYIDIVKYATLLIQNEKYVRNCLEAKFPWILVDEYQDLGKPLHEMILAIFNSTKIKIFAVGDPNQSIYSFNGAIPHYLLELYNIPNINPIKLLTNFRSNQEIIDAYQLALPPASIENYRAGTRIGEKAEFNFFVCQHGIEDQFKEVIRSVIPQCAGQGVPLDEICVLVANNYHAKRMSELFQEAGIPYHINKRKDFEISEIVKWLIQCASWSIKLGRESFSDAFEFWAGVIMQHKGYSILDNLTERKRFYDVLRKSRLHSHKLSDWLNSVEEQFNLSALLTNSDAYPDEMDNFKTLIELATSGEFSEFSVENFVKLLKPENQVTISTRHSSKGLEFEVVILLGLEEENFPSYRSLQSTDPNKLEEEFRMFFVCISRAKRACYLVRSLKESNPWGRVFNKNPSRFWTMLFDVYGE

SEQ ID NO: 62782 - protein, 689 aa, Streptococcus pneumoniae 670-6B; identical to SEQ ID NO: 62612

SEQ ID NO: 62783 - protein, 605 aa, Streptococcus pneumoniae 670-6B
MVKSEEWFPKGDIILEETALGAVKDVTNCLVIAGPGAGKTELLAQKLDYLFSTNKCVSPKKILALSFKTDAASNLKERVKKRYGDEYASRFTSLTYSAFEKRILDQFRDVLPEDIRPSRDYLIEDWYTIKELLSMNGINVNGWRMSDIRRYVENIILNNGDNHKFKTDLLKGTQDNKPVLLYRQITKLSTQIIDTNEYIRKALQMTYDFVFLDEFQDTTYAQYDLLKTCFLGSSCKLTAVGDDKQAIMRWAGAKPDIFPDYIRDFNPNEYQLLMNHRSVPKLVEFQKEVHQILNSNHSSIQTNNYPEFQEGEITLFEFENESLEAKLIANDIELKIQGGIRPSEICILAKQKVGIYSFELISILNSKGIKARIENEYQDILKDPTCNLLLDLISCSQGKRDPLIWENISNFYGNINGIDELTDELILAKSYKEIDNIVSDITYLISNFIPNEESMLKLIDCIIEKIDEKRIISNFSTYNGKSDLDIIVKNFSKLLYIEYSQTQGEWLDTVSSFKGENSIPIMTIHKSKGLEYEVVYFLGLEDSAFWSFNNQPEEDKSAFFVALSRAKSHLIFTYCKLRNNSPQNNRNINEIYSLLTQSNLVDVIN

SEQ ID NO: 62784 - protein, 576 aa, Cyanothece sp. PCC 7822
MKIINLKIQNYRNLDGVELIFHPDINFIIGENNLGKSNLLKLLNILFNQQRFKEDDFYNSDRAIEVEFSLELETLEIGMFNDLFDPENSHILNIVAVQESVDDNLEFKHKESGSFIPRADLKCINYIDYDSLRNPSSELKFDKIKGAGKFLNYIVFKYLENSQTQDLDFIDKSKINELLLEVTGNLQKIKPFKDFFIEAILENNQENLLTKLIILADDQKRRLENLSYGVQFYSLIPLALLEKLLSLNNKKNFKKCIFEDESTAEKCLPILIGLDEPEIHLHPYAQRALVKYLKKIVINEDKDFSELLRTLFSIDRLLGQIIIVSHSPSILLDDYKKIIRFYVDINDKKLTVKSGKEIVLEKKTEKQLLRNLPYIKEAFFSKVVILVEGDSELGAFPVFVQKMNINLDELGISIIKAGSPHSIVPLMNLLKKFGILSVGIMDSDQKKIYESKKIENLFFTELEDFEDEIFNSLDLLDYILYVESETPKKLKFMVQKAQQLVSTTIDHNKSLYSQFKNLNQEQIKKLKFESKEEILKILRNTKTIINGRYLAEQLDEIPQIYQTVIKTAEELSNYVK

SEQ ID NO: 62785 - protein, 602 aa, Cyanothece sp. PCC 7822
MLSKFEPSEIEEKIKALHCNDEKQLEVIFSQAKKLIVEAPAGYGKTKTMISKIAYMLASNQVKNPKKILALTFSVNAAYKIKKDVAEQLPKLLQTKESYFIKHQDNLFISNYHGFCRHILKLYGYLLHETLRNIDTLKTFDDSKQEDLNQITKLGYDQYKIFIDYNKAVKDCNETYIEKNFETYVREVKEKILNRQYIPFNAIILLILELFRKYPNILEFYKNYFPTVIVDEFQDTNILSWTLLKKIISNDSRVIFIGDSLQRIYGFIGAIPKLMREAEVKYNMEIITLTKNYRFKDNPEMLQLDKNLRLNAENIQNPTIDKNAEIIFFNLTNQLEEAKKIIDIIKDLQNNHLADSCKIALLVKNRGKNIDKILKVLQENKIAYFYGLFSDEEYDYLKFHKECSLLFIEHLKKVHVISQKTLSKLYDTISESIFLKENKEKLTLQSLMKLLKVFFYRINTEYNFLSFEDKIIFIRDTFENNALKQNMEYLDENVIVATIHGAKGLEWDYVIMPDMEQYSNPSFQGLCKNCNYRNNNCNIQIDPNNETKFLEELSVFYVGVTRARRQIFFSASNTRINYQAVEKSANISCLLKLPGIKLNNDN

SEQ ID NO: 62786 - protein, 729 aa, Enterococcus faecalis TX0027; identical to SEQ ID NO: 62500

SEQ ID NO: 62787 - protein, 597 aa, Enterococcus faecalis TX0027
MTNIFEKIVNDLNLEQKDVVESEDNLYVNACPGSGKTRVLTRKIAYQAIKHDGSLKRIIAITYTNRAAEEIKERLSLLSIDDDINIWVGTIHQFCLEFIIYPFKMNLSRVSKGFTIIDDYTQRAYVSQINNMLNLNLKTYELNKIDLSLSHDFKINEVQYTQVSEMYHTMLEKNKEIDFDMILLVAYKILTVNSNVARNIASNIRAIYVDEFQDTRELQYNVIAKLLQNNPQIQSMFVGDIDQAIYGSLDGIAKSVEELEMLTSHTFQSKTLHGCYRSNQRLVDFYSNFQSCPYEIESRGNNKNDRGFISYDCKVTKEDLPNIIKNIIKEKIESGIHEKDICVLAPQHCPLFSLGEYLKKELPYCNFDAINISPIKVNNHSLFFKLAILYFTESGEKVRRRKLIANDILIILKNEFGIEVKDYFIDLDLLQLINSVKRMYSGDDNGVDLYKFVTKHIFVNLNIDEKNYPSIFKHYLFFINEVEDRIKNNSLSSSVSSFKKMFKSRDGITLTTAHKVKGNEYDTVIAINLLNGKIPHWNEIFNVSDKGISSARKLLYVICSRAKNNLFLFSEVGYFTSKGDLLYPTQLLDKIEFDYNI

SEQ ID NO: 62788 - protein, 566 aa, Escherichia coli W
MEISSLKLKGFRNFKDAYINFNSNTLIIGANDVGKSNMLHSLRMLLDKSISDSEIEPNELDFHLENGNSCEEFEIIIHFKNINEDAVLSILKGNVSDSGESFIKYFAQKSDLSYKLFIGDSLESLQEINSRYYLKFVNLKYIQSQRDLERFIRKEKRQLLKIAQQSLNSDEREEDDYLLGEISSDLQLINDKISQLIYVERATKEVNDELKKLAHHYSEYSVQLDTGAIGINDFIDNLQLGANTNGSNVMLGGDGRNNQILLALWKAKSIKEHDVDNEVIFYVIEEPEAHLHPHQQRKLADYLIAELPGQTIISSHSPQIAVNFEPDSIIRLLDRGGHTVAASEGCSKGISDGWEDMSYRMSILPAESFFSNGVFLIEGPSEILFYHSLAKSLNIDLDYLNISLISVDGISFKIYAAILDALEIPWVMRTDNDISKLKGQEKWNYAGINRCLDIVGIEKFEHSDKKITSLDTLTNGDWQTVSEVINKSGVYLSKIDLETDLVEELSAPILDALDKKDNQSAIEYLQKKKAIRMRILLKKIKKDLHKLNAGDLVKPLNHLVKIVKGE

SEQ ID NO: 62789 - protein, 541 aa, Escherichia coli W
MSIFSPTTQQRLAIDYPKSMVITACPGSGKTTVIKEKIRNITGCLPEHKGVIAITFTRKASSELERRCKADGHDIKHSFFGTIDSFCLKEIIIPFLPRIWGGKPTECKVLKKLDSPYKYYLEEHFFGIPSVVNVNEDPGYKRLYDEGMLWMSSFAALALKILNESPAATRYIKARYSHIFIDEYQDSSLSQHQLFLKINELGLCSIAVGDVWQSIYEFRGGNAELLLDLVRDKQVFAHFEINLNHRCHPSIINYASRLLDPNFVLLPSENINVYRKRLSGNLKDVSMTISSWISKWLNEGKWGLEHANQIAIFARKEQSLLLLCSGLTSTFRVYIDTPLDKLGTECSDLYKDLLAYRYKAIGTAQELIDKVFDGLIINDNQQFLLRKKIKSLRAKLTDEELINKLHEIAEMLNIQFSISNDNAVLDIISDDIYLKQFMPSDKNEVQVMTLHKSKGLEFKIVLHLDMDEWSFPYRTVNEVDRNTALYPSLPQETNLHYVGITRAEKCCVLINAELRQNSTGAFKKSEASYFFKLPQLEGLYR

SEQ ID NO: 62790 - protein, 675 aa, Sinorhizobium meliloti AK83
MQLHKISVKNFRLLHDVEVLLEPRTTVIVGRNNCGKTSLTEVVKRLLHDKTAVFRLEDFAFCCHNKFWEAFLAFKNAAEEQDVRLLLPSIEIKLTFTYGPADPLGLLSEFVIDLDPDCSEAVVVGRYTLKPAMMTSLFAGLEDTEATGKDELFRLLRERIPNLFGLDLFAVDPNDATNTKAIELSLLRSLAASGFISAQRGLDDESKEDRVVIGKVLENLFMTAKNNPADAASHEMAKELEGAVHEIQDKIGTDFNSKLNALMPALSLFGHYPTAGDSTLLTETTLNVDKLLTNHTRVRYSGVNGIHLPETYNGLGARNIILILLQLRQFFKQYLAMEPKPAVQVVFIEEPEVHLHPQMQEVFIRKLSEIADLFGEEHKLLWPAQFVVSTHSSHVANEARFDAIRYFLAKLDAEHGSLKTTIKDLRKGLTGKGTPEEQEFLHQYMTLTRCDLFFADNAILIEGTTERLLLPKIIEMIDVGQPAGKKLKSQYLSIMEVGGAYAHIFFDLLDFLELRTLIVTDLDSVRQNDAKKWVGCPVHLGSKTSNACLKSWFHAEVTPDQLLLVPDEYKIVDKKRIAYQIPEADGLACGRSFEDAFMLANTALFPLVGTETEKAQTAWDNAKDEKKSEFALRHALRVENWTVPRYIREGIVWLAEPDTPPLIVAAEAAPADIAA

SEQ ID NO: 62791 - protein, 580 aa, Sinorhizobium meliloti AK83
MIDQMPDSPALIAAREADLQMEKCLREGTNFLIEAGAGAGKTYSLIEALKFLLDHEGPRLRRGSQKIACITYTNVATAVIGRRIDNNPLVFVETVHAFCWSLVKSFQPAVRQVISESPAWQEKIAAAGGTIDGHAVEYDLGFRRIRDNVVMISHDDVLTLAGALLPKEKFQKLVAARYPYILIDEYQDTDSEMMDAFKVNLFGREGGPQFGLFGDHWQQIYDKTCGHVEHPQLTAIGKGANFRSSTAVVGVLNRMRPELPQAVADENLVGSAVAFLTNTWVGDRREGGHWKGDLPADAAHTYLQAFKGYLEAEHGWDFAPANTKVLMLTHNVLAAEQGYSQIAGLFKYTDDFIKLQDDYMAFFGESVEPACQAYAARRYGDFYRLMGTAVPVPSQRAEKLSIASAIDGLIELRTTGTIGDVIDHIQGNAYLRLPDKVAKRERDALIWEGEGDPPDRIQIARGLREIPYREIIALLQFIEGNTPFATKHSVKGDEFENVLVVLGRGWNKYDFGTYLEWVANPGAVPANKQAAFERNRNLLYVACSRPKTRLALLFTQALSDTAVRTLKTWFGADMVEEFTP

SEQ ID NO: 62792 - protein, 566 aa, Escherichia coli KO11FL; identical to SEQ ID NO: 62788

SEQ ID NO: 62793 - protein, 541 aa, Escherichia coli KO11FL; identical to SEQ ID NO: 62789

SEQ ID NO: 62794 - protein, 700 aa, Enterococcus faecalis DAPTO 516
MFISELEIENFRGFNYKTKILLNNSINVLIGQNNSGKTTIIKAMELLFSDGSKKKLSVGDFYKNITIDDIKALPPKIVISAKLTESEDDEEYSDDLITVSTWLTKIEKPYEARITYEYYLPEKYIDEYKKIMNTVNSNEIEDYWNEIEHSFIPKFKYHILIGDPKYKNTIDAESLKTFDFQFLKAVRDVERDMYRGNNSLLKEVIDFFIDYDVKNNQDLTSDEMLTQIRKNKREFSKKASGLINDLQKRMKSGKKEMLKYATQTGATFEKLTPTFEGKILDTELYSALKLIVESETGIKIPAAQNGLGYNNLIYISLLLAKMQKNASGTYFGVNAKNYSILAIEEPEAHLHPTMQYKLLKFLNLNSEKEVRQVFVTSHSPNITAAVDLNSLIVVENRGDRIEVSYPGKAFNGSQEDIESKMFVERFLDVTRSDMFFAKKLVFVEGLAEQLLVPEFADMLDKNLVDSHVSVINLNGRYFNHFLKLFDSTKSKFAMKKKIACITDIDPVRKLKDDEDSKAAWKKCHPIFLYQDSNVYEYKAYSNLMLESAQNLSDNIEFFSQPLFISSTLEYQLILDNSTCEELITDSVINKKELKNLIEKYSEVGSIELKDFVALLGSNTTNNEIKKIYKDHHFNKEEFMKHIIATRYLESISKGVVAQELAIKIMMINQKNNEPGEGEEQIVLNVPEYIKEAIHWIHQQN

SEQ ID NO: 62795 - protein, 573 aa, Enterococcus faecalis DAPTO 516
MDTSTELITSKSLLPIDSHLKISAGPGAGKTTLLANHVIEVIKNSEKISELRRVACITYTNIAAETLKRRLGLSLDYVEIGTIHNFLYKHIVKPYLWILSEDYTFDFEKIKGHDDIIPSYSILSEWATVTKQFNLINSENLNETSQKIQKITWKLDTNENPILCFPEVWQGKVGKYSIKKNSLMDYKKICWAKGMIHHDDVIFLSLKILEKNCRIVDIIRAKFPYIMIDEFQDTSSIQNNIMKQIADKETIVGVIGDECQSIYEFAGANVEEFINFDINDLRQYKMEENNRSTVEIINLLNHVSRDASLKQFSPKEKRGEKPTLFIGNMHTAYQQAKSVVLDSPLLVLTYRKDNPNQLKYGVEDVDSEELKLSLLFEDDDRGRKLYYVIQSIEYGKEGRFKEAISSMLKAYRKEKEFTDRDSLKNLQRLINNYSAIQSLSLLEFYNKFIFGFFYTQKKITRGKKKDFYSNILYRDIACTVDLNETRSLFRTIHKSKGDEEQNVMLVIDNKDNFNEEKELQFLLDPAINDNEDHRVYFVAISRAKENLFINIPALSEKNSIKLEKLDIFNIVYV

SEQ ID NO: 62796 - protein, 700 aa, Enterococcus faecalis DAPTO 512; identical to SEQ ID NO: 62794

SEQ ID NO: 62797 - protein, 573 aa, Enterococcus faecalis DAPTO 512; identical to SEQ ID NO: 62795

SEQ ID NO: 62798 - protein, 754 aa, Escherichia coli UM146
MKINFIEIKNFRKLKSVRIDIAEKTTLFVGANNSGKTAAMEALGHFLVDASRFSVNDLTLCNWAKIKDITEQWLTEENIDLAKSQEAFSDLFPCMDIWIEAKENELQYVNHILPTLEWNGGLIGVRLRYEPKKFDVFFEDFISSRQNSLDIHDRISERIDKENYTIALWPKDIYEYLSRKLNSMFTIKCYSLDPSKLESSDNGIAKPQRIDSQQTLLDGIPLKDLIRIDEINAQRGFGSPSAADKENSKLNTQLRDYYSKHLNPIESPELSDIEALQAIRDAQDTFDERLKNCFSQAIKEVEGLNYPGVTDPKLKISTKIEPIDGLNHDSAVQYELTNALSNVSLDYLRLPESYNGLGYQNLISIAFRLMGFRDSWMKVGKATNKKLADDNQEDFPAPLHLVLIEEPEAHLHAQVQQIFIRKAYDILRNHNNLGDKEELHTQLIISTHSSHIAHECKFSSLRYFRRIPACKEHEIPVSTVINLSNVFGVNDDTEKFVIRYLKATHCDLFFADAVILVEGPAERILVPHLIRRHYPFLNQSYITLLEIGGSHAHRLKNLIVSLNLLTLIITDLDPKDSQDGKVKPSKKDSGFVTSNTTLASWVPEVTGVDELYKLTEDKKEKKYNDFFYVYSAFQIPVLAAFKGVNQEFLPNTFEDSLVYNNLDFFSNLTGNGLVKKFKASITNCKNAEEFGEESFLHLSKGNKAEFALDILYHDESDKLNTPNYISNGLKWLEEKIKIKQLELVSDLASDGENK

SEQ ID NO: 62799 - protein, 612 aa, Escherichia coli UM146
MTIKQTEEILDSNIHNYLTGTQKHSFLLYAGAGSGKTRTLVNVLEMILKSHSEEFRLRGKRIAVITYTNAACDEIKRRVKFNKLIDVSTIHSFLWELIRHHSSDIKSWLMENIAAEIADLRDKQSRTTRVSQASLERERKIVSKEKRLQNLSDVYKFTYNPTGDNRTKDSLNHSEVIKLGSYFLDRKYTMQKILVNRHPILLIDESQDTNKLLMNALLEVEKNNRDTFSVGLLGDMMQRIYSDGKSDLEACLDEHWKKPEKSINYRSPKRVVALINLIRSQVDNHKQKAREDAEEGYVRIFIKECHSDNKDRDESFVKKRMREITLDDDWENHDSLVNTLILEHHMAATRMGFIDMFTPLYQIERLKTGLLEGSLGNINFICGIVSPLISACIKNDTFTITNILRTNAPLLKREHLLKNTNNTSPLTQIRNSLDMLKSFISTNPELITINLLHKINEIKLLDVPDSIQEILESNDNSQDDIIEAWQKAFSSPLCQFDKYYNYVKGKTNIDTHQGVKGLEFPRVLVLIDDSEAKGFMFSYDKLFGVKEKTKTDLDNEKEGKDTSEDRTRRLFYVTCSRAQKSLAILAYTDNTEMLRKNLLHKGWFDSSEIEII

SEQ ID NO: 62800 - protein, 564 aa, Pseudomonas aeruginosa 39016
MPEERQLWIEADFLFPELAEDEDNSTVAPHFGHMRLDEADGIPRVRFRLSATMGPDGDIEETLVYVLDINADGSPLNTAQVPRSERNHIHVHYLPARRDPADHIAYGANALLGRMLRAVNWDAERDVIKGLTDQISDSLAANPSVDAFSTSLKAAWDTLHKGSFFTDPKITFVASEVEALLRHMSVSFSPGHDEQLVDFSRLSDGQKSMLYLSLVLSSQAIGRAVLAEEDKSFDVDKLRPPVFTLVAVEEPENSLSPHYLGRIVNSLNLMTGNGDAQALIATHAPSMLRRVAPERIRYLRLTEGRTSRVTHIQLPDTADEAHKFVREAVQAFPEVYFSRLVVLGEGDSEEIVLPRLLQAKGAPVDESAVSIAPLGGRHVNHFWRLLSALKIPYLTLLDLDVARHQAGWGRIKYVNDQLGKYRLDQQLPKDYGIPKWDSTENMVRDFDNYLEALEDRDVYFSYPMDLDFAMLLAYPDAYGVVREKPDESTIKAVLGKSHHDASQYSEDEQKLFGTYHRSFKLGSKPAAHIDALAKLSDEGLLANMPESLGRLADAVIAKLAELPE

SEQ ID NO: 62801 - protein, 558 aa, Pseudomonas aeruginosa 39016
MITVDAWKPADGLTLEPNALRAAKEQMHSLALTAGPGAGKTEMLAQRADFLLRTGACRYPKRILAISFKVDASSNLKERVKRRCGSELASRFDSYTFHAFAKRIIDRFRPVLTGEYALDAGYKIADRKPGPSRSLIEFADLVPLAIQILQKSEMARNAIRQTYSDVFLDEFQDCTNLQYELLKLAFQDTSIRLTAVGDTKQKIMGWAGALDGIFQTFSADFAATPLNMYRNFRSKPRLLRLQNEIIRVLDPASVMPDEQLVGDEGEVFAWRFEDSRKEAEYLADLIDGWIKTEQLPPAEIAILISKQLDLYADHLMVALEARGIPFRNEQQMQDITVEPAARLIVDYLSCLYGQREPKAWIRLMNQLVPFADEDIQSNARKDLDRLIKQQRKEAAIADLVAEPSSGWWEFVRVFLKQISLETLVALSPDYESHERLKEVVRNTRTRIEELLKLEPDLPKALERFSDDQAVRILTIHKSKGLEFDSVIIMAVENEIFFGNQAENRCAYFVGVSRAKRRLVLTHADQRERPAGYTKRWDTHRSAQTEYFGYAIPFLSQQQ

SEQ ID NO: 62802 - protein, 469 aa, Lactobacillus iners LactinV 01V1-a
MLNRYINDHYLWIYTNGKTETNIDSKLAKKIFDIQYINAERTGTDVAIEIKKDISSLLKDSEKKREYDALISELNDKLKELLEPSITKMSNLFNYEKNEIGLEKGNISITSQINSKLSAEDSYITEVKDTKFNYNLPLVYNGLGYNNLVNIYMSIKLSDVKKGKDFKILCLEEPEAHLHPAMQYKLFKFISNLNKSNKLNQQVFVTTHSSNITAVSGLDSMYIIQYDRQGEVSDCFQQSLKRQLTDKDDSTFKSDAKNHLNKFLDVTRSDMLFADKIILVEGIAEKILLPIFMEKLGYPYEDDHISIVEIGGKHFEYFIELFNGNPVKKKILCITDNDFKWFNDDGENCLFKEYLEYEAPHLKKLISRYKFNEFKIVTQIKGGSTFEDELFIENFKNEDIVSSLFGLPLSNTMKEFCKNNGFSINDWIKNKELIDGRSIKLISKYLDCYKKKIELDPENQEFYEKLIFF

SEQ ID NO: 62803 - protein, 473 aa, Lactobacillus iners LactinV 01V1-a
MVKSITSGYILTKNELLNHIKIYAGPGAGKTHFIVENIKNIISTNKLITNSENRKILCITYTNKAVDEIANRLQGFNEYIEINTIHGFIIENIIKPFQTDLINIMKNDFNIKVCNGSTISSQVEGLSLLHGIDKETIYKYINIEKNTSDSYSYSKMKMSEVQVDVDKFINGIRLNKDLKSSLTNPKNFSVEDIVPLKKYIWSEVRKLTHDEILYFGYRIIQTNPIALYTLRVKFPFIFVDEFQDTNPIQTEIIKLIGSKSTKIIIVGDVAQSIYSFQGAKVSDFLEFNINNEVEEYSIDSNRRSTENIVNFCNFIRCSDKNIFQSSIRKYKDDKTIIEKISIKFLLGRSDEVKRTLYSILNDNGVILARSWVDAFKFIQNIEENQSVILKKIYNSYYNTPIMIRDEIIKHNNVMWVKAFKIIFNLWEGYNNKSFGDIILTLQKYFQISPSKIEINHIYSIYEFFKRIIYRCKL

SEQ ID NO: 62804 - protein, 714 aa, Vibrio antiquarius; identical to SEQ ID NO: 62686

SEQ ID NO: 62805 - protein, 634 aa, Vibrio antiquarius; identical to SEQ ID NO: 62687

SEQ ID NO: 62806 - protein, 537 aa, Oceanicola batsensis HTCC2597
MRALLAGTDDPYPRFSVDDVHLPKGGSAAGDIVFDYIFKDLSLDDEADFMHGLRADGMGKAEALLRVTYGDADKSGRLRSRKTCGVHHDIAMTATMLENLRSVYLQPLRDAELGLRPSRSSQLSRLLHLLSDDAGKDEITQKLADLDKDIKALKAIVETQDAITGRHNSMLGDQLAQMLAVELSGSDFTKLASRLSLLVDSFEIERNGLGYNNLIFMAVVLSELAKNADSAYRSLIVEEPEAHLHPQLQAVLLRYLSDIKVSEGERPVQVFVTSHSPNFASIADLNAVECLVETDSGVEVFHPRSVSFGKGKKEKLRRYLDVTRAELFFARRVIFVEGAAELMMINLLAKSMGYDLRDHGVSLISVEGLNFDSFMPLFGETAIKIPVAVITDADPYTVDADGKNQPHYPSATESITISSNTASMKEREDEFVKVFHGQKTFEYDFALHENNRMAMLAALKDLHPQIGDDLETELASKTDDRDKAEALFSGMFERPKGKKNVQKGAFAQALAAQIEDNRLNVEIPTYIQNAVLHVCKP

SEQ ID NO: 62807 - protein, 574 aa, Oceanicola batsensis HTCC2597
MIELSSQQREIVEAPLKPMVVIACAGSGKTATAVRRLAEMRKRIDDRHGHCALLSFSNVAVDTFNKDYNALLQAEPSDNRRGGVEIATVDAFITSNIIRPHGHLVMGCTRTPFLVHGSEPFLANFKVWDGKRPQPTTALQPVIVKGVGLQFEVGRANTVVDPKTAAEAIRKLAGVGAYSHALGSLWALKVLKTQPLIRRALARRYPHILVDEAQDIGNLHQSILMSLQDAGTQVSLIGDVNQGIYEFSGATGAFIQQHADRDEVDERRLETNFRSVPSIVAIANELSGRTDTAARTAPATLSGAYYFAYKKEEKDNAIKSFAALLGQAGIGVDDAAVLCRSAEWAADWAGGEKEQGQGVLRHFVNAAIQRDKFSRFDDAFEHCCAGVVGLLDDSHGALLSELTRHSGVERNFQALRRVLWSFVKDPARGVPHASLVADTDWQPALLARAETMLAILSAEHGFKAAATWKAKLAKRKIFNQPLMRPAELGIEVLPTFRVSTVHKVKGESIRGVLYVCNQSHLDEMLGGTETEVGKIGYVALTRARDLFVLGVPATNLKKYAPRLDELGFTKAGGA

SEQ ID NO: 62808 - protein, 529 aa, Oceanicaulis sp. HTCC2633
MEIKDFEEDLDVLAVLTDYRLDDDPETVRLTYQLRAQPGLDHAPASDDDFSFVCFGGEDEAKRFGHDLRRRITMDLLPALRDAEGDLAAWRRSPLRPLVEDAFIGIDKEALKEMGDKIAEASAAAIEFKEVKALEASIAELFLAMAGSKQDVHPSLGFSATDATRINRQIRLLIDEGRRGVADASLGSANLIFLTLKLLDLQRLIAANKRDQSLLAIEEPEAHLHPHLQRLVYKHLFETIVDGEYGVDDNDDGEVAGPLSVILTTHSPHIASVAPLGSLLLLRSHLDEGTRGYSTAEADFTKADTEDLERYLDVTRAEMVFARGVILVEGDAERFLIPAFAENMDISLDEHGVSVCSVSGTNFLPYVKLLCALGIPFSVITDYDEVDEKPRAYNRALKLVRIIDVAAGGDDTNAVIKSIKDKDTWGKTFAEIRKFGIFVNWSTLETELFEGGYAQEMIETLHEHNFSAERKATLNAWKAKPKDFDANELLNMIEQMGKGRFAQRLATRAAGKLVPDYIADAINHVIDLV

SEQ ID NO: 62809 - protein, 598 aa, Oceanicaulis sp. HTCC2633
MSSISSNRALYLKAAEDLHSNEKQWQAFESTGHCVLLAGPGSGKTKTLTVKLARMLSEDVDEPRGIACITYNNECARELESRLETLGIAPGGRVFIGTVHSFSLTQILLPYAKVAGLGLPDEFTVATRQQSRAALAAAHAKVISGPENPQNWDMRLGRHRRRFLNRELPEWRTLDPQLTELVETYEAELRARQLIDFDDMPLLAVRALAANKWLRTAMVAKYPILAVDEYQDLGRALHGMVMGLCFSAGMRLFAVGDVDQSIYGFTGATPELLRRLSARDDVETVRLGLNYRCGSRIVSASEYALGENRGYKAPDGAHEGTIYFHPCTGGYAGYARYLVEELIPEIRERRPDTNLGEIAVLYSAAFLGDEVANAAAEYGYSVIRTDGNALYPRGSRLMRWLEQCAMWCCGGWRSGIPRLSRVVSEGTRLFHETITDEDQRLTFQRDLTAALWDRRDETLSLHDWLAALSEDIIRPRVDLARSLADEYGTLTDFLVRIGPAGDVDDFPLGEFAGIGSGLDRLNLSTLHSAKGREFDVVIMFGTEEGRLPRNNASQNDVREARRLFYVGFTRARYEIHLMYGQHKPSRFVTEIQERLEGE

SEQ ID NO: 62810 - protein, 674 aa, Roseovarius sp. 217
MYIRELRLKNFRCFGDHEEVISLDPEMTAFIGDNGSGKTTVLKALQRLFGSTSNERSLRRDDVHFGAGEVPGPANQGDDTEAMPVVSSREIHIEAILDFPELTDATEVRSDTGLDVSVETFHAMSCAGPGTPLQARIRLEANWEYGIDEDDIVQRIYWVTTTEEVPFGEDDIAKIPMSTAQRRRIQLKYLPATRNNSAVVKSAMKELLVWLERFGDLTSGKQQLEIQRTELQKVFDDLPAVNGVVNELTKNWGKLFKGELYSEAKLNILATEIHKALRDLTLKLSPSESGAEYAIEDLSEGQASLLYISIVASIIQLNERHIGKSVTGYRDVPELKPWLTIIALEEPENHLSPFYLSRMIALMSSLCTGDSAMGILTTHSAGAIRRVKPEQIRYMRHDEQNRVSYSKSINLPPKTDEKYKYIYEAVRSNPELYFAKLVVLGEGRSEEIVVPRLAKAFHPDLDLDPAFVAFVPLGGRHVNHFWKLLNDLNIPHVTLLDYDLGRYNAGCLRLKYAVDQLSSFGIMPDLEKPKDANAWRGLDKDELVKWYVWVKSNGVYFSLALDLDMMMLKAFPKQYQSISSIKDTSTLNADDFVASVFGKAGNGLADYKKNAPSTAELAIYDDLFKKGSKPIAHIEAMASLTDDELKAQCPKSLKKLFKDCAKRLGIELGPRTSE

SEQ ID NO: 62811 - protein, 445 aa, Roseovarius sp. 217
MTLGWWENQLSRSPQTLTFDMVKTLAQTIIHHNSPIKRAFLNTYSHVFLDEFQDTTLPQYALLKEIFGGSNAVLTAVGDNKQLIMTFAGATNERFRQFSIDFGAQDVALASNFRSNQRIVDIVNSMAKAIEPNSITVKCSKAADPIPIASDGVIHFSSDDEERKGLAEFISREIQNGSLNANDFIVLVRQKADEHEDNGLRAALEEKGLTLRNEARTVGESGISIQDLSSEPLAEAVILFIQVATGDRRRRAYPDLIQLMSTSHGSMSEHSAEQFGLEQTLRKATKAFDEFVKSSNKSFSWEALVNLITSQLGEDKLRRLAQEYKNPARLDKVKAGIAAFLDECSQGAKNWQELVDRYQGVDQVRLMTVHKSKGLEAHTIIFFSLKDSSFYYKADMNEEALTFFVAVSRAEQRVFFTRGRGSIEKLTPLYELLAQAEVPNIEAFP

SEQ ID NO: 62812 - protein, 356 aa, Nitrobacter sp. Nb-311A
MTLGLAEPSFQAIVRALRILLTNAAMTDFDPSTNGLGLNNILYVSILIEYFHRRLAQQKSAGQIILFEEPEAHLHPQLQLTLFKALSALPFQSVLTTHSTHITANADLESYVVLTQTGEPAIASAVPAEDAGLDETELRDLERYLDATRSNLLFARKVMLVEGPAELFLIPALVKQVKGIDLDREGISVIPIYGVHFDVYAKLFSGESLPKKCAIVTDGDLKPSDADPDLEGEDDLPPPPDLKELENDYVRVFACQTTFERAVTLAGTLEMFARAADDIGAPTVAKKLRKGAAELDDDDLDEKQRDAILNPLRKIVLSTAKRFGKARFAQIAARHVDQATSVPKYLGDAVRWLTEP

SEQ ID NO: 62813 - protein, 591 aa, Nitrobacter sp. Nb-311A
MTLTAEQKDAVRCEDDLMLTACPGSGKTRVIISKLSRVIDEIRDTPRAVACITYTNAAVQEIESRLRHHLQPGDDAYYEICTIHSFCLNHIFRPFCHLIKGYKDGFKVLTPESAEFERHVTAICAQHGRYNLTFKDFEDFTQLRMDLDGRPVGIGIERGALTPEVATAYWKRIREAGFVDFANIIYYSLLLLRRRPEILSYVSAKFAWILVDEFQDTTDLQVEILALIAGKGRTRFLLVGDPCQSIFRFAGARPDLAEQFAGRITARTDKQLSGNFRSSSPIIAHANMLYPRTPPMTAVGRARKYAEQPVWQHGASAFTVITDYFLPAIEALEIPMGEAAILAPTWYSLFPLGRRLREYGVSIVGPGARPYRRNRQFAPLAEQVCGYLMEPRPDAIAGIERTLFNTLLDVTGRPHFDIFSYRGRVIVFRLLDHARRLHQIHMGGIAWLEAAAAAFSQVLIEKEYLTSGDKDVFAISVEEMKTDMRNNRVDLANLTIDDLGIYASPDAALKLATLHNAKGREYMAVAMIDLHEGRIPFYQARSAEDIEEAKRLFYVGVTRAKRFLLYVTDASDSRNGPTRFLRVGTGVGVVN

SEQ ID NO: 62814 - protein, 626 aa, Leeuwenhoekiella blandensis MED217
MYVSQLEILNYRNFKNFTVQLKPVTQIIGENNIGKSNLLDSLGLIFSQEVSFFKRRMLDISDFNYETILELKKAILDTSIEPKNISYPKIVIKATLKDWDLKQEAVITDWMSNSDFTEATLTYTFAPISSFDKIEEITLQRQFLQDYEKEIGPEEFKKIPQSEILILINFPISKYHYRIHGGNQNESLANAYHLNQLKFELLDALRDAKSELSASRNNGLLFRVLNANEETDYQDLKKRLVGLQRAIEQNVAISGIKNRISEQLDKISLSTETSNNVVDLIFSLPNVSDLLRKLSLIYNDNPIKIERNGTGRNNLLFISLILSFIEDPERAQSTFFRIVGLEEPEAHLHANLQNHLASNLEGLIKKEDGTYRKDIQLILTSHSNHITTKIDFDNTVVLHYKNGNVQAHYILDGFGTTAEEKRQVNYLKKYLDSENVNLFYSRRLALVEGISEKLLFPLFYKIQTGETIDQSATAVVNVNGLAFKNFLQIIVNGFHTKCLVLTDSDIGTQSENRAQELKNKYDGVNEIDIQISQLSTFEKDLINCNKSGSGKTILCKVIPIVRPNAGKKYVEELGTNDIDIEEYFALIEDYKSEFALQLSLSLTEDQSGFSIPKYIEDGIKFLDPLM

SEQ ID NO: 62815 - protein, 521 aa, Leeuwenhoekiella blandensis MED217; identical to SEQ ID NO: 62667

SEQ ID NO: 62816 - protein, 568 aa, Synechococcus sp. WH 5701
MQLTKIAIKNFRGIEELEIDLAPCTVLIGENNTGKTSILEAIYTCLSRNLARKVVPFGDYDFHLTAAMPDPSSSPPIELNFTFVESEEGEWPDAIVQAFDKAYQARADNRLEIRFRVVAAYDPASKDFFLDWTFRDLADNELTGAKSPQLVRELQQLNPVFFLAAVRDAGHHFQGRSQFWGSFTKNPQIDDATRAELEEQIEAINQIILDSHTPFDEVKTQVAKTGRLVPLASTDLVSVEAIPARIFDMLNKTQVKLAARGGAKLPITQHGAGTQSLSVLFLFEAFLNSRLAEAYDPDSEPLLTLEEPESHLHPSAVRSLWQVLSGIRGQKIIATHSGELIAAVPLHSIRRLARKAGKVEVFQVNEGTLSPDDERKINYHVRAKRGNLLFAKSWLLVEGESEFWFLPEAARLLDLDLELEGVCCVEFAQCGLAPLIKLATELGIEWHVFADGDPAGQRYATVARGLLGATPEAQRLTLLAEKDIEHAMWSHGYSAVYDSAVGAPQRANITAIPGTPDYTEQTIRMAISSTSKPHLAIEAVEAARQAGSPGLPAAIETAITTAVNNARL

SEQ ID NO: 62817 - protein, 602 aa, Synechococcus sp. WH 5701
MLTYRIARLLNDTAGERFRILGVTFTNKAAGEMRSRLEGLLDVSKDRALLTTFHSFAAEILRQHGHYIGLRPDFTILVEQADREAVATEAMKMLSEDVADTIPGASNALPLIDKMLAECSNPEELAERLGEHKHKEFLSQLFNAYRSKLIKGNHLDFASLIGMAAQLLEERPAIARQFQRVYRYICVDEFQDTNKTQFRLLCSLVPEERPNLFVVADDDQLIYQWNGANPKRLQELQNRFSVEIVQLPENYRCPPAVIELANNLIIHNLDRSAGKERLRAHKVSTADTHLRVFYFGDFRQEVEWVVDELKKTPPDSRNSTVVLGRSKKLLDAVITECKQQGFPAYISIRKSQFISAPVTWLHAALRLANARQDREQLRRVCKAFFSLEGNNIRVEDVVATSSFQGGDYLRGWLEAALDQQTVSVATRGFLEHMKNTLLERLNHWLFIDSAFRWLDAIQNQPAATDNAFDEYQVEKDVWFLLQQEVIQQYGKDEVSLHSLLQEFDLRSKEAPPPKDAVRCMTIHSSKGLEFKRVYLLGLVEDQLPSWAARKKGDDSFEMSEERRNCFVAITRAEEELILSYSDRYFGYPKTPSRFLTEMGIKI

SEQ ID NO: 62818 - protein, 704 aa, Psychromonas sp. CNPT3
MYISRLSIVNYKNFEQSNFNFSKDSVNTIIGENASGKTNVFQAMRIVLDDSLPMNAKCLSKDDFHRGLGEPFGHWIVISIFFDGLGDSEEEHVLSNYILNDDGKSTATGSGTYSFIYRPKAHIRQEMHLLSSRYSDKDERTDAIKKFISKQSITRETYEPVAFVRTKLDFTDQNVYKKIVGDFDNYIFPDPNMEDSTEIGNYKPPYFSIVKEVACTYVKALRNVVADLKYHKTNPLYKLLTLESKHIEDEKDVANDIRKVNEKISSIPEIEALSKSISKSLINTVGSTYSPKINVSSQLPEDFTELIQSLGLIVEDSINYQGTGKIEDLSLGGANLIFLALKLYEYEAIRDNEAHITHFLMIEEPEAHIHNHIQKTLFENFNFKNTQVFVSTHSTQISSASKISSMNILARKESKTEVYFPASGLDEPNAQCIERYLDAVRSDILFAKSVILVEGDAELILIPALVRETLGVSLDEMGISLVKMDGTVFIHISDLFHKTRIKNYCSILTDLDASFITDEDFASDKYVKSQIDAEKSGALRKAKMNEYIKDNEYVEAFYAENTFETELVRYPENVQLFNDVVKTSYTKEAVREKVINNISSKDMPLRYYSTLKFANKIGKGWLATKMIEHVSIQNVVPTYILKAIKFSLSHRNLSEICLKMMDYNISQMEKKEQKKINSKSTFEAKFKAYREFFKNDSFIKFMDI

SEQ ID NO: 62819 - protein, 581 aa, Psychromonas sp. CNPT3
MPYSNLTKEQMSAVTFEDNLLLSACPGSGKTRTLVSKLYYILENSDKLSIGKKKVIAITYTNIAADTISERLLSYGIKDDSLWVGTIHSFCLQWIIKPNINKIPRLKHGYIIIDEYEQESKMRELREEFEIGNYDPIQTALDLNYQPIYPKNSVKYNLVVDYHKYLRDNGYIDFELILNISYKLLKMYPALCDRLALLVSHLLIDEYQDISEVQYEIIKLIIMKRHSKLTLIGDKEQAIYTGLGAIVKDKIEIENYFEIDNICEKNLTWCFRSSQRIIDYYKKYQDDKHEIESKSDLKNFHSIVHLENNIDKTQLADYVIGVVETHLKQGINANEIVVLCPSWFGVINLSKEIDLMDKSFSINGFLVSPIPKNQDNIWLSLIRLMLLKPCISNYINRNRLANELSDNLYHSGSLGSILNPKVILRTINSLVIETDIEIVEWINLVIDSFCNILKIDIIGNSVAKVGKCSLIDSALERMKKYEMQYRANDLHKFFSASNGVKLTTCHSTKGDEYEVVICTGLLKGKIPNWNDIIGCDNLHQNYVARRLLYVIGSRAKKHLYMISEKGYKTKSGADYETTAQL

SEQ ID NO: 62820 - protein, 227 aa, Sphingomonas sp. SKA58
MLIEGTAERLLLPAMIRKTDAAAQGEPQLSSQYLTVMEVGGAYAHRFFGLLAFLELRTLIITDIDSVAPGAKNKRVAVRVAEGTFTSNACIKSWYEPDVSPAQLLDKSTEEKTDGGRRLAYQIPEQDGGPCARSFEDAFILANPELFDLGEGDQATLAYEHAAEQKKSSFALEHAIVNTEWRTPRYIGEGLRWLAQGNPAPTLGPDAIAAELVAEVIDAADGAQVDG

SEQ ID NO: 62821 - protein, 253 aa, Sphingomonas sp. SKA58
MRDGIDRSLPSPLQPSTPAMRGFLKDSILVMVILRGLEVQAKRYGEMFESLGAGRPCIRRHHDKVAWTQSLEQLIQLRATGTIGAVIDLIKGQAHMHLPEAVLDREQRLADAGPEPVEGESRRIAQLRRLRDVAYTELMAVDAFIDGHTPFATKHGVKGAEFENVLVIVGRGWNKYNFAQMLERLDPGPPADKVESFESNRNLFYVACSRPKRRLALLFTQILSELAMAKVTALFGEANVIPLPADPAGGAAP

SEQ ID NO: 62822 - protein, 637 aa, Mariprofundus ferrooxydans PV-1
MRVRRLTIENFRGVRSGQVDFRGHTLLVGGNNIGKSTVCEALDLVLGPERLFRRPVIDEHDFYKGKYLSADNKPVEIIIRALLTDLSEEAERRFHRHLRRWNDIDGQFVDESGDGPEAADAEGTVWALPVVFIGRYEADEDDFIGNTFFDHPVDEMDEEEPAEQQLGGGRKIFGREQKRLCGFIFLRTLRTGSRALSLQRGSLLDTVLRLDGSGLTEMWEKTLAGLRGLDPAIGEIEQLKTIRDEIRKRLARFVNLSEDDDATGFFASDLTRDHLRDVVRLFLAAQPAPHQVPFQKLGTGSINLLVFALLTFIADLKGNRSVIFAMEEPEIALPPHTQRRVIRFILSEMGQAIVTSHSPYIIEQFEPTQIVVLDRNSDAVLSSRTVELGDIKLKKYRRERRQMAEAILSRAVIVVEGATEAALFPVASEVMESALGEEYEHLDLAGVTVFNAGSDKEVPIFGPFFKALGKPAFAFYDKQDVAPDAATAAKLADYTQVWESPEKGIESVLVSEMPVATMRRFLNSVKDRDDYPADKRIIDDNMSDADVEALTKAVLKIRKGDNQPYAALLISECENETELPVTIRTILESVHATLQSLVMDTESEDEPNQGNEAAATDISEAEALEPTVPDSREGDEG

SEQ ID NO: 62823 - protein, 524 aa, Mariprofundus ferrooxydans PV-1
MPGQKLLFLSFSRAAVRQVLKGCQEILTAEERRAIEVRTYHAFCMEFLESHGKLLSGKAVSIMYPTQERLEKAKFDGDWKEERARLANDEARYCFDLFASGVAELLERSTALKELLANCYPTVIVDEFQDTDDEQWRIVKALASVTRVFCLADRDQRIFDYRDDIDPRRIESLCDAVAPQTFDLGGENHRSPRGGILGFADAVLRNISPLPEVNDVKVVYYRSNRFPATVHAAVIWTLSKLRKEGIEDPCVAILARSNRLVAQISGILSETNEYNGTQLSPIDHSVVWDAELSAAAGAVVASIMEWSNESAEAPVAVTLEAIAHFYELKNATSPSKDAFEKVRKFRADGEKVRKSENPRINAAKGLLAAFDEGVEFIGDPLVDWRTARSLLNDIRPLNELYREARMVRLFRATDTLGAGLAELWLETGHYQGAASLVTDTLEYERLIAADQEPIGCVLMSMHKSKGKEFDGVVIVEGPYSGFFFDMTREQPPFERSRRLLRVAITRARTHVTIVRSDGARALVD

SEQ ID NO: 62824 - protein, 565 aa, Vibrio cholerae 623-39
MYIRKVTINNYRSFRTFEAKLQQLTVVIGENDTGKTNFFTALSLPLSGNLIDFNQKRLSVSDINKDSVIDFLTSVVNDDTEENQLKKIPKVSVTVEFADPKDAYETALLAKWIVADGDKETYKIRYDFKPKDDKDLLEVVKKSFAGKTLDDINWFTLPVELYDYQVVSVNNEKPIAYSDLKHVSLHSINAERDDFSESSSMKSNSIFTKLLMNTLNDDDKGQINTAYSEFFSAIEKTETFDKVIRTNDDFENYDSIIKQLECTPNLPNLKNILSNITLKYGNEFLYQKGLGKRNLIYILILFAYYKSCGDTFNLCCIEEPEAHLSVNNLRLVRDFIEKSSSNSGSLVQTIISTHNPSIINKLKISNVLAFTGEKAISLSDTPTKLVDYLRKRPNFDILKLLFANKVILVEGPTEEMLISTYLSKQPALNDIDIIPIGQRGYATFLDIWLALNKDNQNKKIGVVRDYDNSDAAKAKHDAYDTAHANVTVRTTTNYTLEIDLVEAEDNLALLNDLFEMEGDLDAVSKHMINGKTARMLDVCDAMVDEENPLDIKLPAHIAEVIEAVS

SEQ ID NO: 62825 - protein, 458 aa, Vibrio cholerae 623-39
MIEVQIAGAGAGKTYGLAKTLIEHIEACTSHKKTFALTYTNSATAKIEQEIIKQHGFIPSNLCIQTVHSFLLNEIIYPFSSFTLGDVYNDASIMMLPSDARFKNWHLKRLKDKNIIHAESVYNIAKQIVDETTSKHNNRAKKAKVRRLLAILGSCFDKIFIDEVQDLDKDALRFFEVLGSNDIDIYMIGDPKQAIKFPQDLDAFVQKLAQKKYATILPINNQTRRVPREILTVSNSFCYENQQQESLSEMVGELMYIESTDGRYDDLLTHYLDTKQLVCIDKKNGRYTTSSKHKHSFPREIEEMIRDSNHKKDKALFVKAAFSDFMDDAINEDNKKAISKLIARHSLALNKQHFAQLHELCNSCTKNDVQFKVRSIESIKGLDADVCVIILSPNTMKYLTQNGISKANRFNKEWKKIYVALTRAKKRLVLALDHDLLAKEDMAAVRDSIGELGFVPHN

SEQ ID NO: 62826 - protein, 617 aa, Vibrio cholerae 623-39
MYLHCLKLENFRRYKQLEVEFNSGLNLLVGENDSGKTAIIDSIKYVLNTQSYEYLRPCIEDFYLDPTQDESHRSSEFRIECVFKGFDKEEAKHFIDWIGTDDEKNYFLKIWMCASRKNDRVFYDVRAGSDDEGSQVNGDARDLLRATYLKPLRDAESELTPKKGSRLSQILYNHEVFANEEDNRLLRIMSLTNKAIEKFFTHYDGKELLTDVNTYLENFSLENNKLNSRFNVSDSSLKSVLEKLSLKLFNQSVSENNNQGLGSHNLLYIAAELLLLKKSNYQGLKLGLIEEIEAHLHPQTQIRLIEAIQKISEENKIQLILTTHSTSLASKVKLQNLVLCKDGCLYPMGKEYTKLREGDYLFLERFLDSTKSNLFFANGVILVEGDAENILLPSFAKKLGFDLSQYGVSIVNVGSTAFLRYANIFLRKDNKKLNLDISLITDVDVKPFIYEPKQTKEKTIEGEKTKIELTEEEVEEKRLITKQSILDKYEVPITVFVAPYWTLEYSIARSCMSELFYQAVYICHNTKSKDYVYTIDEKVSLIAEAKKTYKQWKDVDRLSVDEIAYKIYKEIVLDKKISKAVIAQVFADFISDANFDGVIEDENINYLVNAIKNVTSK

SEQ ID NO: 62827 - protein, 633 aa, Vibrio cholerae 623-39
MKPITDKDISDVEKRLSLEFDDGSKEFIKCSVSKDIQACPGAGKTTSLVAKLDIISRQMPFPDKSGILVLTHTNVAVDEVKSKLGNNASKLLGYPNHIGTFQSFVNKYLATPMYIKLYKKKPEKIDSDLFEEKLKSILTSNFIGNFILQRSNDNNYNRVEDFIKALEIHQDKIFLKQASKSKTIISNKSKIFYRVKSYLEKNIIGTIISDGYITFSHCYELANRYLEELPEIGSVISSRFKYVFIDETQDTDNGQFELLNKIFGNSKSIIQRIGDNDQSIFNFDSSDKLTWNVSKDHITISDTKRLSKKISKAASSFSITNHDLISNNDIEIDPVVLVFEDDNIENVIPKFAELIFIHNLHLIEKPIFKAIGNIGKAHDTYHTIPSYVNSHYEEDAEAVNGDDFRDKLNSYGNISPRHVNIHYWTILVQYLGDVGVNFDGKKFNKRTLTHYLKINKKEIYDELNGYSISIFEEIERVGALNPYLVRSLQSLSAFLDFVYDEALFLTVIRNYKVKNNKTRGDNITVKKNDTTIDISVSTIHKAKGETHTATLILETYKNGYDINQLLPLLKGKRNTMFPAKKKVLYVGMTRPTHLLCLAIHRSYDKSKTNRVTLNEQDLDEIRKNGYEVIDLAI

SEQ ID NO: 62828 - protein, 716 aa, Dorea longicatena DSM 13814
MEIVKIRVKNYRALKDFSMDWQKTLSLIIGKNNCGKTSLISIMQTFFSEGKGPGIRYDDFNLEFKLRLTDCIACKKSEWDNTDIQGIELFLYIEYNESDNIANISPLLMDLDPDNHMVVLKIEYVLNDINQLKMDYDKYFEKLSSGKKNARNKQQLFERFMRDKSKNYFKTVYKAIKYDYTIHECNPDIFTILDKNILHLSRIVSIKSIGAKRETDNKENDTSLSSLSNQYYERVKGEAGDPVLEEFEAQLLKTDHELTGLYSKVFEEIVGKVKRFGGTKENETIIQINSTLGRQELIKDNTVMTYKSGDQELPESYNGLGYLNLISIIIQIETIMAEFRCDSDKEKMPADINILFIEEPEAHTHPQLQYIFIKNIKELLREGKKCKDGSDIVVQTLITTHSSHIVAECDFDDIKYFCRVSPYAVISKNLCSLEAEYKDETDPNNKRYKFLKQYLTLNYAEVFFADKVILYEGDTERILLPAMMRKIDQEEEASGMPLLSQNISIIAAGANSQLFSPLLAFLDIKTLIITDIDAVKKKEIKGKGTYYVACEVEKGEKTSNHALNYYFKEALENWGRNDLTFFKKQNARQKVLSYIQKNWQQNEDGKLMIAYQTKEENGKEYYPRSFEDAFFCCNRQFIIDNISNFHCLKNKKYFDEKDESGIYQYSPYELAEKCVKSKPAFPMEVLLNSESDGKCDYSNWKIPSYIKEGLLWLKQD

SEQ ID NO: 62829 - protein, 489 aa, Dorea longicatena DSM 13814
MFETYPKLCKIVCSKYPFIFVDEYQDTSPLVIEILLESLQKVVEPSIVGFFGDSMQSIYDEGIGDIENYIKTGRVTKIEKKQNRRNPQKVIELANKLRTDGLMQQASDDANAPNMENGVIKKGSVKFLYGNDLKMAYSSEFMKDWNFENSKQTKELRLTHTLIAGEAHFEELYNIYDSDPVLKLKKDLKAYVKKKQIEIEEDKTFDEVLNEIEWFYQKGKNTGKSHLEVFLDDPSNEKLYSHVKDLPYSVVSKFYWEKDQLIDDKIEKDGKIIRDAKRDALIAHLFRIQDIIALYISSNYRDLLRKIGRKIQRNSDKRELHDELESLRLISQKSIGEVIDFANEKSLCVKSDAFNSFIEKNEYLYWRVSAVPYSVFQNLYSYIEGRRPFSTQHKVKGLEYENVLVILDSSGWNKYNFDYVLDDSIYDSLPKGKKESYKRIKRRTEKLLYVCCTRAKENLVLYYPEPSSGVIQGMERLIGKDNCVNLGLV

SEQ ID NO: 62830 - protein, 691 aa, Bacteroides uniformis ATCC 8492
MYISKVSLVNYRNFENAFFLFNKGINTIIGENASGKTNLFRAIRLILDDSLLSSAYKLNENDFNRNLKSWKGKWIIISLEFNEISNDEAIQSLFIYGSGVVEGDITKKATYNLFFRPKPEIRKQLAELETGDKDGLNGILDKITIEDYETFFTGKSTADFNDKNVQRELMGDFDNVIFNFDMDESKYGGRIPHQLSISREVSFTFIKALRDVVSDFQDNRKNPLLTLLKNKSEDIKEEDFKPISIKVDDLNKSIEELDDIQMITNNISETIKEAVGTTYSPSSLSIKSNLPSEAEKLLQSLKLFIGEPEEDYEGGIHELSLGGANLIFLTLKLLEYKYRKEKDKIANFLLIEEPEAHIHTHIQKALFDKLNYTDTQIIYSTHSTHISEVSNISSMNILGKYRNYSEVYQPFIGLGEEEIMKVQRFLDAIRSNLLFAKSVILVEGDAEEILIPIMVKQTLGVSLDELGISLINVRSTGFENLAQLFHNHRIKKRCAIITDLDVSITGEKTEASKRGKTRKENLDALKKKNKWIGAFYAPHTFEIDFLEAGNKKAVLSTIKKVYIDEQAIQKSKEEIESEDIKKYGKRILTMANKMGKGWYAILLGKYITSSTHIPNYILDAIIFAKPEFSKELLLQIFTYVLSTYKQSEEIDKLKNDLLTYKKDEITLGELKECLGKGIQKTEPILYILNRL

SEQ ID NO: 62831 - protein, 589 aa, Bacteroides uniformis ATCC 8492
MFVWKNGDLNPEQENAIFYEDSVLLVACPGSGKTRTLTYKIAYELSKLNSNKQYIIAITYTNRAADEIKERIELLGIDTKQLWIGTIHSFCVEWILKPYHMYIEELKYGYTIINAHDTESYLTSLCVPYASTKPKITYWDCQCFYFTSRGLVVKCTNSQKKESVVSIIKSYFQNLKENKEIDFELILYYSYLLLRDNKGICKTLSHIFPFVLVDEYQDTKELQYMILGAILKIGKNNKAFIVGDPNQSIFSNLGGFPMTKVDLEKTTGLHFNELSLTKNYRSSSLLVSYFDYFKTYDNTIEAVGKYKDYQSIIRYNKIVSINDLEDEIIRIIQFNIDECGISPNEICVLAPWWIHLSGLTRNLMARLPQYSFDGPGMAPFARDIDNFWYKLSRIILTDATPSLYIRRLRWANEIKTDLISIGIDRNLSAKKILYICNSISVNEQEGLEYLRKFFFQFLRELDVDLHQYNYLELHYNAFFDSSAKRIEKLRKDGSEFISHVDTFRKVFRQKEGITISTNHGVKGAEFDTVIAFGLLEDYVPHFSDVNKIENAKRILYVIASRARKNLYLISEQDRGKIPTIILNEYKYKY

SEQ ID NO: 62832 - protein, 685 aa, Clostridium bolteae ATCC BAA-613
MYLSCVRIWNFRKYGYANLDATPALEVYLKGGLNVLIGENDTGKTAIIDAIKFVLGTRSHDTLQIKECDFYEDLKGERSELLKIECVFQELSDDEAGNFLEWLTFDGDKAELSVRMIARRRDNRIMNSITAGMPELDTRFDAIELLRVTYLKPLRDAENELKHGYHSRLAQILLNHPLFTKEKDLHVLERYFGIANQKIEEYFKKEKLEKDEIFGIEDGEKGAKEITGKLEATLREFMGNNYDSHGYEPIISASRNELTSILRRLSLIIAQNQVGLGSLNQLFIALELLLFDIENRFNIALIEEIEAHLHPQAQLRLIAYLQNKNDNDNSNKKLQCIITTHSITLASKIKISNLIYCKNNKAYMLDSAHTALESGDYKYLERFLDSTKANLFFAKGVIFVEGDAENILMPVIAKIIGMPLEKYGVSIVNVGSLAFLRYANIFKRKNGECIDIPIAIVTDLDVRPDYYYEIKKEENKNIVYSIEDLKGAEEICELKCSDIEGKYYIKKEDIYEKIKEQNKVKKLSKKVKDSIEIYIKKEVSTELYRSFILEKKKDKYCTDKARLFTNNWTLEYDIAFSTLRVYLYASVMAAKKVKKQDSIEINISEEFLEAKRIIDEWSATGDSQEIIAYKIYEDLLLKNASKAVTAQYFSEILEQNVITVNAIIAKDESLSYIKQAIMYACGKEY

SEQ ID NO: 62833 - protein, 644 aa, Clostridium bolteae ATCC BAA-613
MLVERNTNYMSIVNFIDEDIHYAEKILLGNKTFDINEKLPIIKRMDKSISVMACPGSGKTTALMGKIIALVNHLPLNDGKGICIITHTNVAINEIKSRLGSRGDILFQYPNFIGTIQAFTDKFLSIPFLKQAYRQGITAINDEYYYQKMFQRKKEITILKKYAYGKCGRDYSKIDNYIKSIVLRRKDGEFDFCTGDKSLNLKNKSSDTYKALYSLLVDSLFSQGILRYDDTYLLAQMYLEEHPELSYYFCSRFQYVFMDEVQDNRGVQNEILDKIFLPERVVIQKFGDMDQAIYDDKEEVERNVLEDRYEISKSMRFPQNIADIIENLRVEPHKKTLIGNGNADAFIYILVFEHDKICNVKDKFVDLILEHNLKKEKSVFKCCGWVGYKEKEEQLSVKSYYPMYISNKDVTIKQVGMSFQSILEENAKHNVTVGLIYKSVIVCIVRYLNMNDITFEEKQITYSILEKYIKNNMTIEWINLRSLIVREATKIKNYDETAFKIIGTEALHIVFHFFEECNEKQFLKLFERQTNSKKDVLYNCYTRDGVSVLFDTVHGVKGETHTGTLYVETYFNKKTDMQRILKFMSGSNIKKMGADEKKALKVGYVGMSRATDMLCIAIGEDTFKMYEKEIEELEQSRKLQICHI

SEQ ID NO: 62834 - protein, 581 aa, Intestinibacter bartlettii DSM 16795
MILKKLDINNFRNFNSISIELDNKNVVFGMNDVGKTNFLYALRFLLDKDIRKNGFMPTDYHRHNTKEKIQITLTVDLSDFYESEDTKKFVSETRDGGVRTSDRGDIFYIRVEGEYNEEEVFGEPIMKWGDNLEDLKDMPFRGTSYSIDNIFKLVYINPLVDLQKVFEKNRRYIFDENSSDKEDKKLIDKINNLTKEVNDQIGNMSIINNFQKDITDEYKKLNNEELSIEIKSEMAINGFFSDLMPYIKRENDDNYYPTSGDGRRKILSYSLFNYINKKKYDNKIVIYLLEEPENNLHRSMQISLSKQLFDDDTYKYLFVSTHSSQILYEMDKAMLIRIHSKEKIECNSYLYKIEPNYKTDKKKLNREFSNALFYENVLLIEGPSERILFEKILDEVNPDYEQQGGYILQVSGTYFKTYIRALKGLDIKVIVKTDNDLRGKKGNIQEYELLGINRCCDLINMDKIENIIMPFNSETKREEKLTQLKSKKKELYKEYESLINQFKQNNIYLSEIDLENDLFSIIGPKMSKYLQKEEHKVVSYLQDRKLFNMVELIEHLTFEDCEAVYEDEKFKCLREMVRFDG

SEQ ID NO: 62835 - protein, 502 aa, Intestinibacter bartlettii DSM 16795
MDRGDRESILADEGNVIVVAGAGSGKTTILTKKIGIDLENNKKHYKIAAITFTNKAAKEISERLTISTRGHFLGTNDSFVENEIIRPFIQDALGNNYSNEFEVVYNNKFDTFSKGLELIRSQNKLGVYKDNKKNFKFELALSILSKSRVAQQYIQARYFKLYIDEYQDCDQDMHKLFMYINTKLDIKLFIVGDPKQSIYQWRGAAPELFYEMFENNDNNFNKYQLVENFRCCKDIQNYSNLLEREKNDLYKNVEVVNNVIGIKTSDYEYEKVLEYLDLNKEITILIRCAKSKKREIARELELYLKSKGHDFIYIPRTPLDDLGTGNKNILIELAKYIKDEKYTIYDLINNLPINLSSDEIKDINSFIEEFKCKNIYKINIDSILKQFFAKLEIEIKGEEIIKFKETILNDKYDNSYNGIEYKHKIMTIHSSKGLEFEQVLLHANDFKLHLKKDKNEHYVATTRAKDRLVIYLNNDDYLNHVNDVVKSSDLYNISNIMKVITL

SEQ ID NO: 62836 - protein, 677 aa, Clostridium scindens ATCC 35704
MALTSYTCAIRKEIGMRLSKIKIKNYRLLIDAELEVDSKTTLIVGRNNTAKTSCFECIGKVLDGTPFSFNDYPLSKRENLYANITSFMAKEIAFEELCERLEPISIEFLVDYSLDDPEDNLGALSPFIIDVDIDTTTALIRAEYKLKADEKGIWKILEPNYYENGNFSPADDVHNAIISNFHKLFEMTIYAINPQKPDEKQSKKQAELADLFPFHIIQAERCLGEDGTQDNSLSSLISDFFDMSEDELDPSVAEKVKELRAIVENANKNVQQQSDSILSALVSSAVGFGYPNGEELQLGVTTQLSIDDQIKNQTQLSYTAGTSKERLPSTYNGLGYKNLIKMEFLLAAFAKKVEKCGDACIPLLFIEEPESHMHPQMQHAFAEYLEAFLAKITSVGIQTFLTSHSAHIANTMVFSKIRYAQKTKAGVIYKNLNTFAQENPSNTDFIRKYLTLTKCDLFFADKAIFIEGASERLLLPDMIDKCAKAGDFDSREYKLPAQYYALVEIGGAYAYKFIPFAEFLGIPCLILTDLDSVSGQKGANGRIYYNSVPVSCGETTSNETLKWWVRKNKGLSEDDNTQIALTDITSMSPADKTRCKCHIEFQTTENGLCGHSLEEAIRNVNRAHYELGDTPTENDLEFSGKSKTDFALNLICECEDYAIPAYIKDGLVWLNDQRVLE

SEQ ID NO: 62837 - protein, 581 aa, Clostridium scindens ATCC 35704
MSEEHKRTNYDLAKAEADKVDEQIISALQDGISFRVEAGAGSGKTYSLNKAIEWIQANKWTEYRRKKQTVVCITYTNAAVDVIAERLSKDSFILPSTIHSFAWNAIKQYQSFLIDIVTSDPDFLPDEGDFFKVTEVTYTLGHRYKENGIQYLYHDDVLKLFCLLLDNAKFRHVFAGKYPLILIDEYQDSYKPIIDRFINFFIAEKKGPQFGFFGDAWQTIYQSNKACGLIENENLAIIKKGSNFRSAPRIVQLLNDLRPDLPQTSAIDNFDGEVIVITCDDYTGPRRTERNLKGELPAQELKIRLSNVTEKIKRESSEEDDLKVLMITHKVLATQQGYEQLLEILADGLRDKEDPFLLFFMDTVEPIYKALKDSNMQLLFDTLGIKRFPIKKKSEKVKWKELQQQLEDARTKRAIDVFELIKRTKLIPIPPKLDGWYHLYQKAPDTVYVSKASIQSFLELDYLQFTAAIDFLFPDAMFSTEHGVKGEEYDNVVFVISKGWNLYQFETYAPMITGHSDVPEGKQASYERNRNLFYVCCSRPKKRLFFFVSVPVDTVFRAFLTKLVGADNIYTYSQYLETDLK

SEQ ID NO: 62838 - protein, 746 aa, Roseobacter litoralis Och 149
MLSITAIGVSLRFYCYFGYSLMKISSFYLKNYRRLIDVELVLDDQKAILVGANNSGKTSGIGALYTFLMRPENLRVRDVSKQHWQSISSIGVQLGADEISTEQLEMLRTQLASFLPRLDVTIFAEASEAYRARDILPHLDWRGGSLGVRIAYEPADIAKLATDYSKAREVVAKHDGVLLWPKSLFDFLEKGGNFNKYIKQKHYILGLDTANAIDVDEDGDQAGKSEPPLQTLTSGALRKLIRVDVISEQRGLGTEDSANDQGPYSEKQRLHKLLREYYDRFLNPDEFPEAGDIEVLQKQQEMEEGFTKRLAKQFKAPLEELVDMGYPGIGGNPTVEIAAKVSGTDALQKSSSVRYRFDKNQDENLPESYLGLGYQNLIYLTFRLLGFRDRWMREGKSVSSDADLTEEIEPIHLVLVEEPEVNLHAQVQRVFIAQAYETLRKHPALGQNSTFQTQLVVSTHSSHVVNDVDFKDLRYFRRSSADDAITMDHTSIENMSELFSTAEDEMKFVSKHLKLTHCDIFFADGVIFVEGQAERLLVPEFITNKFKGLSKRYLSILEVSGAHTHKYKALVEKLGVVTLVITDLDSRDAAKQKCAPKKGESQTTSNYTLTSWYPQKSLIDALVALPAEPSYSKNSAMPLFVAYQKPIVLDEKEVLSRTFEDALILANFVHPHFDDMAKLQAVKKSFKDGSTLLEEALFEYVKTLTKGDFAFDCLFYIASEADHSFEPPAYIREGLEWLQAQLSPSS

SEQ ID NO: 62839 - protein, 646 aa, Roseobacter litoralis Och 149
MPNDHTVASTKSIQHDNPVDAGIRDCLKLGSGKSFIIFAGAGSGKTFSLENALEHLKLAYQEVFSRLSQQVAVVTFTNNAADEIRDRVERNPIFSISTIHSFCWHAIDGFNADIRQWFLSEIPNELEKLKEQERRGRAGKASDARKRSIARLTEKMEWLANPQEFKYDPNGVNSAQNALAHADVLKIFAHFLTVKPMMAEVLANKYPFIFVDESQDTNKDVINALFTLQKTQFEKTVVGLFGDRMQRIFGGGEPELGKSLPSEWKEFDKQMNHRSARRIVGLGNTIRKEDDGRLQYARDGAAEGLVRFFLLPHGTSDKDQVERRIRNIMAKTTGDLAWNVPKTDQTAVLLLEHRMVSRRLGFTTLSDALSKSRTIKERLYEGDSLELNFFSNTVLPLVEAGQAEDIFETMKILRDNKSPLLHETVFSENELDPLLAARTAEGALRSTISNSDVSLRDVLAVIAEHNLLTIPSKLRSFVTIQNEVLPVIDLEFDNDTAVQETSETPSDDDEFDAWAAALETPFQQVQGYRDYSTGNSIYRTHQGVKGNEFERVMAIMDDDEAGGFNFSYEQYFGAKVPSAEILAKDKAGEETGLGRTRRLFYVTSTRAKRSLAHVIYTADVEQVQQNLLARKLATEGEILLFPFLLD

SEQ ID NO: 62840 - protein, 649 aa, Providencia stuartii ATCC 25827
MHIERINLQNFRSFGPGGQSIAVDPNLTTLVGANGAGKTVLMQALQRMFGISNEQRTIRRQDFHIPSLDEEIPCKRTLMLEAIVAFPELDDEDGDHSVIPDFFHHMSVTDEGGKLKCRLRLDAEWEDDGSIDGYITSQFRAVTTWGEPVEADFHNVRPADRSRIQLIYVPATRCAVSQVSAFLKSRLWKAINWSEQVRSSFTQKATELNESFEGENAISTVTGKLTERWQELHSAGTDSTPKFRLVDQRFEEFVRKVEVLLHPDESRRDRSVDELSDGQSSLFHIAMTSATLDVETEILAQPESEDFLGADLPLPSLTILALEEPENNLAPYYLSRIISQISSLVHGLRAQAILSSHSPSILARIQPTQVRHFRLATESNTTVVRQLTLPDEENEAAKYIQQAVRAYPELYFAKVVVLGEGASEEIILPAISEAMGIPIDKSFVAMVPLGGRHVNHMWRLLTDLQIPFLTLLDLDWGRHGGGWGRIKNAVAKLIEYGIPAESMGVHADRGAVNLAAFDTLRCDNFELMSRWVSYLRQPPFNVYFSSPLDIDYSMLKAFPEQYCVAPDESSTGPSSRGEPGYAVMGDEGNPEFYADDLLNLRWYRYLFLGRGKPSTHIRVLGTIPREQLAQNAPEELRALIRSIHTTLQN

SEQ ID NO: 62841 - protein, 630 aa, Providencia stuartii ATCC 25827
MKFIRPDHWQPQGIDDLEPNAWQALRQRESTSIIAGPGAGKTEFLAQKAAYLLETGLCPPNKKILAISFKTDAAKNLADRVKERCPEELSNRFISMTFDAFTKNLVDRFRMALPEHHRPSKRYEISFPSSHQEKLLISSFSNNFWNAVGIYSFTQRLQNMNQFIGSVRIGAPNLSWLEEEFLTFWLSQQINYPDCISRVSFLVLNRLAEYIVRTNEHVRRSIRASYPIVFVDEFQDTTFAQYDFLSSVFKSSEAEVTAVGDYKQRIMGWAGAKGDVFHQFEADFSAHRHSLLLNHRSSPELVRIQHVIAQAIDHEVREVQTSNINLISGDAAWICCSYNINQEAAHLAQWIANDLLDRSLNPRNYSILVRQKPEDYEQQLSYYLAQHGLSLRNESVKIGQTTLQDLLAEELTILFSTLLKLGLGRRNAQAWNQLSSDIQILRNTNQEDEKALRQVERELTKFISTLRVLMQQPLTRENGRDVFERTIKFINSDDLRSSFSRYATGDLLGINLAALEEFFTNCVDTQISWAGLLDEFEGTNHIPLMTIHKSKGLEFDTTIFMGIDDNAWWAYKQGDTEGLSTFFVALSRAKQRAIFSYCQQRGQRTKVADFYALLTAAGVQEYVIPPSVVA

SEQ ID NO: 62842 - protein, 240 aa, Coprococcus comes ATCC 27758
MKVAFQDFGYRLNALSAECFFVNGVFLVEGVSEVLFYTALAKEIGVDLDRTNISILSVEGVGFKPYIAVCNALNISWVMRTDNDVFAKPNKKPTKNYYAGISRVMGILTQFKDEDNELIKYWNEHDNENEWEYKKKPPKEAIDLNTYIREEITQYGIYLSMFDLETDLAKSSIKNILKEYYGKKRENSLIKAMQTHKAKNMMDFLSKKRSELGVLREDDISKPLIALRSSVEERIHPKHD

SEQ ID NO: 62843 - protein, 278 aa, Coprococcus comes ATCC 27758
MNQQMNKKAILNYNGNTVVTANPGSGKTYTVVEKIGKVLHDLPSYKGIIAISFTNKASDELKKRCKRKGINAKSSFFGTIDKFYISEIIIPFASHLTHVMPEYQVVESTETEKHYSELGMITENVTKEQGALLKEALCKGKIFLNISGEMAWYIMCNVPGVRKYMQSRYSHVFIDEYQDCGKIQHDIFLALCEMGIIGVAVGDVNQAIYGFTNRFPRYLLELIGKDDFEHFELSKNHRCHPSISEYSLCLYGISKEIIEDKRIFRVSVDGNEVNIAKR

SEQ ID NO: 62844 - protein, 782 aa, Citrobacter youngae ATCC 29220
MDEGNPMHLEFLTIKNYRKFRSTDNKVCFVKPEVIDMTTEGEQSKSVIAPSTTLIIGKNNAGKTTVINALKMLCGNEQPLASDFNLSYLNELFSLYKRSYNIDQDTKFEQLETPTLEFTLAIKVDFNDNDLMTNLSPFISISEGESGTSVSIRIVVKIVYSEETAFKEEVKRIFNLKNSEGNTLDHKQQFEMFYLMLSKDTNCFKNEGNLYQTNFIDILGEPAEKFSLKKLINIKEIKANRHLKEGVLSDVFNKIVSFQFTNDTKSRTGLESSIHLINQQISLSVGAKSTDISQVLCEIEHSNKVDLNLSGNVSYDAIMKGLIKYNFIDGEDYIPEDQFGLGYINLLNIIGEIIHFVDSYENKSHFSKVNLLFIEEPEAFMHPHMQEFFIKRIDNAVKKALEIANNSSVIKKTLQCQIAITTHSSHIVNSKIHSSNTFNNLNYLTSIKKCTKAINLTDECVVSSEDNDANEKLKFIKKHIKYKVSELFFSDAIIFVEGITEETLLHYYLEKHPILSNYYISVFNINGAHGKLYFPLAKQLCVPSLIVTDIDIKREKCEKCKSHKENETCLRCGQQAKNGDIPFRPGTAPTFYQITSLSGRTTTNATLKELNIKLKDKSEEEAGQLDNIEFFSDENLYVVFQKDPIEGQYATSFEEALILTNYNNDALNEALNECKPGIYQEILNSSGTKPNKNLISHSYKLQKKLSDSKSDFSNKLLFNFLSAEDIEDLPKLPNYLEDGLKWLAFKIQRDSAPPTNEYGMVVNQDVVIPKIEITAEIADVNK

SEQ ID NO: 62845 - protein, 705 aa, Citrobacter youngae ATCC 29220
MLTNEIKELEVQKSVINHVDNFNSFRFNAGAGAGKTYALIETLKYVTINKIIATRSSQKIACITYTNVAVNEIKKRLGNSEVVHVSTIHEMLWDIIKRAQPQLLICHKEKIINVIDDNKKELNHSEKAKFFINLDEPKKQEFIQYIFQTKDIFYHYKDHSAASFRKAYGDSTIEKPSHLDSFLKNVSNFKFVVSIFYKIQRLEECLARIESNKENRVYYDSKVNIDRLHYMKFSHDTLLEYGLKLVKTYPMLCRIIIDSYPYFFIDEYQDTNSHVVGFFKTLYDFSNQNNKKWMVGYFGDTAQCIYDDGVGENITKLHSGLYEIDKIFNRRSHQQIIDVANKIRADKIVQIPISSESNKGSVIFSHHQSKEKLEIAKEFLSHYKSYLAQTSKGRDNDDCKIHCLVLTNRLMAQFNDFENVYQAYQNSMIYHENLNTQVLSKQLEKLHPTILIIYNLTKLYQDILQNNVSYHCIFGTYGEGLSFSSANSILRELQNKEIVSLNDWIELITDRLEYSEAKSSLEKILINRINSDKEKTVSPHLFKSAIINSINVLMNSMSEDETVAEGKIQSILSLPIKSLMNWINFIDGTEIGDIIYHTYHGTKGEEYNNVAIILEHSFGNKDKLKFKNYFKFLQENKESRAHLLTDDIFKEKHNNTKNLLYVACSRAIKNLRILYLDDISEIKEGIESIFGQSNLWLSDSDNITV

SEQ ID NO: 62846 - protein, 744 aa, Rhodobacterales bacterium Y4I
MKLRRIEVFNFRKLRRARLDMSDKQTLLVGANNSGKTSAMKALRKFLKDRGGIDTRDVTASNWAAIEQIAGAWTQEVEVDLSPLLAQLPFIDVWLHADTSELHHVAHLIPTLTWTGGLLGVRLRLEPKKGADIKAQYLAARDAAQTLQPGGATAKGFALWPRDFREFLDKRLRDLFELNAHILDPMSFTTTGPVEPQALPALSEGIGSNPFAGLIHIREINAQRGFADAGDSNGDDDEPTNATSRKIASQIQPYFRKHIDPEKDPTPNDVKALEAIHDAETTFNARLKDGFADAIKELESLGYPGGLNNPKLFIATQIKPVDGLDHPAAVQYDISGDTSGVKLPESYNGLGFQNLISMVFQLMRFRDDWMQVGKFKSQLVTPDDKGIEPLQLVLIEEPEAHLHVQVQQVFMARAHKVLRDHKDLEQEGSAFTTQLVVSTHSGHIAHAAAFEELRYFKRELPSQGVVPTASVANMTGLFGADNETHRFVTRYLLSTHFDLFFADAIIVIEGAAERILLPHLIQHHYPDLAAAYLSFLELGGSHAHRLRPLIEALEVPTLIITDLDAVAEVDKGGKVVKESVQPCCGAAQTTANHVLKTWLPKLAEIDELVGSPPTALCHTAPDRSIAVSYQTPQKVTLGSVSTSVTPSTFEDALVLTNPKAVTDAAGTEFSCLMTRAFAKSIAEAQAPEDLAKALFERLAKRPEKAAFALDLLYIKDIKVLRAPPYINTGLTWLAGQLKGVEGAA

SEQ ID NO: 62847 - protein, 650 aa, Rhodobacterales bacterium Y4I
MTDVTDATRDAGADATIRACLSLDQPRSFFLFAGAGSGKTRSLKEALEGLDTQTLTTLRKHSRKIAVITYTNAAADEITRRVKADPVFQVQTIHSFAWSLIEGRTADIRGWLESNLRTEIAEIQAAHAKGRAGTDAHDKREKKMASKTKRLERLAEIRAFTYAPEGDNFGRDALQHTEVIALAAHFLTESETFQNIVLARYPFILIDESQDTMKPLMEALLTFEARHRGRIALGLLGDTMQRIYTDGLRDLDQRVGDFSQPAKQMNHRSRKRIVDLANSIRRDDDGRQQRAREDKPGGTVRVFLAPSEGTDRAAFEASARAEMARITGDSAWQKAEAIKTLTIERHMAAARLGFSELFEPLSKPDKLKDGFRDGTLPAMRLFTHRVLPLVTAQRNGDAFAAMAVLRDGSPLVDKRGIREGGGGQATGLDAARAGVAALMTLFKDEPDPSCADVLAVVAEHRLFPIPDQLRACLPDDNPVAQDMADILAELDPLFDELDLTTPEGSPPTETTITEAWTQALEAPFSQVARYLAYVEDRSPYGTHQGVKGLEFPRVMVIADDAHTRFKGLASYETLFGVKPLGPAAQKKADNGEETTIERTRRLLYVTCTRAEESLALVLYSETPDTIRRFLISNGWMAEDEIVIAATDGTH

SEQ ID NO: 62848 - protein, 581 aa, Caldanaerobacter subterraneus subsp. pacificus DSM 12653
MKIIGLQIKNFRNLDDVKMLLHPDINFLVGENDLGKSNFLDMLDIIFNGRRFKEDDFFDKEKPIEIQITLGLDDIEKGIFGDLFDPQNSDVINIMIRQETPDEDIRYFHRESEEEIHYSDFRCVNFIKYDSLRSPKEELTFYRGKGVGKFLNYLVEKFFKNMEQNILDIEDFIKKDQIDQIVSYINQKLEKLKTFKKFGIVTSIEGEAKSLIYRLLTMKDSKGLDIQKMGYGVQFLTLVILSIMEKIMYLLEDKRRQKCIYSLREKENVQNYISLILGLDEPEIHLHPYMQRSLIKYIYSILLNENAEFSSLLKELFNIDKILGQAIIVTHSPNILLNDYRQIVRFYPFQGYSIKIKSGVEIKLNSQEEKHLLMNFPYIKEAFFSKCVIVVEGETEFGALPIWGEKILGDMDEYGISIIKAGGKKSAIPVSKLLEQFDIYSIPIIDKDTEPPEDYDNLITTNQKDFEEEVVEKLLNKNKELLFQLIEAFDDKGLERKIQKGKLKQIAERYKINIDWDEKDYKFSEIHGFNNLNLTKAMFLAWLDINKSVILGRFIGEKLERSYIPEPYLNAIKKAKGVAGE

SEQ ID NO: 62849 - protein, 596 aa, Caldanaerobacter subterraneus subsp. pacificus DSM 12653
MKELIEKIKQNHSNDEEQLEVIFTDKKRIIVEAPAGYGKTKTMISRIAYLIATNRIPNPKKILALTFSVNAAYKIKKDVAENLPFILSNSPISPVSVKDKVFATNYHGFCRRVLRLYGYLLHESLRNIEYLRGVDDSKIEELINLEVGLDFSNAKRLSDYNDAIKEIKIQYLEDNYSDYIEKIKFYFLPNGYITFNAILLLTIELFKKYPAILKFYRTLFPIVIVDEFQDTNILSWTLLQLLIGEDAEVIFIGDPLQRIYDFIGAIPDLMTEATTKYDLHKIELKTNYRFKNNQQLLLLDKNIRENAKNPSSPSIQEIANIKTFQFSDQTEEAKGVLSLCQEILGNDPASKIAILVKQRGRNIDEILKAFKDTKFPFFYALYGDEEKEYIEFHQKSLKEFLDVVSNSGNKINKRIIQRFFKKVKNIFKNSDDEIYNSLLILLETFLNRIFIEFSFLSMEEKIELIKDVLESRSLKQYLGYVESKIIISTVHGGKGLEWDYIILPDMEQYSFPNYPGLCGICQFKNDCKINWNLASRIPDFERRFYSELSVFYVAVTRAKKEVFFTYSNKRIHHTGDERDTNVSCLLKLPGIKLNYQ

SEQ ID NO: 62850 - protein, 692 aa, Roseobacter sp. GAI101
MHLKKITVRNFRRLKDVSIDFEESETVFVGPNNSGKTSATAAIRSFLSSRDFKIHDFSLCSLTAINAYDPAAQTAHPCIQLDLWFHIDPDAIEFGTVFALATDLSGDFTEIGIRCSLEVEDAVELWTKYDQAFPVQGDGQRKKTLVDFLALDGNLKAHFKPRYYSLEKSAAGVVQTPLEPSEGKKTLRSLLRVDFVDAQRNIDDENATRSNRLSEAFAAYYQRNLEQAEAAEEAVAVIEENNQNLTAHYDQHFQPLMGIIADLGLPSHNDRAMKIVSTLSSEVALRGSAELFYVDATSSHELPEAYNGLGFKNLVFMAIQIDNFYKQWLATDENRPLCQMIFVEEPEVHLHAQVQQTFIKQMWKVLTQGAGEAEPRPQLTVTTHSSHVLDAVDFSKIRYFRRVDLDDEGTGNTYPGSIVKSLKEFQPDAINVGDLEVSVEEALAFLKKYLRLIHCDLFFADAAILVEGAVEKLLLPKMIDLAAGGLNAKYITILEVGGAYSMRFAKLLEFLGIPYLVITDIDSVDPANNRKGCKATDAGAVTSNASIKYFFDGSDLVSDLTAKPDADHIQADNMRFVSFQKAVAIEYGGASHNFHGRTLEEAFVYENHGLFSSGALSIGKDIPADAAEFHQLVWERIKSSTFKKTEFAMDVLARDPDVEGTAPWAVPDYIAVGLRWLEARVGDQPVAGELNA

SEQ ID NO: 62851 - protein, 613 aa, Roseobacter sp. GAI101
MPDLQPTEADIQIAKCIGEETSFAVIAGAGSGKTTSLIEALKKIRETQGRQLRERGQSVVCITYTNRAVDVISSRLEFDELYTVTTLHGFLWGEVSRFQAPLREALAEHVIPAHIEKAQLDDNGGNSKKAISARKKIERLHAELAELVENNPPVKYEETTVSDYSKCVLNHDDIIDVASHLIATKPILQKGLGFKYPYIFVDEAQDTFPQVMAALNSICAREGLPMIGYFGDPMQQIYDKRAGDFAGPEGSVTIAKQENFRCSVSVINLLNKFRDDVEQFPAGKNADVEGSVEITIAQAPNPEGPRKTYTPEQLDHVSGMFHQALENWEWQDIPSVKKLFLARQMIARRLNFSTLHRLFTGVYSSSRSQSDYEDGTHYLLKPFVEGVYPLVSASTKGDPKRVLEVLRQTSPAFFPDGVNKRKSLKQMLDRADEASEKLAELWVGATTKEIFKYCEDSGLLPISDRLSSQLGRDAREGFDAENEDHQRDKGDWLADEFFKMDCREIGPYAEFLDENSPFSTQHGSKGEEYPNVLVMIDDIEASWNTYSFGKTLTPGTAGEPTERQAELTRKLTYVCFSRAEVNLRILFFSLNPEAAGRELIEKGLFIEDQVTYI

SEQ ID NO: 62852 - protein, 175 aa, Parabacteroides johnsonii DSM 18315
RLEKGELKWKSAIPQKNKKQITNNDTIKHWLKIESIDMLLELPFPNKQRGNICISYQTPISVNWTDQKKEDELYEVHPYTFEDSLVFTNIKLFQSDEKMAKMGVITTFYNYLKKAISLEDFHEKMFSCLEKRKNVKASFATDILCTEQFDKIQAPSYIKEGLIWLQKCLNNKIRK

SEQ ID NO: 62853 - protein, 610 aa, Parabacteroides johnsonii DSM 18315
MNKSVDNILEECITKGSRKSFFLFAGAGSGKTHSLVVLLNKIRDKWGQKFKIENRHVAVITYTNAATDEIISRLNYSPLFHVSTIHSFVWNVIQSYQSDIKKYYLRFKEEEKAELEEKINKARKKDGKTYLNNVGKFDKVIKSIAKIETVHKFIYNPNGNNFEYNALSHAEVIKIGAKMIVENKLLQKIIAQQYPFLLIDESQDTKKELVQAFFELERNFGGENFTLGFIGDQKQRIYTDGEERITTIIPKEWETPVKPMNYRCDKRIIKLSNKISESIEQNATQNPRENAEEGFVHLYLIRNNDEMNKFEKEANVVLSMKELTGDDKWSMEGNNVKILTLEHMMAARRLGFEDFFGIMRHVDKYSQTLLQGKVDDMDIFSKLSFPLIDSLKKGDNLNALNLLKSYSPLLMNLPSDKAYETLSKCQEILDGLQKMDLGRVTIKEFLKNIVVTNLFNVPQLLIDALSVSLESLEEQNDEVLYAWCSVMNLPVIQIVKFNNYINGNSMFGTHQGVKGLEFDRVLVIIDEKESNMPLFNYNKLFGVEPLSTTDINNRKEGKETTIERTMRLFYVACTRARHSLAIAVYTDNPEIIKQTVTRNDWFDSDEISIM

SEQ ID NO: 62854 - protein, 351 aa, Acinetobacter sp. ATCC 27244
MYIKKLSITGYRCFSELFEINFRKGLNVIVGENGAGKTAIINSFRQLFIDTESGSYNVSSDDFNKPFKEASIAADSFKIKVEFDNLENAEPIAFLQWSDAVNNVILNLEVLNKELRGRFKKSFWGGNSKASQFDVELFDKIHCIYLPPLRDAESKLVNGRQSRLSKLLKFIEADQLKACKKAETKHPLEEKFKDFNQSLIDDKDSSIKKANKLIADHLLEAIGQNFSQSTHIQFVENEFSKIVENLRLIFFPKITTAEADQFRDLCQNSLGYNNLLYIASILAELTLTKEESLYRLLLIEEPEAHLHPQLQVRLLDHLETVANEHNVQVIVTTHSTVLASSVKLDKIIHLT

SEQ ID NO: 62855 - protein, 587 aa, Acinetobacter sp. ATCC 27244
MKFTDEQLHYIERTQITENIFLNACPGSGKTETIAQRVANEVESWANFPSGIAVLSFTKSAAKEIEHRIKEKIDNNTTYPHFIGTFDSFILKNIVNPLSKDISKYEGHNGDYSFKVVNYDSQLFFLTKYPHGYQKISGHHVEIDNRTGRFKFHTPNKDTNRALNAMVLEQWQKDDIYRAKKKCRDAGFLTHKDIEYLAESALTTRTATQDYAKKLAKRFQLIIVDECQDLSFEQLNILKAMMLNGTKLHFVGDLNQSIYEFRDVDPNDIINFITDNGFREIQLTKNFRSCQKIVNIATNIMKSGSIEADFTSPEQSCFVLQYKDSPSEVISQFNELTKQYSNRVLVARGHQTLNQLSIVDSTPAKPVEFLLSSILNFDETSYTSINQSLIDFSKYIKDKVKLETKSSDYNCPQIIASELDWRLFLHNSIQYLLNHDLQLDSCTWTNWCKKVNAVVINLFKQEFVLSEIYEALKNSDFKIRSPSGKATHCISNYHRKNDSLDIKFRKSTIHGVKGETHEATMLISNPTRNGTGTHWSHWIGDKTSEAARFAYVASSRPKYILVWCVKKLKSSEQKDLESLGFEILDIK

SEQ ID NO: 62856 - protein, 257 aa, Acinetobacter sp. ATCC 27244
MGEVFKGCESKEDKEFLQKYLTLTKCDLYFADIAILIEGATERILLPEIIKKVDIDHKTDLAQKYLSIVEVGGAYAHHFYKFLDFLELKTLIITDLDACNKVSKSDKNGKDRISYKSCMVSDGTHSTNSGLNKWFKIYAQHENTEATEATEATEATEATEATEATEATEALNIIQFVDVSNIEDEDEDEDEDEDEDEDEDGYILLEKLIQVSDIVKKNGVKCITYQVPEDGSKICGRSFEEAFILANLNKFNLHGVA

SEQ ID NO: 62857 - protein, 583 aa, Acinetobacter sp. ATCC 27244
MNAELNPAEQASLISLSQIQQCIDNRHCFRLEAGAGAGKTYSLIESLKYIIKNKSAEFADKRVACITYTNVAKDEILNRTDNHPLIYADTIHAFCWELIQPFQVNLRNILADLDDKWRSKVQITSITNQIVKYDLGIMRLTETEAYLHHDDVIKCMSKLLQLGKFQKHLKNKFPIIFIDEYQDTNQDLATSIVNYLIENDSGVLVGFFGDHWQKIYGKDACGLVNSPSGKIVGIDKNANFRSDKNIVACLNRIRSELPQNEYNPCSQGTIKVFHSNSWDGKRLTANHWQGDLPKEETKAYIDQVKNKMLADGWDLSNPVKTKILFLTNNLIATEQGFKNLADCFKYSDDYLKKNDPYIKFFLDILEPSILAFNDKNFGKVFQILGQKNPNLKCQSDKGKWAKHFEELSNIRRASSVQNCLNKIKEADILSIPFSVQKNEIKFTEILTKTQKEKTNKDIEFQSKYTKFKAISYDEVIQLGEYIEEKTPFSTKHGVKGAQFDNVLVIFGRGWNQYDWEKLLLWMKNGVPNGEEEKFEKYRNLFYVCCSRAKHNLTLVFTQLLSEDSINKLKEIFGSENILGDPFN

SEQ ID NO: 62858 - protein, 574 aa, Pseudomonas coronafaciens pv. oryzae str. 1_6
MLITKVVLKGFRNFADATINLERNTLIIGANNVGKTNLVYALRLLLDKSLSDAEIEPMESDFHISGAGKISDTLSITVYFSEVTEDAVLASLKGNITDDSCFALQYTADRRSLTYDIKIGATRSSLVEIPSRYYLKHINLRYVKSRRDLEKYINTEKRQLLKLSLENRSVTESKSDHREMARIGKALEAINDKIRNLHYVKGATDSVNEELQKLAHDFSEYEVKLDSGAIQVQQFIDSLRLGASTSGASVMLGGDGRNNQILMALWKAKSQREHDPDSEVVFYCVEEPEAHLHPHQQRKLADYLINDLPGQTLITSHSPQITARYIPSSIVHLKVTSGKTRAASNGCSNCISKAWDHLGYRMSILPAEAFFAKCVLLVEGPSEILFFSELSKQLSIDLDFYNISILSVDGIQFSVYVKILDAMEIPWVMRTDNDVSDIKVKKVPLRHLAGINRCRAAIGLSPMSHSPLGTTTQSLLADGTWKNTSNETNPKGAYLSRVDLEHDLTEEMESEVVAYACKKLKKRTLDATGAIKYLQGKKAIRMRELLAQISVSLPLIKNGFLAKPLFHAKALAEA

SEQ ID NO: 62859 - protein, 511 aa, Pseudomonas coronafaciens pv. oryzae str. 1_6
MVEKIRQEFDNLKPHQGIIGISFTIKSSKELGDKCKKNGANTRASFFGTIDNFCLAEIIFPFLARVYGVSKQEISCVQFSQLKDEYKAHLPDLSKSDINLSTDDYDFYESEFMEHYRQGFVLLEAVTIIACKVLEKSEACRRYIKSKYRSVYIDEYQDTSEPQHALFCTLHSLGLKAVAVGDTQQSIFAFRGSDPRHLLALVADAVNFEHHIIDINHRCHPSIINYSKRIYSSQCQLIPVAANDIRVYHRSFDGTQEAVASGLNNWIEKSVRALKMEDLSEVAVLVRWNGSIDRLQRHLTLPARFYRDDSLSKIASPLSRFFSVLLTFYFDERKLAQQILNDFLLTKRTPAGLRDLRKSIHDLRNFELNRLPDEFIKIAKLFNFSAANKTEADALLQTISSSEDILHYKAVQPGEIQVMTLHKSKGLEFDLVIHLDLYDWVFPTRTYTGNFNEEVFTDWDQDLNLHFVGITRAKKWCVLMTSTQRINSEDNVKKGSPSQFLSLPGIKGLYR

SEQ ID NO: 62860 - protein, 700 aa, Enterococcus faecalis Merz96; identical to SEQ ID NO: 62794

SEQ ID NO: 62861 - protein, 573 aa, Enterococcus faecalis Merz96; identical to SEQ ID NO: 62795

SEQ ID NO: 62862 - protein, 620 aa, Enterococcus faecalis Fly1
MISILNSKKNFFFKVQNYTEDKDLDLFEIDGIKMQIFIEYSDKDNYANVQNFMMNLEPENNIVVLEFFYSCKEDKFKQLKVDLKEEEAVIDTFEEFSKYMNKHSLKYFELHRYSREFDIKLNKVTSNTSEEIKFSTIKKLINIKTIKANREASNKINDSSLSGLSQKYYNTQISEEEFDFSELQKAINEADNSLSKAYNGTGDNSGIFTEIFKSVERFGSGTTETTLTIQSSISEVDLLKNNTTLYYKSDDCQLPESYNGLGYLNLIGMIFEIETSIAEFCGKQNESPADINILFIEEPEAHTHPQLQYIFIKNIKELLGERKIKNKIDLQTVITTHSSHIVSECDFDDVRYLKRTENSLISKNFQELKERYASDSHAFNFVKQYLSLNRSELFFTDKAIFIEGDTERILLPTMMKKIDSTHITDKKYIPLLSQNISIIEAGAYAHIFKPLIDFLGIKVLIITDIDGVEKNGGKSCASTEAKYTSNQSLRKLFELPNDDTQFEVLINKSYENKTISDQMYIAYQTEITTGDKAYHPRSFEDSFICLNFDYIKSNKDNFTQGLKKINILMEKPSNFYNIAQECIAKKSAFATEILYYDGVNGKTWETPSYIKEGLEWLQEQ

SEQ ID NO: 62863 - protein, 631 aa, Enterococcus faecalis Fly1
MASRTIELEVQQAIECIEQGKNFILTGGAGSGKTYSLISLIEEVGEKYPSKSIVCITYTNNAVAEIRNRITNDKLYVSTIHEFVWSIIAKYQKEIKNTLVELINDESQMKFKAPRDFEENQMITIDYFSENKIVYDEYYSLRSDADSKVSHDHILILAEKIFEKFPKICGILKDVANFIFVDEYQDTDPLIKNILLTHINQSTKKNIVGFFGDSMQAIYDNGLGEIIDDKLTYINKFQNRRNPESVICLANKIRNDDIEQTPSNDPKAPNIENNNVIKGSIKFLYTENINITDNYRDLEYFNDWDFTNSEKTKELWLVHKSNAKMAGFTKLFELYNSDLIIELINRIRKKISTGALEINNKTFENIAEEANIEVRGRGYLLENIKKDSDYLEAFSLIKNENWEEVNNFKINKDSLLSYKFNGLIGSHEAKSQRDRILRHLDSIYELIELYENGKYNDFLRRIKRSVLSFHDKVTIKEEMNELLDSTLTINQVVEKAKKTFNLKNESFDDFIENQGSYLWMRIKMLPFSEYVYSIKYQKEYLPFATQHSIKGSEFDNVLVILDNGKWNKYNFEKMFKNFNSDDSVVKRTKKLFYVCCTRPKKNLVVLMPSVDVNVVEKAKDLFGDSNVHHIL

SEQ ID NO: 62864 - protein, 674 aa, Enterococcus faecalis Fly1
MKLTRLEICNFRSFGSEAETIYFDEFTGIIGHNSAGKTTILNAINAMFGNLKLRKSDFYADNNESENEPLSLWIKAKFEFFNVDNDPQSYSVPSFFQSFTISETGEAPYTEILFEAEWQQGNTPNGVIETSLNYLLVGEEEKKFPMPLLDRSKIDVIYIPAIRNPYDQLSNASGTILWRLLKQLNWKEGDKEQISEKIAALDEAISAQEGISLLEKTISSQWKTYHTDSRFAEASLKFGSTDLEKILKKLEVEFSPSPFEQTYRVGDLGDGLQSLFYFSLIDAFLKLEEKGLKEVSTGVMEESRTLNVNPPAITLLLVEEPENHINPQLLGNALSNLKSISNNANSQVIFTSHSPSVIKRMDPENIRHIRMDKLKKSTVVNEITLPDDNGEAYKFVKGAIQVYPELYFSSLVIFGEGDSEELLIPYFLKKKFPNLDTEGISIVPLGGRHVNHFWRLLSMLKIPYITLLDFDQERYGGGWCRIQYALREMIKLEPGFGETTKSENGIKLNDFIDDISSWQLSSPYLQTWIDFLEKRNIYFSRPIDIDFLMLENFKPQYLSILDGNEGPNVKISEKNIKFSQVKKEQKQEKGYQEKLAIAMKHTLKENSGDGSSFTCEQKELMVWYDYFFLGRGKPVTHRLAIDKIENLATIPPVFERLGVKVEAIVKGEKHGSEN

SEQ ID NO: 62865 - protein, 610 aa, Enterococcus faecalis Fly1
MVQKTDWLPTDGLTFEEGALNAIKDTTNTLVKAGPGSGKTELLAQKANYLLQTNLCPAPQKILAISFKKDAAVNLAERVSKRIPENKVSQFYSVTFDSFAKGLLDRFLHGIPEEWRPSDDYEVDLSLNEFARACKENGVYLRYKLEKNIREAELVKYPLTELRDIDFDIWKTMLHGNSSGKSYLTFKMITRLVIFLLKNNPAIVESIRKTYKFVFLDEFQDTTVLQYELFSLCFKTSENFITAVGDDRQKIMRWAGALPDAFLSFKHDFLANQHALYINRRSDVKIQKLLQELNEYAKGDFLGKTELVTTGIDSEAIIQVKTFSSSEEETQDIVDMIEKLCAEGKNIEEFCILVKQFPDIYVAQLSPLFNEKGIDIRNEAEFQDLLKENITILILDSLRAALVPNDSDAWISVLNFLHDFSDSKNYFDLKREEDIVLKTKKLLKHIAKKLSNVVSFEELFDVFQYIINFYGIDNIRSQFPEYTNLGFLETKVRELCDSLYSYYEKTSDWVESILCFKGKNCIPVMTIHKSKGLEFDTVFLLGMDDQSFWSFRDNPEETTATLFVAISRAKKNFITTFTSKRSGRNCERILISDYYDVFRKSGVVEFFESR

SEQ ID NO: 62866 - protein, 729 aa, Enterococcus faecium 1,230,933; identical to SEQ ID NO: 62500

SEQ ID NO: 62867 - protein, 597 aa, Enterococcus faecium 1,230,933; identical to SEQ ID NO: 62501

SEQ ID NO: 62868 - protein, 585 aa, Prevotella copri DSM 18205
MYISELKLWNFRKYGADDFDLTNPHLTVPFKSGMNVLIGENDSGKTAIIDAIKYVLKTNAYESIRILQDDFYNDKDHLRIELLIDDVTDDEAKNFTEISAPKENGGMASIKLVLDVVRKDGHIQAYEVRGGFDADGHSLTPLMKDNLRITYLKPLRDAENELTAKKNSRLSQILQSHELLKQNSNGEKHDLIKIIEEANAKIENWFDDDTGGETSHKRQIKGVIDQFVKLFISDDAESQFLLADPTMKNILERLAISVVNSKNLGLGTLNRLFMATELLHLKKKGDNLKVCLIEELEAHIHPQAQMKVISALQQEESVQFILTTHSPNITSKVKLGKDTDVNSILMCNSDNVFPMGAGYTKLEKKDYKFLDTFLDVTKSNLFFAKGVILVEGWAEEILIPVIASKMGFDLTQHEISVVNVGSTAYLHFARVFMRRSEPEMKVKCAIVTDLDVRPDTEDKAQKEREKKESVEHNLGMPLPTNVKLNLAKEWTLEWCLFKSPILSDLFKDSVAEVHSRTEEFKKDAVTHQYTESFEAKLKAKLIDRSLEKTDIALVLSEKIITNDLNFAQQDEYIKYLLDAIRFVVL

SEQ ID NO: 62869 - protein, 670 aa, Prevotella copri DSM 18205
MNITDIDINEAEKTLLPKDMHFDDERRDFIKGLESCDLLAVPGSGKTTALQAKLFCMARHLPLEKDQGILILSHTNNAVNEVKKKLHAECNQLFEAPHFIGTVQDFVDKFLAIPYYEQFYKQKVHVIDGMAYEQEVERYLKTSIWKLKKATLHLYKKGFNFTDIRIQRTKDGSLKYTRGMNDELSFKPVKKWIQEGTEQQKHEEIKGDLKIMKQAIMKKGILHYDDCYILADAYIRKYPFVKKTLRKRFKYVFIDETQDLKKYQLDLIDSIFDSDECCIQRIGDKNQTIFNKPDRDIPDQWNIRKVKYLQNSLRLTESIAKVVNPFAVDNVAGNKSESMFTVKGKRQLENGDIPPYLILFDEYGKNKLLTTFNDLIEKYALRSTVDGKKYGFHIVGWSIRRKGETANGKLRLEDIFPNCEKASVRGLNSYDTLSKFLVFGCRDYSMYECKTVIQKALVCLLRKLNVYDSDRRLFSKTRLENKIMLMGEDDFNDYKLLIYQTSVLLFLKRFSECYTLLVSYLTGSFSRIFEISTNNQVLADFCEKDFDTELINAETPSEFPDIEIESVHSTKGQTHCATMYVETSFKDYESSHLFKIKKKATRKRPEVLYPNPLFQEKAEYAQVTCKAVMHMMYVGFSRPTHLLCYASYKHNWNNKRIEKMEQLGWKIINL

SEQ ID NO: 62870 - protein, 691 aa, Fusobacterium nucleatum subsp. animalis 7_1
MVLKEIVVENFRLLKNFKLELKEDLSLIIGKNNCGKTSVLVILDKMLNSSEIAWEDVNLVKQKELYNEIKGFNGSVQDGNKFLEAIKLQLYIEYSDIDSYENIQNFIMDLDPENNIILLEFISLINIKNILELKDIIKGRKIKDFSTFSRYMSKNFTKYFKIKKYSRCYDKKTKKIISDMIEEIDNKNIQKVLKIVGIRADRAVSNNEKNHALSSLTSRYYETYRKNIEDESNSIFQELEVELEKADRRLYKIYNGERADDGKDSEGIFRGIIDVVKNYGGYDNGINISIESSISEKNLLTDNTSLYYKHGDGDSSSLPETYNGLGYLNLIGILFEIETKLQELYEQPADINILYIEEPEAHTHPQLQYIFIRNIKNHINSHRNKLNKEKNKYLQIIITSHSSHIVSECNFDDIIYLKRINNNILAKNFNSLKDEYEGDKKREFKFVKQYLTLNRSELFFADKVICIEGDTERILMPAMMYKVDKMQSSKNESTIPLLSQNISIIEVGAYSHVFIPLFKFLGIKVLIITDIDSAIKNNNGKYEKSHPDNATHTSNASIREFFKEDGLDDGNNQFKELIEKKGKDKIKARIRIAYQIPEIDKGYQASSFEDAFISLNKDFILKNKDNLYDYGALKNFSKKEINKDFYEFSLKNIEKKSAFASALLYFDEEEDDKEWKVPRYIKEGLLWIQEF

SEQ ID NO: 62871 - protein, 633 aa, Fusobacterium nucleatum subsp. animalis 7_1
MDTRILEDEVNTALQCIEKGENFILEGGAGSGKTYSLISLIETLIIKLPEIKIVCITYTNNAVAEIKSRIDNENLWVSTIHEFIWYIIKKYQKEIKNELVLLINDETIKNFKKPKDLENTLITIDYFNNIDVEYDEYYSMNPNENKVKISHDHILILAEKMFDRYKKLSDILKDVANCIFVDEYQDTSPYIVKILLEHLKKSKKKNVIGFFGDSMQSIYDEGVGDLNKYGLKKIVKKQNRRNPRIVIEIANKFRDDKITQVPSKDKNAPNMDENGVIIEGNIKFIYGKEQEDINFLKNKALFKSWNFLNGEQTRELRLTHKYNAEMAGFKKLYDLYNDDLIIKLIDNIQKNIDNNENKESILDELVLKLRPTYNRKDLFEEIIGNEIYKSIYQNIKNLLWKDALEKCKISKESLMSYKFNGINGRYETNSHRDKILKKLDVLNELIELYESKKFNEFLKKTNFSIQNKNDKSKLKELMNFLIFEDEKTIEEVLDFSKKQGLIKEDMDFDNYISVKGFYLWERIKKISFKEYRNSILYLKEFSPISTQHSIKGSEFDNVLVILESNWNKYDFKTLFGKGSENENVIKRTKKLFYVCMTRTKKNIVIYMPTEDLEIINSAKEYFGEENVLSIDSI

SEQ ID NO: 62872 - protein, 592 aa, Fusobacterium nucleatum subsp. animalis D11
MSDFYIKKIEIKNFRNFENISFQTREKNVIIGMNDVGKTNLLYAIKLVFSYKFRNIDLLDSDFHKQNISKPFEIFISMQIFDKEKEEKSDFTEIILSEIGNLRNKENGEQNLLNIKLVGEYQNGISMFWNVSEKMTKDDMDEIPAVGASKNRIDSIFEIFDIPPYNDIEKKFLEISRKIVNNMEISETEKEKYTEIENLQNTLKENIEELDSVKKIDEEITNSLKKFNVSYEIKVATTLGLKRIYDDLKIFTKQDNEDRIYPTAGDGRKKTIQYAMYLYEIEQQHKKIPIILLEEPENHLFLRNQISLSNTFFNSDFFCNIFLSTHSPQLLYKISNGVNIIRIDKKNNQATSNSSVYTLPEEYNSLKNILQKDLSEALFCKKVLLVEGYSEKILFEYILDKKIKDIERRAEIYILNIIGVGFKSYYDFLKKLNIDVRLKTDNDLKNTKINIEISGIKRIAEILGVKVENKFIEFLKDKKINNKKDKSISEKKNRIDITREVYNFAKKIGIISEFEEQKCYLSEVDFENDLAKVVLTNTEEQNKMITFLQRSKWAHLFKEKYYKQIFSEESIEKIVESEYFKCIKDLINDERE

SEQ ID NO: 62873 - protein, 349 aa, Fusobacterium nucleatum subsp. animalis D11
MFKNFDLKYRYERKIENFEEWKATFEENKIVTSSKDPKKDFLLEYILKILKNNKSCQEYIKSKFECMYIDEAQDNNEIQYKFIEIFLTLGINIFMVGDPSQSLYSFRGANSKVFLDYENREDFISKKLNQNFRSHPFINEFANNYSFNFLREQDTINFIEDVSEAEKEVTELTVLRSKGEDCKKYEQKGYSYIKTPSMPSEIDNVQLVTLLLEEYFTTKNAIKFLKKITNMEDSFFKYKNKLTNFFKNPTNENLKILNTNVFSKINWLLSETEIDYIVEEIKNENFKDYYNLYEKEKIVMTIHISKGLQFDNILIHKKDFYNRRGELEKEKFYVACTRAKKKLFIIGDD

SEQ ID NO: 62874 - protein, 284 aa, Enterococcus faecalis TX1322
MQVALSKQLFDYSVYGYFILSTHSSELLYEMDEASLVRIYSQNKTDCKSYMYNVPEQFKSIKKELNESLTTALFSDRVLLIEGPSEKALFEKILSIVSPIYELEGGYLLLVDGIKFKPYFDILKELEILPIIKTDNDLKAKRGDIKSFDTIGFNRCLNIIGKKNLEAITIDYSSKDENGKLIWLISDKKRMVFDKKRELYEFNGACIREFEKNNIFISKVDLENDLFEVIPEKLTNVFGDNPVDTLQDKKLLNMLKLIDNLNDEECYKIFNHDRFKALKRLVES

SEQ ID NO: 62875 - protein, 515 aa, Enterococcus faecalis TX1322
MEIVDEQVRKDILAASGNIIVSASAGSGKTTIMVNKILKKMSEISDHKTVAAITFTVKATEEIKRKSKQIGGNNKFVVMTNDSFVEYEIIRPFLIDAFGEMYNNDFVISYEDSVKSGSFDEGLNILEKSNKLGTYHNIKRNFKFELAKKVLEQSTAAQEYFKSKYTMIFLDEYQDSDTDMHNLFMYIKNVLLIDLFIVGDGKQAIYLWRGAQRNIFNQLENEGMQRFELVTNFRSHFEIVNYANLMHNASQFRDDYSKEVTHVVHCRTNDYVSSINELCESNIVDKNKNITIIANINNDAKDISDNLNAQGFNFVFIPKTPLDDGSENANVLKVIACYLLDDNYSVFDIAEVLRVEQNRTLLNKIDSLLKPLKKLVPLSSNQTKDDISISFFESITKFNNYLGMNITNDEKVLLLDSVTNKYFYPAFIKSNDLHKVMTVFGSKGLEFNQVISFANYYSFNDESKKNNHYVCVTRAEEKFVMMEGEFGKYSEQIGRKLIERGIDSESTTFKLIDHI

SEQ ID NO: 62876 - protein, 656 aa, Sphingobacterium spiritivorum ATCC 33300
MNTKLKLILNQNIEMYLAYIKVENYKGIEAIETEFDPKLNIIIGENGCGKSAIIDAIRLLYNIGEPIREISVSSDDFHQKTVENDGIKTIQKSSLITITYIFKGLSTAQKGAFYEYMVIDPNKIEEDYAKVSISYEEKDGKYPNFSYNTGNIDGQKADYKTFELFQHYYLGALRDSTKDLLSTRNNILGKVIRRFVKREKSESEIEQIIKDANSQLLSRDEVKNTRDGVNTNLESIFKKVIDNKIGVRIEEAKTEYIVNAIKPYLPHDRSTLKDEGFHLWQNSLGLNNLIYIAVVLGDIKEQIEDNGLPHFALLIEEPESHLHPQLQLSLYNFLNNANATENSQLFITTHSPTLTSKVPLKNLILLDCGKATKLDKQFQNRESEKLIEDTTKNKELLDPDLENRMKKLQRYIDVTKSQLLFAKSILFIEGISEELLISAFTLLEDYKLEDYRTEIVNVKGTSFYPFLYLFNNSNLLERINKPISIITDDDRFTDSKKSEYSFDSLINDYTVLDLLDDSIQKGNAVSRIKNLNSVKNNADNIKIFESFKTLEYEIALHNINDDRRNFKNNFLVQYLDVVEGAKISEIVTYMATFATDLMTDEQRRKVAILLWKTFPTKAEFAQDFSIHLLDNLENAKASFMVPKYILNALTHLKNGL

SEQ ID NO: 62877 - protein, 395 aa, Sphingobacterium spiritivorum ATCC 33300
MYFENEERLAYLQARGKVILNACPGSGKTTTIAKKILNLETSKEIGGHSGVACLSFTNSAKDEINEAYRKLSGKSLQFPNHVSTIDSFINKFITLPFYNLLNRDFNRPKILDHTNILDDMWKTTYVKNGKTLDGLLRPLNNAEYKAKNNRSIFHLYPPSEIRIEPDGTFSINGNQPSTDKVDRENFNKYCQLIKNRQFTKGLISTGDSAYIALHLLRNNPKICQWLSLRFPFIIIDEAQDNSLIQHAIFEELVKQGLKNIELIGDPYQSLYEWRDAKPDEFLRKYESDQTWQSYDLTDNRRSPQSIIDVFSKVRRSEDSAINSVDCEEQNNSVLVYKYSSTNHQLIIKHYDDYCATKKHLNSCIVVRGNSLKDSLLEKTRAETVGNRATQRYYLC

SEQ ID NO: 62878 - protein, 650 aa, Pseudomonas amygdali pv. tabaci str. ATCC 11528; identical to SEQ ID NO: 62770

SEQ ID NO: 62879 - protein, 555 aa, Pseudomonas amygdali pv. tabaci str. ATCC 11528; identical to SEQ ID NO: 62771

SEQ ID NO: 62880 - protein, 593 aa, Bacteroides sp. 1_1_6
MYLSRLHISKFRVFDDITLYFKNGINILIGENNSGKTAIIDALRICLGCGKPDNFIYVQDGDLHVNPENPSEINTVIQFDLIFEFGDASIERECFYDFISQDKDNPDKQTIQLHLKFIQENNGKKKYFKRIIWGGDNEGQQVPYESLQEIFYTYLSPLRDAVSCLRPYSYDNKTSQLFNQLTKYDKGNESIPLNEEKKKSLAKNLYQIFENDAYDWKHILTTGKSKVNEHLEGTGITLKHPDIEMRYVGREFSDVVRGIELKCPVYKTVEAGQEQKYFTLSQNGLGENNLIFTSVVLGDLINRCEDHALEIYNALLVEEPEAHLHPQYQNTFFEYLNELQSKGLQVFVTSHSPTITAKSDVNNISILQRKQSIIQSFSFDELSEDDYPKESKRHLRKFLDTTKAQLFFANGVLLVEGVAEAIIIPILAKKFLTEKIDLCKSGIELVNIGGVAFNHFGLLFNNDDERKRLLSKCAIITDSDPKDNGDISDRAQKAKDLEKHNLKVCLATHTLEHDLFEQSERNKAIMRDVYRKIHAQTDDLSGDFNVSTLMKKLKSNKDKAEFALQLCDRLETEVAFDVPDYIKDAILFIAPSE

SEQ ID NO: 62881 - protein, 593 aa, Bacteroides sp. 1_1_6
MDIQLSAQQQAVVGCNEPRIVVKACPGSGKTFSVAARMAKLLRENNLSRHRGIAAISFTNTACEVIQKELKETFGCRNIGYPSFIGTIDSFINTYIFLPYAHLVMGCDCRPEIVGTAFNKWFDYDPTQTRYIRGKHGERIITSRDTNYYFDLISFGLNDQLLRLAPYQSYHFGKADWDNPNKKDGSPKKIISELKEMKWKHFNAGKFNQADAIYFTFRILDKYPSITQNLVRRFPILIIDEAQDTTELQMAIIDKLSQYGAESIMLIGDPDQAIFEWNTASPHLFMEKYNNPDWHSLDLSENRRSSEKICQLANRFSGNEMCSIASDKDYTDEPCIKGHLDTPESVNQITNHFIEKCNEMGLDESEYAVVFRGQKFGETNFGLVNNDSSSRQNSPWINGHYGVRDIVYGKYLIDHGKYTDGLSLIEKGCYKITKRVRYVPASTIRKEIGEVGFRRHRAEMVEFIQKLPSTNNTLSNWITELQQTGINLTVDLGKANVRIESLFRTVNHLFRQERPYLKTIHSVKGMTLEAILVFLSKKAVSTNYATILNNPAKYSVDNNEELRIVYVACTRPKKMLWIAVPSDDIDCWRNKLF

SEQ ID NO: 62882 - protein, 699 aa, Paenibacillus sp. oral taxon 786 str. D14
MHISSLKIRNFRNFQKANFVFKEGVNTIIGANGSGKTNALFAIRLIIDDSLPRSSTNLLDTDFNRSLTNWRGHWIVISLHFDNLSNDDSSQALVFQGTHTTDNRGSLNLYFRPKYEVRKRLFELSQELAEEEQFVDYLSSLKINQYESVLYGRGLADFSKDEVYKTLVGDFNNYTFPNPDEEDSSLLGTPANQYVFKNDFACTYAKALRDVIGDLKNPRTSPLLRLLSNLNINESSTETISSTIKDLNWHITNLPEIRELAAGVSQSLHNTVGHTYAPRIEINSNLSDDFRHTLKALNIKAGELSGEDYIGDLYEMSLGGANLLYLALKLEEYNRLDHEQNKAAHFLLIEEPEAHLHNHIQKTLFQKYHNHENTQILLTTHSSHISSSCSLDSVNIVYLENNCCEVSQPNSGLDENDVRRIERYLDATRSTLLFAKSVILVEGDAELILIPEMVKMAFGITLDEIGVSLINVGSTQFENIAVLFSEERIRRRCAIVTDNDISIIPLGDEMYPDKEFQKKCKQSEESGKSRRQKLDDFSRDNSYISVYYGTNTFEVELIKQGNKNILENVIRKDIYKRQSDQNSSVEKINNSDISIYGKEILRLADKEGKGWLALSIAARLDKDVVIPDYILEALAFVASLHTEHIISIIKYRLGQEYKNFFETVKLLYGEKPNDIETIDTFCSIYKDSIITKFIAMRRE

SEQ ID NO: 62883 - protein, 584 aa, Paenibacillus sp. oral taxon 786 str. D14
MLLLNTLSLEQMDIVEYNDNLLVIACPGSGKTRTLVAKLIYEGTKLKKNEKIAAITYTNLAAEEIALRLDTNCIDDQFYWGGTIHSFCTNWIIKPYSHILKELKYGYTFLDEDDVEEILNSIMDTLDLRNVEFNTRRNQNGDFISINDENSLLLKEYDHRLKNERLVDYDLILYYSYKILKNNPSIAKNLSTIFRWILIDEYQDTQELQYLIIGEIIKVGRNETKLLIVGDPNQGIYQTLGGVAKTKTEIEDCIGGYRISEKNLTGNYRSTQQIIDVYKNFQIFGDPIEAKGDNKDNTSLISFESEILVGNLAHFIKDTIVDLHNKRGIPYKEIAVIAPQWMPLIHMARTIKQLEPNIPLDAAGLSPLCKDDNNLFYHLAKLFLSSPAPDKVLLRMRWANNLLESLLEKIPQISESNLSLQKILKITNSFSSSSVLGIEYLKESFAFFFNVLNIDINLYSNVKLELQEFEEKCIRRQNRNGIGDSISVYKNGFAKSGGVNFITAHKCKGLEYDTVIGFCLLWGYLPHWNNIYSREIDENEISKKLLYVLSSRARNNLILIAETGRRTNRGTPYNANRHLFEVFR

SEQ ID NO: 62884 - protein, 576 aa, Veillonella dispar ATCC 17748
MKGKMYIKEIKTISNYRNLSGQSMVFDKDLNYIIGENNIGKTNILELLNIILSEGKFKEADFADLSSPIEVKYTISYDDSSIGFFEDNFDINEDNCITIIAEQDLIDGRISYYHDTPNKTSISFSIIKKINSLYYFAQRLPSKELDFKGSNGSSKTLNYLIKKSLEIVKLEESDLINSPKINDVIGEVNKSINYINDITGDSVNASLDSSHEKLLARLLILGDQNGRELTSLGEGIQYAFNIILQIIDAIYRSMLGKTPEEFRERLICSSEKYYFPLILLLDEPEIHQHPYRQRSLMKKINDLLNNKNESFIKLIKGLFNIDGLKGQIFIATHSPNILLNDYKQFLRIYKDNATQTIKVASGNSFDLDVKLYKHLLHNFLYLKEATFSKKIIFVEGDTENGAIPIFAEKKKFDLDENGVGVIKLDGADSVKYCMELYKLFGIETYAIIDADKKERYHNNANIFFTTEKDYEEDVFASFELKDYLTCCKELDILQSMIGIIKKYKRDLDVSKFKEDPSIIELDETTAKSIVGECKEAQLKKLKDSKNACKGAILAKYVTKIPSAFDELIEKVKGEVV

SEQ ID NO: 62885 - protein, 585 aa, Veillonella dispar ATCC 17748
MTLEDRLKEFHSGDEEQLSFIFSDKPRLIVNAPAGCGKTTAMVSKIARELSLGNIESNKKVLAMSFSVNASIRIKSDVKELLPSLVDNSKLLLKKLDIANYHNFAMRLLYKYGFLLNEEFINLSEFRIISDSIVIKENLISSSDNYIIEELIKIVTSFDFSQIESVMDQYWETINNTLINKKIITYNGILIAAKKLLSNDNIKKFYTNYYSMIIIDEFQDTNILSYYFIKSLIDNNKVVFLGDGIQRIYGFLGALDDVFQRVETDYSPQIISFKNNYRYNNTSIKELDHLIRAYVDQYIDPKLESSILIKKLQSDTEEVNFISEGIKNIIESNCNVAILLRAGWQGGIIAEKLKDESIHFFNGLYSEDDCEFIDFYNVAIEEFYNNVSGNAVQSSLKKCLQAIKNREHEIYTNDQKKYIFDSLYKLLEKLFEVSKNWEGTTKERYKNIEFSLNNNGLKHMIEYLDEKVVLTTIHSAKGLEWDYVILPQMNKSVFPSWKHMCKKCHNLNSFKLDNDSCTSLLLPEMKTLFREELSVLYVALTRAKKNVFFTVNTGINTHGYPKKENCFINLPGINQLDFAWNDYVS

SEQ ID NO: 62886 - protein, 526 aa, Oribacterium sinus F0268
KRYSMGFDVALNQITQDRSEEIDNKDIQKVIKVAGIRADRAVSNDDRNHVLSGLTGKYYSSYKAAKNESESVFTRLEEKLEEADKELYRIYNGEKSESGETIDGIFSNVIDVIKTYGGAENGIDIAIESSISEKNLLSDNTNLSYRQGEDCSLPETYNGLGYLNLIGILFEIETKIQEFFEQPADINLLYIEEPEAHTHPQLQYIFIRNIKQHITTHRNKLLKDRNKQLQIIITSHSSHIVSECNFDDIIYLKKNGNKVSAKSFNSLKEEYGGDKQKGFKFVKQYLTINRSELFFADKAICIEGDTERILMPMMMHKVDNKENPEGDIIPLLSQNISVIEVGAHSHIFIPLFEFLGIKVLLITDIDAANKNDNGRYAKSHPKTAKYTSNASIKDFFKDTCLDEANNEFEELVEKRSEDKIKNNIRIAYQIPETEGGYQASSFEDAFIALNKDFILKNKEGLCEYGALKDFSNDEIENGDYYIFALNNVKKKSAFASSLLYFDDENGEEDEKWAVPHYIEEGLLWIR

SEQ ID NO: 62887 - protein, 635 aa, Oribacterium sinus F0268
MDTLTLEKEVLEALQCIKNGENFILEGGAGSGKTYSLISLINALTEELPDIKIVCITYTNNAVAEILSRIENENLWVSTIHEFIWALIRKYQYEIKDILVELINDDNEKNFKKPKDFSEDLISKEYFENLYVDYDEYYSVTPNDEKRVKISHDHILIVAEKMFEKYKKIADILKDIADCIFVDEYQDTSPLVADILLKHLEQSDKKNVIGFFGDSMQSIYDDGVGNLDHYSLIKIVKTQNRRNPRVVIEVANKFRDDDIEQVPSEDVNAPNMENGTIREGSIKFLYGSVTNDFISIKGKNIFESWNFSDGTQTKELRLTHKYNAEMAGFKDLYELYNSDLIITLIGKIKDKIDNDNLECNKTLGELALEVKPTFKKLDLLEQINGNKIYQSIYSVLEDMLWADAYKKCRVDKESLMSYKFNGMSGRYEANSYRDRILRRLDILEEIIELYEANKFNDFLHMTKFSIHNRNDKLILKQVIDDFVNEDNKTIEDVLEFAEVKGLLKEDELFSDYILNKGLYLWERIKNITFKQYRKSILYLKEFSPICTQHSVKGSEYDNVLLVLESDWNKYDFNTLFGKGSTSSNVQARTKKLFYVCITRAKKNLIIYMPTNDADILCKAKLFFGEKNVIDISSIK

SEQ ID NO: 62888 - protein, 689 aa, Lactobacillus helveticus DSM 20075 = CGMCC 1.1877
MENIKLFISSVEITNFRTFKEKQIIRFTEGINILVGPNNIGKTTIISAIRLIFDKNKFGLDINDFSKTETKEELKNCSPKITVSVNLQKSNKEGSDSDDLLAIRNWLTDIDNPYKAKITMQFQLPTKYEKAYLDAVKDLDDIGSVWLELEDEFLPKYQRKYFVGESAQPLMDNSLSRFNCQYLPAIRDAEKRMNSGNKYLLNKLLNFFIDYDLKSNEELKKSDIEKKMQKRHKDFHDLAVKLLNNLSPRFKEGKKEMLKYSSQTGATFDGEEPEFNSALNDHDILKEFSLVVKNGESNVPINLNGLGYNNLIYISLVLAELQQSRDNSYFGDNSSVFPFLLIEEPEAHLHPDMQYDFLKFLQNNIKDGTTSETAKQVIITTHSPNITAAASLDDLIVLSKYKSGVKIGYPGETFIDNPKDKKFVERFLDVTRSNLFFTNQLIFIEGLAEQMLIPQFMKADTSNIQNRHISIINLSGRYFIPFLRMFDTNKNPNTAIYKQIACLTDLDPVQGKQNKSCPPIFQAEPDNKNPNIESIKALKSANIKVFSQDEDSDYKSNEGWTFEYQLYMDNPDLMPLIFHDSMRYCDAWENLKQMSIENLSIEKISNTFQNERSKQIDGILKENHNTNDLSEITDSKLIKLYLGTMFLYSIKDKGLYAQELSEEISSGKSITVPKYIKKCFKWIADKNGL

SEQ ID NO: 62889 - protein, 408 aa, Lactobacillus helveticus DSM 20075 = CGMCC 1.1877
MEYKQSCWKNGIINYDDVLLLSLIILENNPFVAKLISNSFPFIFIDEFQDTSIIQAEIISILADNGSKVGVIGDENQSIYGFAHSSLETFRKFSLPKLNKYCININHRSSDPIIKLLNGITENSGKDPQILQNIPGPKPTIVVGDPRLVVNWFLKNHPQNSACSKMIISYSNDYIEQIKPNYSAPSKKIKDNINKMRTDDRGRFIYSIIKSLKLASEGQINASISSFFRSYEKTNADEKYVISKFYYAYNKINNYLNRDISTWFNEILLDKNIHEANSDNISKIMKKITGRNKCFLGLKVKYLLSDVPLEGTNSEFRTIHQSKGDEADAVLIMIDDSGKKRESNFSFLLKPSLSGSNEDDRVYYVAMSRARHELFFSIPSLNKNIRKQIEATGLVKIQDILDILNSEV

SEQ ID NO: 62890 - protein, 689 aa, Lactobacillus helveticus DSM 20075 = CGMCC 1.1877; identical to SEQ ID NO: 62888

SEQ ID NO: 62891 - protein, 143 aa, Lactobacillus helveticus DSM 20075 = CGMCC 1.1877
MDYKRVSSHENININQNFLVSAGPGSGKTEFLVNHIHHIIKESGKINTLRKVLAITYTNVAADNLSRRIGYTSGLTQVSTIHSFLSEFILLPYSWLLEGKYSLPKKLTITPHQLASFSDFKELCQKYKCQYMTYYDNIRDRIS

SEQ ID NO: 62892 - protein, 664 aa, Bacillus cereus BGSC 6E1
MLISELHVSNFRSFGYESQMIETENLTALIGANSSGKTSLIMALLRLFGQKNTDRTLIKTDFHIPEGADVSKIKEIDLMIEAKIIFPELKLQSPVDVKTIPEYIKHLIIEKAGEEPYLRIRLKGKWIQGSTPEGNIEQELVYVKIPYGHEEKEEDLTKVPIHHQKLIQMMYIPAMRDPAKQLKNASGTLLWRIFDGIDWPENLNEDIKSLTSPIETLFKEIPSIKGIQGILNTQWSKYHNDGRYSNSQFKFNGNSLDEFLKNVEILFNPTIDGNSVKVDSLGDGLKSLFYITLVSTLLEIENKQEKDDKPLLNIFAIEEPENHISQHLLGRIVRNLKEIAAKDNAQVVLSSHNSSIVGKIEPEYIRHLQIQDIGSIVNNISLPEKIDDAHTYIKEAVKAYPDLYFSKLVILGEGDSEEIVLPKLLLADDIYLDDFNISIVPLGGRHVNHMWKLLNDLSIPHITLLDLDRERGGGDWTRIKYVLKQLNKNNRCSEQLRTVKRGPKRITYTYSMKEIEDFHTRKSEMSIEPWKTKLEKEDVFFSYPLDLDFSMLISFETEYKNTMVNGPQIPKKIDSPEYEKKLKKSIQATLKNEKATAATYSDEQKKLMIWYNSLFLGRGKPSTHIAALKDIGDTEIIKNAPPELLRLVQRVKEKVGLVGDGINE

SEQ ID NO: 62893 - protein, 637 aa, Bacillus cereus BGSC 6E1
MLEQDWKTSNNVKLEDSALLAIRASNHVAIAAGPGAGKTELLAHKTGYLIQTGICPNPKKILAISFKTDAARNLQERVKLRYGKNVENRFESKTFDAFAKGILDQFIYALPKDYQPKRDYEIILNEKSLNDIIKGYITKFNPYHPNWQHEYHLNKVLGTMKETELPIVVFESDLYSWINERLWVVLLNGKGDLTSSLTFSMISILVEYLLKENPLIVKALQATYSHVFLDEFQDTTYNQYSLLKTIFLNSDTVITAVGDNKQRIMGWAGALHNAFGIFESDFNATQHTLFNNFRSAPNLVSIQNIFAKSLNDTPIEVLPVGEWNENDGVCEVWNFKNHNTEAILLASYISEWMKTENLKPRDFCILVKQQEHIYAAEIMKELSKINIKSRIEKDYQDLLSEEIVLLIIRILQLSYEEKSPELWMSVIDEIIDIKYRDVDPEKIKYLSIENELVKMLDEVRNRYSDIDVTNFNSQFTEILQEIVVFLGEDRIKATYPKYNQASYFNEVIQKMLDKLKYQNRISMKELLQEFCGEFSIPIMTIHKSKGLEYHTVIFIGVEDAAFWSFSTQKEADKNAFFVALSRAKQKMIFTVSKKRNILKFGKEKNVTQETENVSELIQTLMDAGVPLIEESDLEKVL

SEQ ID NO: 62894 - protein, 592 aa, Bacillus cereus MM3
MKIEWIKIKGFRNFDNETINFAEQTLIIGANDIGKTNLIYALRLLFDRSLSDRDLDLLSSDYNVYTKADSIEITVKLVDVKEDCLITVFKGDLNEGTVYIQYKNSKNGEYSILSGPSEEAVEIKNSRFYIKRLNMEYVNTNRNLESFMKREKNQILEDAKLKLTEQQTQMDEQSIFKIKRGLEVVNKRVDRLNYIQQSLSKVNEELGSLAIHNESQELSFKNANSDAARMLDNLELTYSTQEGALTLGGDGRNNQIFLATWISKQKNIKSLEKVTFYAIEEPEAHLHPQQQRKLSSYLLEKFDEQVFITTHSPHIASEFKPDRIVKLYSKKKCTKVAKGGCSEEIKLDFDDFGYRLDAITSDVFFVNAVFLIEGPSEKLFYTALAKQLDIDLDRLNVSIISVNGIGFKPYIKICLALDIPFVLRTDNDIFSKTKKIEEKDVEFSFQGGISRVMGIYTELLQTEANQSLITYWGEHEVENEWLKNETRPQAASNLAEYIIRETEKNNIFLSKVDLENDLVNSQLFSSLKKFYNTRATASTVKKMQKAKAENMLNFLKAHFDDLKCLADDKISEPLKRIKTLAEKVVSDNEESN

SEQ ID NO: 62895 - protein, 519 aa, Bacillus cereus MM3
MVITAKPGSGKTYTIVEKIVDISKNLLNYQGVIAISFTRKASQELELRYKRKNIENTNHFFGTIDKFYISEIIIPFSKLLFNKGKPLEVKDSIDEYPKYEDLKKLKENRIDKELFRLLKESLQEGLIFLEISGETALFILNEVPQCLIYLTARYTHIFIDEYQDCGEIQHEIFLRLVNKEIIGIAVGDLDQAIYAFSDRYSKYLLSLIGDDGFTHLEITRNHRCHKSISDYSLELMGITRDHIEEDKRVFKVNVRGTDEQIIYAIENNLNEIKKKFNLSKNSDFAILCRGNGTARRASEFLTIDNKLFVDTPLDKINGNWASLFNDILNSYYLYKTNEITVLDFVSKYINEELYYKNFRKGLELVNKIFNLEDNQLEINLKEFISVAQLIYPEQEDVRITRMLKKILKNEEELYSFKPATENEINIMTLHKSKGLEFKCVFLMDLYKWILPPEGNWVSEEDYIQALNLHYVGVTRAIEACYIMIGNKRYRERYQDSIIAHESDFLYLNNTANLRSDIKL

SEQ ID NO: 62896 - protein, 697 aa, Bacillus cereus Rock1-3
MFLKEIKIWNFRKFGEGEANSPGLQLEFHKNFNLLIGENDSGKSAIIDAIHFTLGTVSSENLKITEGDFYVDEQGNSSSEMKIECIFTDLTETEAGIFLEWLSFNEVNEYELIIRLTAKKIKNEIVGEKIEKFVKAGPANADVRLEGSAKELIKATYLKPLRDAKNELRPGFKSRLAQILKSYSAFKTPSEGSHELENIVGETNQQIEGYFTKPIEDKTIIGEISNYLDEFFNLPTTGKETYKPKFEVAPAKLSDILKKLSLDLDDQVSGLGSLNLLFIAAELLLLNDGIEMGSNLTLIEEIEAHLHPQAQLRLIKYLQKSLEGSSEYKGQFILSTHSTTLTASTSLEHIILIHDNKAYPMGPSNTSLEEEDYEFLQRFLDATKANLFFAKGVIFVEGDAENLLLPALAELIDRPLHRYGVSIVNIGNTAFKRYAKIFSRSKKWINDGYSTLKMPVSIITDVDVRPVEFYKDKEKSKNVKSDKKVLIIVDEFDLRKIVGEKIESNDFNELIGQTFTSMTKLKGEMERYSITLGKEQESMLKESLSKDINQDIVMKLRENKKSHIESDFEELEANVSVFVAPHWTLEYELALSSLGVTLAEVIHSIRYKQPNSEANQQKLNEIITELKNEDTRIEAAYKVYKPLNDKYISKAIVAQQLAKRIEENKKVLKGKVLEDPYLNYLIKAIYHVTEPPKGGEV

SEQ ID NO: 62897 - protein, 646 aa, Bacillus cereus Rock1-3
MTLLDVEHLETELIEDDLIKELRNIEKIILPVNCEFSSEQKSVILAEKNANIIAGPGSGKTTVLIAKIALVIKRIKDSKKEKGICIITHTNVAVDEIKNQLRKIGISDLEYPNFIGTIHDFFNHFFAHKAYQELYPNKKGIVYDEDMYKKLFIEIFEEYKPFTYTYAPPTSRIKETYLEFYDKGKVNILGYCGDGYKDALIDTFKNMLEKGIFRHNDILSFSRWYIKKYEKQVKNAFANRFSWAFIDEAQDTSNIQYELLKRIFNNESTILQKFGDPYQSLYTMFSNKKDAWIPSQEKEVDPIELSYSTRFGDSISNVLKTACIEEYTALKGNPNIKSFKPHLLLYKSKENVIEEFLNIVNSLSEKQVEFRDSNKKIGVVGLYHDEVKSYHKKYKKNSDVKPKTETIIKSFYELMIKGMLMYIKEQAPKEKAAYSSKYFYDVLRKPEYLNIKAHMAVYIKEVYLNNGIVSECIKEKIIEMYKEIIQLEGIIFKRDDLLNRAINYVCDHTERIYISYQRNKEQSISEQIEQIEQEIYFGTVHAVKGETHKATLLLESEVPKGDYYNPELFYDCTEIFEFLIGEYWDYTKSDRKLYEVIRDGLKTAYVALSRPTHLAAVAINKQNFGKNLDEKKQLAMQAGWEVIELN

SEQ ID NO: 62898 - protein, 681 aa, Bacillus cereus AH676
MILIEFIGGNIMQTSRSPYISKIKIKNFRNYKDVDVTLSHKQIIIGENNVGKTNFLRAIQLILDPKLSDEDRYLQESDFFDGLEDPMNQKEKIEISIEIKGYEHNKTILSTLQEATVSTEPPTLRLTYEYYPAEDGTGGYQYRIYQGTDANNLFTHYHRRFLNIKVIPAIRDVESEMKNLRKSPINQLINQYDIRKEELEKIATALKEKSDEVLSIDELVDLTQNINSRFSDIIGTQVDSTVSLETIDIDPNRVLNTLKLMIGQEKKRSTSNTSLGLNNILYISLILLSLEDKTIPSILKEDTYDTLTLEKESSILADCYEKKDSNNYILKKDIQKKDYDELYSFMDSNFSSNNGFTLLAIEEPESHLHPALQRIIYKDVMKENTSILMTTHSPYITSVAPINSIVHLHSTKNGTVVNTTASLTLDDRDKKDLERYIDVKRGEIYFGRGVILIEGIAEEYLIPSFAEKLGMSLDKKGIICCNINSTNFKPYVQFLDTLGIPYVVITDGDYYIWEEKKNKKGTLEPKKTFGILAQDSHEDFGYDGNDRIKKLLIDLKKIKSNEIPEGYTKQDTLFKVHNFFIGIHTMEIDIMSRISNMQTEKELLCKIFNELTLGGAIQKSNFKTSLEKGEYVSCLNKIESSNSGIGKGRFAQHLSVECTKNFIPSYIQAAIKTIFKRVDEV

SEQ ID NO: 62899 - protein, 608 aa, Bacillus cereus AH676
MELYNKKLKQIQQDPEQFTAFQSNTSIVVKAGPGSGKTTILTLKIMQLLNEKIAFPRGLACITYSKEAAKEFTERLQKMGCPKRKNVSLGTVHSFCISQIIIPFAKLFNDDFPLPLDIITDAEKQKIFNSTLTNLGIDKYTLSVEEMDKERSFTLTGLSTVPVTLNPTAAKVAYEYEQQLKKLKKTDFIEIVKYSRELINREEYIRRCLESRFPWILVDEYQDFGKPLHEMILSLLSLTNIKVFAVGDPDQSIYGFNGAIPEYLLELYDKPDISSVHLKTNYRSHQDIIDVSSIALNVDDREYKAGIEYDGNAEFHFITCEEELDTQYNYVVNTIIPNCQNQGIPLQEICVLVKDGNSIKNLSTVMKEKQIPHYFSKFEFAKSDVVLWLRSCALWLVNPTSQSFTEIVNFWIQLLKNETKHFSDEETLMLQKKLYTILEDSKKYAENLNDWLTYLEQELNLAQILNESVTYLDENKYLETLKNYAQSGSFQGYNLSQFSQIGKPKDQVTLSTRHSSKGLEFEVVIMLGMEKGVFPYYKNERNSAKLNEERRVFFVCLTRAKRICYLLRSKKYTRKTRNGIITFDHKPSMFWNELYEVCENKKLVSSTN

SEQ ID NO: 62900 - protein, 728 aa, Bacillus cereus AH1271
MKIKKIKVSNYRLLKNMNFDMEENLSLIIGKNNCGKTSLLSAFEKFIGVKVGGNEFCYDDFNMDFQEGLYSIVKLNSIPTDLRFPMGIKLQLFITYNEFDNLINLSQLMMDLDPENNTIVLSFEYTLSKTSLENLISEFKEYKDKKLEKVGEDNESLEQNIFNDFMKKNHKKYFKIWRKSVAYDLEKQKGNEVEFVDLTKRNIALNKIINFKTIGARRNISNSNNDRTLSTLSSKYYESKTDSEKGMEEVEVFKETLSKTDNELDSVYKELFKTVIGKVKQFGGIKEGDSNIRIVSTLQHKELLKGNTTVMYEHFEKQTLPESYNGLGYLNLLSMIFEIELIISNFRKEHKKNEMPADINILFIEEPEAHTHPQMQYIFINNIKRILEEASIGGDGKTKFNLQTLITTHSAHITNASNYNDIKYFYKENKNEVISKNLKDLEEEYEKDGEEQNFKFLKQYLTIHRSELFFADKAIFIEGDTERILLPAMMKKIDNNLEYKSSPPLHSQNISILEVGAYSQIFEKFIDFIGIKSLIITDIDSGKNVIVKEKEKIEKCRVLESDAELTTNSSLKFFYKNGLEENKRSVIYTNDLDYFKKLSFNQKILQKVKETKNWEQSDKGNIAIIYQTSEENSKGEKYHARSFEDAFFHLNRQFIIDNKENFGSLKNIKRFENEEKDVYDLSEECIDKKPSFAMEILLNSKIDNDGNEYSNWEIPNYIKEGLIWLKFN

SEQ ID NO: 62901 - protein, 544 aa, Bacillus cereus AH1271
MKQGLIYLINSEDSRIKIPNYDELIQDSYFSELENGIQYKEYNQIKNGIISHDEVLELANYMFKTHPLLCDLLKDKYQFIFIDEYQDTSSLVIEIFLKHIRQGKKKNVIGFFGDSMQSIYDEGIGSLEEYILSGDVQEIRKKQNRRNPKVVIELANRLRVDKLIQEPSSDKQAPNMYNGLVKEGSIKFLYSAINDLELVKSSEFFRDWDFNNPKQTKELNLTHNLIAAKAGFTELMEIYDKDPIISFKNDLLNKIKQDTNEKKENILNDTNITFEEVTKLYPIQNKKKELKKELIQENPNTNVLYEQLKDCPFSTVKKIYLNKDALIDDKKQDRNDDGKKGSKRDNLIKHLFKIQTLIQLYKEKKYNDFIRKTEFSITSISKKREIKTIIDTIEKMSNQTIEKVINFAHESGLCRKDDDFTRFVEKNKYLFNRVSKVKYQEFQNLFKYLEGFTPFSTQHKIKGEEFDNVLVILDNGKWNKYNFEYLFCNRIDKRRVLERSQKIFYVCCTRAKENLIVFYNNPNDGVIEKAKEWFGENNVHRIEM

SEQ ID NO: 62902 - protein, 596 aa, Bacillus thuringiensis serovar huazhongensis BGSC 4BD1
MNEGLSIIIGENNGGKSNFLEALNLIFNNNYSIRKRTLEQEDFWNGLVIKDTWPEIVIEVIIKGINNEDELAITSRWLTRTPSEAKLTYKFRPKMGIKTVAPSKPTSISKICLPIEEYEWVIYGGEQETLDAFDFNMLNKFGVEYVGALRDATTDLKKSSGQLHRILKHYDIAEKDLEAIADKLDKLNEQIEKGKEINTVQTSINTYLEKITGVTKQQVKIKMGESNYDTLLKDLKLSIGSNEDELHSVEKNGLGYNNLLYISLLLSQYTTVKEKKASKHDYLFPLLIVEEPEAHLHSHLQKFLADYFFKQKVIGQVIMTTHSSHVSSHGELDNLILFYKNKGNTLSKRIGTIFDERKKEQREHKRYLERWLDATKSNIFFGRKVLLVEGIAERLLIPKFFQMLYEGKTLEGENISIISVDGVAFRPFLHLFNPLALDMKCSVLTDSDPAKVPVLNSSNQEVKDKNGDVIKEAVYPVKKEDCAVCDRTQGLIDDFNSLSNIQIFNNLKTFEYDLMLENNTGFFEELIIKHNVGTKADRESIAELEGAVFAKKAYEVISNEKGDFSQLILDELNEGGILNIPSYIKCAFEFLMKEEE

SEQ ID NO: 62903 - protein, 596 aa, Bacillus thuringiensis serovar huazhongensis BGSC 4BD1
MLVDNEAYRQKIINSPVTDSIIVQAGPGSGKTTLLIERLKYFIQNRSSVLSGIACITYTNSAKDEILNRLEKKGISLPPELFVGTIHSFLLEYVIKPYSYVASKTAESFILLPPGFSRGYYNEIRRLLNIESNYIPNRVYENFESLGYDEDGNECCFRSAISHDVAKEWKKLLHKKHYIDQQDIIYLSYLILNKFKHISKALSIRFPQFLVDEYQDVTWHQDQIFSILESSSFFCVGDFNQSIFGFTGANSEVFQKKKDKQQFYELNNNFRSTNHIIGFSNYKTDISQIGAGTNASSIQKVFMFTGLEKEVGAIELFHRVRESVGCENAYKQFMILGRKTKYLRNLHDIVKAEKIQPNTFLGSLKEKDYRRFEILNNILLAILYKREGELDKGLEMMDMAFSRLFFNKLPNYIQLESIKYERLMWKKLQIALLYYIDTLNLKEILIKDFFPSIKEFLANTSESTYKIKIKKYIQMLNYNWKGQTGAVKKISIYDLLELMIYQVKSVEKEKPFYTIHDAKGQEAECVLVLAENETQLKEWLDSNEDSEEARVGYVAFSRARKLLCIWAPNIKEETYNYMQEHVEFIDAKYLSKVESV

SEQ ID NO: 62904 - protein, 449 aa, Bacillus thuringiensis serovar huazhongensis BGSC 4BD1
MKPIDNLFNDIPGVNTIKQIVGQEWKKYHKDFRYQNASIEFSSTNLATILKKIEIQFSPIEHGGKYTIDKLGDGLRSLFYLSLVSSLLEIEHQVLDDQPAVLRILAVEEPENHIAPHLLGRVMENLKDISKRDNAQVIVSSHSTSIVKRVEPQYIKHLRVNNQGHTIVHDIKLPTKKTEEHKYIKEAIKAYPELYFSKLVILGEGDSEEIVLPGILEANNIFPDDFGISIVPLGGRYVNHMWRLLNQLDIPHITLLDLDRERGGGAWGRIKYVLNQLIENGYDSTEVLKIKYGGRSHILSQNELKNLHKKRMNISYLNKWINKLDEYNIFFSQPMDLDFSMLKSFPTAYKETAPRGPSIPNKETNPKEYNKKIKAAIHGALKSEKAKGNTYSEQDKELMIWYNNLFLGRGKPSTHIHAINNIPKEELLENSPTELKNLTNRVKQILEIQ

SEQ ID NO: 62905 - protein, 641 aa, Bacillus thuringiensis serovar huazhongensis BGSC 4BD1
MNSILLSDNWKPATDIQLEKAALAAVKSDCNLAIVAGPGAGKTELLAHRAGYLLQTKKCEYPRKILAISFKVDAAKNLETRVKERYGEEISQRFDSKTFDSFAKHLVDRFRNALPTEYRPSRDYEIISTEREVGEIAKTYITEENPYFPNWEYFFSNKELFKALHNSKLPLVQVKSDLYNWLSSSMWSLLIHGKGDLKSSLTFPMISRLAEYLLRVNPYILSALQCTYSHVFLDEFQDTTNTQYDLLKTAFLNSDTILTAVGDNKQRIMGWANALNDATSDFIKDFNGTQNQLIMNHRSAPKLVEIQNVLAQRITENCSLAKVSNKWGELEGLCEIWAFEHYQKEADYLAEKISTWINTNGLQPRDICILVKQQELIYGKSLISALSKKNIQARIEKEYQELLSEDCVHLFLNIFSILADAESSKAWLNIVSLLSTIRGIQDNQNNEVFNLEIELQVFIEQLQRDINTFNFEKDTLCLNIEKVLRRIIDFIGDSNFKCYFPYYQKDKYLTAILQKFSLKLAIAYIETKDWYKAIKEFLGDYSIPIMTIHKSKGLEYDTVIFVGLEDDAFWSFKTQTQADTCAFFVALSRAKKQVIFTFSQYREIKKMKTLSTERQSVQNISELYKILLSVKVPIKKIGSTI

SEQ ID NO: 62906 - protein, 798 aa, Bacillus thuringiensis IBL 200
MFIEKLNIKNYKKLKDVKVCLSQKQNLFIGPNNSGKTSAIEILVKFLTDKKSFNIYDVTIGNWSQLDNLFTLYYSKHDEDGQELVLADLYNKMMHLLPTLKVTLRIEEAELYHVKSLIPYLNKECEKVAVTYTYEPVDFEKLILDYKNFRNSVSAWKTLTLSSHQVPEVDLEEIAKDHWPSNFKSFLATDGRFKKYFTIKYYISNPDLEDGDIYDVSTSLTTNPLKNIVKVSVIGAQRGLIDSNEDGDTIDGAKINLNNTRKLSKLFSSYYSEYLNPINQYSEKDYTILNAVTNSKKAFKQHLEESIKPIQKKMGDLGYPGFGSPSITVRPQINLSDSIKGEASLLLNTHKDGINDEQYFLPEHNNGLGYQNLIAMFFKLNIFKQERLAYGGENEKIIEPLHLMLIEEPEAHLHAQAQKVFIDKAYELIKVSLEETGINASFTTQLLISTHSSHITYKADIDELIYFNRKLQDDVFSSEVINLKDVPLDPNAIFNDEDEQLKGLSNKKFVQKYLQLYEHDLFFADAVILIEGVSERILLPELIRKHVTSLTSRYITILEIGGAYANRFIPFLKAINRPTLIITDIDSVKMNGTKTHVSITEELKSSNTTINNWFEKSPDERKLHRRFGVSKGAGKGARKKVSNSVLDDKLIHQLISKCQEEKIKNPIRLAYQYEEYSENIYARTFEDAIALENFEMFKNLDVKNNQFSKLILNIHELFKEVGDKGSLSIQHAEKLFAYVNEKNVKSEFALDLLFIDEFTEDNFMNCPKYILEGLLWLEEQLTSKIETSKAEEEAYGTV

SEQ ID NO: 62907 - protein, 547 aa, Bacillus thuringiensis IBL 200
MNITKNSGDYLKKTSKKIAVITYTKVASEEIISRTPENILFDISTIHSYVWNLIKGYNRNIKEVLLHICDKEINDYIAKGKLTKSQKEKLENLKNKKREIEKQQIFNYSPESSINEKGSLTHSEVLKIFCFLLDSNELFRKLVCHKYPIILIDECQDTNKEVLDAFLKLNRENKICLGLFGDIMQRVYLDGKTDLIQSLKGLEMPEKKVNWRSYGRIVKFTNALRKNIDNLEQEVCNGDRENKGLIRICLVNHELPRTKSEEDVLENIRTQVINNNVDSEYNPYKLVLEHRLAAERNNFLKLFDAFKSGKDTNKTIIDGESREHTFFKQIIIPLYLALKANDDFSLHRLLKNYSYRFEELNRKNIDSYRILRDIGIDFKKFLETFNDDITVGDVCEAILKSNLFEVPEKLKVDFQEETGWKFVFEVDFIELVNFYEYIDGVSDIITQQGSKGLEYNHVQVIIDDYSAKGRLFSYEKLFGVKEKSVKDIDNEAQGKETTLHKTNRLFYVACSRAIKSLVLIIYTANQQKVKEFFIDNEFASEEEILLL

SEQ ID NO: 62908 - protein, 261 aa, Bacillus thuringiensis IBL 4222
MVRLTEMKNLRVSRPLNHLESKIYDFSIFKESLSGDITLDTFYDWFYEIGFSEIVFADRVILYEGDTERLLIRKLLTLDAYEELNQKYIAYVQVGGAYAHKYSKVIDFLKIKTLILTDLDYKKGAVTVEAVKESNTTNATINSYYNDSKGTDLPTVLDLYKWKENGENNMFGGLALLSYQGQAEQYARTLEEAMLSKFYNFNVLEKKIELFGFKEGILINLNILFRTLLNQMKIIQIQITNIVLGILLNIQKIERLILCTH

SEQ ID NO: 62909 - protein, 645 aa, Bacillus thuringiensis IBL 4222
MFCVNAPAGSGKTTKIKSMIVNHKIKHPIDNILCITYTKRAAEELNKDFNEEGIHISTIHSFLHKFLKIYFCKTEMKDLYFEMFEDLIKESIENKEEKEHIVTRNQKYIEKHGCLSVESIKANIDAIYYNESSNNHLYTGGLAHDSLLLFAEKVFDKFPKIKMRLTQKYQSIFIDEYQDSAASVLRMFYKACLNTKSNLYFLGDKMQQIYKNYDGSFEEELKTLNTDIKLDINHRSIPDIVSVLNNIYNDKGFKQNPSKKNLDIKPDHPPRIIMCDNIQERLKRECSIYPDALLLFLLNQQKFASIGARELYKQFSHLERYSHAKQLSATDVLSDNTSENTDPLLKLLFIVGEVVDYYKKSNVGSIIQIFKANRKLFDMGIGTITSHRDRIDLTKLLKQLYEDYHKEISISEFLTLLRGCNLFKSSYIDNMGDEYLEVLKVKLNEFKALSNYLRNPAVSTQHGVKGESHNTVFFIAEDSFRTPIVHMHKFLKLWTIKELTLDSLESFYYDYNKWIEDTISHLGCKISDLNKESHNEHKIYLKTRVEQLCKHFEADFIFKDLCEESYSKYILNPNVTNIKKCFKESTVYGVLSAYKLFYVGCSRARSNLSIFVDKSKIEGFSEELIVKLRRIGFSVEIETKELQKV

SEQ ID NO: 62910 - protein, 729 aa, Enterococcus faecium TC 6
MFISTLQIRNFRNYESEIFRFDNETNTIIGENDSGKTNALTALRILLDDSYYYSSKTLKESDFFHGIQNGWQGHWIIISATFEGISEEEFDNEICASISLNSESQTILEELISNADKGVGSISLFIRPNKAIRKQLFDISTELDSHQFNEFRNSIRLSDYEFYYTSKSNLNFCINENYDKLVGRLNDNIASNPEEDDEALLGSRIDMSDIFKHISVVYVDALRDVLREMKNNRNPVKRIMETIESKISSDNVESLKTIIQQLNETITSVPEIRKIGENINRQLNSIIGSVYSPNLLLSSTMSDDMGSLAKFLSMKPEQNIDLDLLGLGHLNMIYLALKIVEFEACRSRELLNIMLIEEPEAHIHHHIQKTLFEGLNLQKNYTQILMTTHSVHLAEVSEISRMNVLKSFNGKSIVMNPENNLNSFAKEKLKKNNLNLINAVERYLDVKRNGLLFSKGVILVEGDAEEILIPQIVKKLFGINLDELGIGLINVGSTSFEYIASLFDDDRIQRKCAIVTDLDEQAIPSEHRLYKSTAQEKGQARKEKLSSLFNENNWVNCFYANTTFEIEFLDVNKENILTYVSPIIDDAFKDKKTITAYKEEIQSEQYLERNLAMLKLANHVGKGWFAIELGEKIDFLIKIPKYILNAIAFACQEIVDLSIYKKILLHTIDLYEETTELSALSASLKTSDTADLNIAIISLLEYFGKDEDVVYLINQIENYTKILYAEVSK

SEQ ID NO: 62911 - protein, 328 aa, Enterococcus faecium TC 6
MTNIFEKIVNDLNLEQKDVVESEDNLYVNACPGSGKTRVLTRKIAYQAIKHDGSLKRIIAITYTNRAAEEIKERLSLLSIDDDINIWVGTIHQFCLEFIIYPFKMNLSRVSKGFTIIDDYTQRAYVSQINNMLNLNLKTYELNKIDLSLSHDFKINEVQYTQVSEMYHTMLEKNKEIDFDMILLVAYKILTVNSNVARNIASNIRAIYVDEFQDTRELQYNVIAKLLQNNPQIQSMFVGDIDQAIYGSLDGIAKSVEELEMLTSHTFQSKTLHGCYRSNQRLVDFYSNFQSCPYEIESRGNNKNDRGFISYDCKVTKEDLPNIIKNII

SEQ ID NO: 62912 - protein, 688 aa, Eubacterium saphenum ATCC 49989
MILRKMKVKNFRLLKDFELEFKDELSLVIGKNNCGKTSALIILDKMLNSSKVMWEDINLECQKYLYKKIMDFEMSEQEKVESLEAVNLQLFIEYNDNDSYVNIQKFMMDLNPDNNIIVLEFISLIPIKKIIELKEIVNEKKLEDFISFSKFIGKNFSNFFETKKYSRGFDAELNQITQDRSEEIDNKDIQKVIKVAGIRADRAVSNDDRNHVLSGLTGKYFASYKAAKNESELVFTRLEEKLDEADKELYKIYNGEKSESGESIEGIFSGVIDVIKTYGGSENGIDISIESSISEKNLLSDNTNLSYRQGGDCSLPETYNGLGYLNLIGILFEIETKIQELFEQPADINLLYIEEPEAHTHPQLQYIFIRNIKSHIKAHRKKLLEDKNKQLQILITSHSSHIVSECNFDDIIYLKKNGNTVIAKSFNSLKEEYGGDEQKGFKFVKQYLTINRSELFFADKAICIEGDTERILMSMMMHKIDNKEEPEENIIPLLSQNISVIEVGAHSHIFIPLFEFLGIKVLIITDIDAATKNNNGRYVKSHPQEAKYTSNASIKDFFKDTCFDESNNEFEELLKKTPEDKIKNNIRIAYQIPETDGEYQASSFEDAFIALNKDFILKNKEGLCEYGALKDFSNDEIENGDYYNFALNNVKKKSAFASSLLYFDDENGEEDEKWAVPHYIEEGLLWIR

SEQ ID NO: 62913 - protein, 635 aa, Eubacterium saphenum ATCC 49989
MDTLTLEKEVLEALQCIKNGENFILEGGAGSGKTYSLISLINALTEELPDIKIVCITYTNNAVAEILSRIENENLWVSTIHEFIWALIRKYQNEIKDILVELINDDNEKNLKKPKDFSEDLISKEYFENLYVDYDEYYSVTPNDENRVKISHDHILIVAEKMFEKYKKIADILKDIADCIFVDEYQDTSPLVADILLKHLEQSDKKNVIGFFGDSMQSIYDDGVGNLNQYNLTKIVKMQNRRNPRVVIEIANKFRDDDIEQRPSEDTNAPNMENGTIREGSIKFLYGNEADDFISIKEKSIFESWNFSDGKQTKELRLTHKYNAEMAGFKGLYDLYNADLIITLISKIKEKIDKGNLDGDKTLGELALKVKPTYKKVELLDQINGNEIYQSIYSVLEGMSWEEACEKCRVTKESLMSYKLNGMSGRYEANSYRDRILRRLDILEEIIELYEANKFNDFLRITKFSIHNRNDKICLKQAIDYLVSEDDQTIEDVLKFAEVKRLLKEDELFNDYILNKGFYLWERIKKITFNQYRKSVLYLKEFSPICTQHSVKGSEYDNVLLVLESDWNKYDFNTLFGKGSSNSNVQLRTKKLFYVCITRAKKNLIIYMPTNDSDILWKAKEFFGEENIIDITSID

SEQ ID NO: 62914 - protein, 417 aa, Faecalibacterium prausnitzii A2-165
MKLTSLYVHDFKGYREHQFDLLGKSTVLFGVNGAGKSTVLTAINYLMWPVLNRLSNTQGIAFRSLNTESVHAGFGMMNLGADFSLAGETLSLRKDYIKAKPGKAPRVIPYKDLYDSFVEKFTATYLSEGSENNMPIFVNYGTNRSVLDIPLRIRTNHEFSQLAALERASENELDFRSFFEWFRNQEDIENETKTETKNFDYEDVSLGCVRTAVCSMLDNVSDLKVKRSPLRMTVKKNGLEMRVDNLSDGEKCTLALFGDLARRIALANPSRSNPLEGEGIVLIDEIELHMHPSWQRKILGALKSTFPNIQFIITTHSPQVISEVDDSYNLFGLKQENDDVIVKPYNVHGWDTNGILHSVMHTTERPENVVRAFEAFDSAIECNLEEASKILQYLKETVDPNDPKLTECEVRFDLENR

SEQ ID NO: 62915 - protein, 698 aa, Faecalibacterium prausnitzii A2-165
MTTAKVAISADFLTAFAHLPRQVQGKVTELVNKFRNDPASPGIHYEKINSCIDKKIYSIRIDDTYRGIVVRQSEVYLLLWVDHHDEAYQWAARKRCEVNPNTGSLQVFDVQTVSEPIAAHSQPLLFSAFKDADLLRLSVPEALLPYVRSFETKEQFYQARSSFPADAYEYLAWLAEGFSMEEVLELANEECNTSPAAQDLSAALEQPITMRSFVVVEGEDELRRIMAAPLEKWRVFLHPAQRNLTQKNYSGPVRVLGGAGTGKTVVALHRAKYLASQCTGQQRILFTTYTANLAADIQENLRKICSIEELRKIEVIHLDAWVSRFMRESGFSFQIGYDDALAPIWEKALFLANTELPYDVSFYQEEWNRVVISQEAITRDQYLKASRNGRGTRLDRRKRLLVWQVLDNYQNLMKEHQIRDINTAMYECTKLLQGSSVKSQYTHIIVDEGQDLSDIAYRLIRALAGPEHANDLFIVGDAHQRIYRNRPILSKCGINVRGRSSILKINYRTTEEIRHSAFSFLEGLSFDDLDESTDSGTQCQSLTHGEPPIIRNFPDANAEFNFIYTEIRKLQNSGILLKEICIVARTKNLTNDYLSLLTKASIRSYAIKRNQPDNRNFDGIRVATMHRVKGLEFKYVFIAALNHRVVPLAAAINHMDPISEKESITSEKCLLYVAMTRAQKGVYITSYGTCSQFLHQSD

SEQ ID NO: 62916 - protein, 693 aa, Acinetobacter johnsonii SH046
MRIEKVRVEGYRLLEDIEIVLEKNSTVIVGRNNSGKTSFTSIFDCFCGESGARFRLEDFSSLSREKFLNARKLKEEGASPEQIYNTLPIITLSLTFRYDSDAPTLGPLSPFIIDLDMDSTTAIACIEYRPVLAKMHLLFDLPQPPVGMEPQIHFFKCLRNNLSKIYEVHVSAIDPTDKSNKRNFEGTSAFAALLQCNFVQAQRTLDKTKLGEADVIGKLLSELFKTAAAPTATESDQELAAKLKKSVEDIELNVQSDFDKMLKKLLPVMGVMGFPSLNDTELRPETSLNVEALLSGHTKVVYSGTDGVHLPEGYNGLGTRNLIYMLLQLESYHKIYRSQITRPSAHLIFIEEPEAHLHPQMQEVFINQLNAAIQKLSSAYPAEDVWNVQFIITTHSSHVANAACFDAVRYFYNQKDSVKSIRNTKVKDFKKGMQTISSADKEFLHKYMTLTKCDLYFADKVIMVEGTTERLLMPRLRELVDISLPEHQKLASQYVTCIEAGGAHAHVFYPLLDFLELKTLVITDLDSTKMVEKENKKKVKTKIWEKCPVAQGERTSNAAIKDWFRPKDLDEKVIWQISPADLIAKNAIEKQVNFRRIAYQIPEDPKTNICARSYEDALILANLNQFPLPSEDDVATEAWEYAQGLTKADFALEYAIRVKEWVVPRYIREGLIWLSESDVPIQNLEPLDKGGAA

SEQ ID NO: 62917 - protein, 577 aa, Acinetobacter johnsonii SH046
MSQIKENPALVAAQEAQRKINQALDAGYSFRLEAGAGAGKTYSLVAALKRLIDERGSTLVQSGKKVACITYTEVARNEIAQEIEDHPAILVDTIHGFCWAFIRQFQKAIRDLVIELKDKKEKVEQSGGIGSQLVEYDLGFFSVDEMRITLNHDDIPELMAMLLAKEKFRMLFSQQFPVIFIDEYQDTHRQFMDAITDYFLKSKTGPIIGLFGDHWQTIYSSEYELAEYPIEEIAKGSNFRSVPAVVNVLNALRPELPQVVSLPEAKGEARFFHTNSYNGPRTNTAHSKEDLPSDIARSCREELMARLRVEGWDLKKTKVLMLSHNVLAVEQGYPKIVELFRGRTEQFTKKEDPVIRFFAEVIEPMCMAYSSSHYGDMFKILGARPAITKHEDKMLWRRDMDRLLKLRIEGTIGQVIDHLKITKRPSLPDRILRREEELISLMGIPEVEMSSRPQRYKKLREIPYKEVIEVTRFIEKLTPFATQHSVKGAEFDNVLVILGGGWNHYNWPQLLELLETKKLTKTNMKGFYRARNLFYVSISRPMTRLAVLATQSLSDTALLTVSNLFGSENVEELSFGT

SEQ ID NO: 62918 - protein, 641 aa, Lactobacillus crispatus 125-2-CHN
MRGIRLRLKTLLIKGFKSFNEETKIDFSKETAFIGTNGSGKTACLLALNKLFSYNASDRIIHESDFYINSANQDSQSRDLYIEAVFELDKANKDEDKKCEAQYWNRLIIKNGQDKPLLRIRLESTWTNSGIADGTVDTNIYFMTSLEDNNEENKIVARRSELSSIQFIYVPAVRNPERQLSNTSDGMISQLIKRVNWDDEIKQKIVSISSQLNDTFWDEKGSKLIQDTLNQEWKSLEPNSRFSNVKASVSSIDINKIMSRIRFEFNSNVTNNVFSVDEMSDGIKSLFYISNIASVLAIENTVQEDDIKIEYPVVTIFALEEPENHISPHLLGKVMDKVKSITKLDNTQTIITSHSPAIIKRVLPENVRYFHLTKDAVTEVKKIKLPDDKGEKYKFIKRAVQTYPELYFSKLVILGEGESEEIVLSKIISSYTGLDEANISIVPLAGRMVNYLWDLLESLNIAHITLLDLDYGRYLGGKKRIKDIIDELKRFNPNDDELEKIENKCADLAENKNNLLDLTKQLEKYDVFFSFPLDLDFMMLAAFLDKYKGIASGSPKTKADERKKILDRTLKGKREEEVDYDKNDIELMRWYNMLFLGIGKPLVHFTALEDISEEELCNNLPEQLKRLFESVKNKLDKKNDE

SEQ ID NO: 62919 - protein, 620 aa, Lactobacillus crispatus 125-2-CHN
MMNKDQWKPSNGIVLESNAKQAIFTNDNILVQAGPGAGKTELLAQKASYLFQTGLCPAPFNILAISFKRDAAENIKDRVSKRVGKEEGSRFISKTFDAFAKLIVDRFYLVLPKDLRPRPQYEISSNSTQTKIYERAFGYVPDRNAVNDLLKVDMNDINPQSNNYKFWKYMLMGEEKTYLTFEMISRLALYIIQHNKYVRHIIRSAFPFVFLDEFQDTTVLQYDIFRECFLNSESKITAVGDNKQQIMLWAGADKEILGKYTREFRATKVFLKENHRSALNIVKLQKLMYEKIDKDINPDIIINKNKDEGKVFLIETNEPSKEAEIVGENIIKEIRMGVKPSEIAILVKQRPEDYIRNIKEYLKTKNVTVRVESKYTETFSEPIVKLILKMILASINVINGQEWQELVDETSEIFLINLADAEIEQKYIKKLNVFLDKLFKNLLVQVHENRSKSNYYCKIVESIIDFFTINRLQVYYPEYLEIDQLNRTKTQFIEQLKECGSINELNTDIKEIWKEIIDNYLGKNSIATLTIHKSKGLEYNSVYFIGLEDSAFWSFSNQSESDRKAFFVAISRAKEKLYFTFCRGRQTVRNIYQTKKNIKEFYELFDKSGIVKEINDNNNS

SEQ ID NO: 62920 - protein, 693 aa, Parabacteroides sp. D13
MEIKLYFGKEYNMYIKEIKISNFRNFRDASVPFHEGVNVIIGHNNTGKSNLLRAIGLVLGYSDGRRLGTCDLFYETDVVTLQQQSPRIKITLIFHRSQGEALDSAEMGLFSGMMTDPALSEEAKLRYEFKLADDQEDNYKADVAGVTTAKEIWKIIDRDYIRLYRSSRSGGNQAAGISVNDALGQMDFQFLDAIRDVSHDLYAGYNPLLRDVLNFFIDYSVKNDATKTEDEIKEQLKALRNDFVQQSSPLMQTLQDRLHNGKNVFLKYALDTGATFNGAVPDFDGEVTENEMFAVLRMIIKYTVGIEVPATYNGLGYNNLIYMSLLLAKMQADSSITYMKRNAKVISFLAVEECEAHLHPAMQYKFLQFLQDNKANGHVRQIFMTSHSTQIASAVKLDDLICLTSPVLGQINVGYPRVIYKEDNDDDVVSKQYVQRFIDATKADMFFANKLIFVEGVAEELLLPVFARYLNKNLTDEHVLVVNMGGRYFNHFLKLFDTNNPYTINKKIVCLTDIDPCRKKNEPDEDYEACYPYEYNIDTANYNYKHHADTEVAQYAAHPNIRFYRQDVTYGKTLEYDIMRENPDCELLLTNSVSNLKEIKAMMAEQDMNKMMSKMRNSEANTRIKTSIGASKWTDEEKRKALLASRYLNSVSKGSNALELNVVLMANLDKPVADRKEFHVPQYIVNALTWLLS

SEQ ID NO: 62921 - protein, 553 aa, Parabacteroides sp. D13
MAIIITSEQTIPIDEPFKVCAGPGAGKTHWLINHIKNVVSNSHKLDIVKKVACITYTNVGTDTITSRLNIGNDVVEVCTIHSFLYANVVKPYVHLVAEDFELKLDELVVIDDSNFKSEGTAKIVLNRIGRSWLDAKIYLKGLESANWRYENHEYKHYKPNYPQVYYTKSGKRYVGNDWYMGFKRWLWSGGYMSFDDILYFSHILLSRYPNIYKLIKARYPYIFVDEFQDTIPFVVDFLTLLGNDGVIIGVVGDKAQSIYDFLGATVQQFDNFALPEMQEFEIRGNRRSTKQIIELLNIVRTDFSQDWLNGAEGMVPELLVGDMLNCYQQSIEKSGTDEIQSLAFQNVLANSMRNKNGMRKAEKILEMDFDSNVERQMVIKALIKAVEYTRMNDLRNAWHQLDIIDRERSLTIVLLRHLLNGYKDYKDGSMMDFYNFLVNDLHVKMPKIKKKTIKDFYMDHTYADAALGVKYGDSNDKHKTIHKSKGEEYDNVFVVLKEEDDIEFLLTPDLNGNNAHRVYYVAASRAIKRLFINVPTLSAENRIKFEGKPINIS

SEQ ID NO: 62922 - protein, 691 aa, Fusobacterium nucleatum subsp. animalis 3_1_33
MVLKEIVVENFRLLKNFKLELKEDLSLIIGKNNCGKTSVLVILDKMLNSSEIAWEDVNLVKQKELYNEIKGFNGSVQDGNKLLEAIKLQLYIEYSDIDSYENIQNFIMDLDSENNIILLEFISLINIKNILELKDIIKGRKIKDFSTFSRYMSKNFTKYFKIKKYSRCYDKKTKKIISDMIEEVDNKNIQKVLKIVGIRADRAVSNNEKNHALSSLTSRYYETYRKNIEDKSNSIFQELEVELEKADKALYKIYNGEKTNNRQDSEGIFKSIIDVVKTYGGSDNKINISIESSISEKNLLTDNTSLYYKHGDGDSSSLPETYNGLGYLNLIGILFEIETKLQELYEQPADINILYIEEPEAHTHPQLQYIFIRNIKNHINSHRNKLNKEKNKYLQIIITSHSSHIVSECNFDDIIYLKRIDNNILAKNFNSLKNEYEGDKKREFKFVKQYLTLNRSELFFADKVICIEGDTERILMPAMMYKVDKMQSSKNESTIPLLSQNISIIEVGAYSHVFIPLFKFLGIKVLIITDIDSAIKNNNGKYEKSHPDNATHTSNASIREFFKEDGLDDGNNQFKELIEKKGKDKIKARIRIAYQIPEIDKGYQASSFEDAFISLNKDFILKNKDNLYDYGALKNFSKKEINKDFYEFSLKNIEKKSAFASALLYFDEEEDDKEWKVPRYIKEGLLWIQEF

SEQ ID NO: 62923 - protein, 633 aa, Fusobacterium nucleatum subsp. animalis 3_1_33
MDTRILEDEVNTALQCIEKGENFILEGGAGSGKTYSLILLIETLIIKLPEIKIVCITYTNNAVAEIKSRIDNENLWVSTIHEFIWYIIKKYQKEIKNELVLLINNETIKSFKKPKDLENNLITIDYFNNIDVEYDEYYSMNPNENKVKISHDHILILAEKMFDRYKKLSDILKDVANCIFVDEYQDTSPYITKILLEHLKKSKKKNVIGFFGDSMQSIYDEGVGDLNKYKLKKIVKKQNRRNPRIVIEIANKFRDDKITQVPSKDKNAPNMDENGVIIEGNIKFIYGKEQEDINFLKNKALFKSWNFLNGEQTRELRLTHKYNAEMAGFKKLYDLYNDDLIIKLIDNIQKNIDNNENKESILDELVLKLRPTYNRKDLFEEIIGNEIYKSIYQNIKNLVWKDALEKCKISKESLMSYKFNGINGRYETNSHRDKILKKLDVLNELIELYESKKFNEFLKKTNFSIQNKNDKSKLKELMNFLIFEDEKTIEEVLDFSKKQGLIKEDMNFDNYISVKGFYLWERIKKISFKEYRNSILYLKEFSPISTQHSIKGSEFDNVLVILESNWNKYDFKTLFGKGSENENVIKRTRKLFYVCMTRTKKNIVIYMPTEDLEIINSAKEYFGEENVLSIDSI

SEQ ID NO: 62924 - protein, 681 aa, Prevotella sp. oral taxon 317 str. F0108
MYIKEINILNFRSFKEALIPFHEGVNVIIGHNNTGKSNLLRAMGLVLSYSNGHRLGTSDLFYETDVAELQRQSPRIQITLVLRRSADENLDSADMALFANMMTDPALSEEAELRYEFKLDDSQEKNYKADVANAITAKEIWKIIEQDYIRLYKSSRSGGNQAAGININETLGQIDFQFLDAIRDVSHDLYAGYNPLLRDVLNFFIDYSVKNDVTKTENEIKEQLKALRDDFVQQSRPLMQTLQDRLQDGKNVFLKYALDTGATFNGAEPDFDGTVTENEMFSVLRMFIKYAVGIEVPATYNGLGYNNLIYMSLLLAKMQADGSIAYMKRNAKVLSFLAVEECEAHLHPAMQYKFLKFLQDNNLNGHVRQIFMTSHSTQIASAVKLDDLICLTSPALGQINVGYPRAIYKEESSNDMVSKQYVQRFLDATKADMFFANRLIFVEGIAEELLLPVFARYLNKNLTDEHVLVVNMGGRYFNHFLKLFDTKNPYTINKKIVCLTDIDPCRKKKGDDKNYEVCYPYEYNIDTDNYDYKHHADTEVDQYVVHPNIRFYRQDVTYGKTLEYDLMRENPNCELLLTDSVSNRDEIKAMMAELDVNKMMGKMRNSEANTRIKSSIDQSGWEDEEKRKALLASRYLNSVSKGSNALELNVTLMDNLEKPEAERKEFHVPQYIIDALKWLLS

SEQ ID NO: 62925 - protein, 558 aa, Prevotella sp. oral taxon 317 str. F0108
MATIIKSEQTIPIDEPFKVTAGPGAGKTHWLINHIKKVVSNSHKLDVVRKVACITYTNVGIDTITSRLNMGNDVVEVYTIHSFLYANVIKPYIHLIAEDFGLKLDKLVVIDDSNFKSEGIAALVLKKVGKSWLDTKIYLKGLERAMWRYENHEYKHYKPDHPQVYKIKSGKRYVGNDWYMGFKRWLWSGGYMSFDDILYFSHILLSRYPNIYTLIKARYPYIFVDEFQDTIPFVIDLLAKLGNEGVIVGVVGDKAQSIYDFLGATVQQFDSFTVPEMQEYEIRGNRRSTKQIIDLLNIVRTDFSQDWLNGSEGMMPELLVGDMLNCYQQCIEKSGTDEIQSLAFQNILANSMRKKNGVREVENILGMDFDSNAERQKVIKALIKAVEYTRMNDLRNAWHQLDIIDRDRTQTIVVLRYLLDGYKDYKDGSLMDFYNFLVNDLHVKMTKIKGTAIRDFYQNHTYADAALGVKYGDSNNKHKTIHKSKGEEYDNVFVVLKEEKDLEFLLSPNLNDNNSHRVYYVAASRAINRLFICVPTLSAEKRIQLEGMPINILLPNNS

SEQ ID NO: 62926 - protein, 575 aa, Bacteroides sp. 1_1_14
MILADITLKGFRNYKDAHIKLEKNTLIIGANDVGKTNLIWAMRLLLDRSLSDYDIEPRSSDFYVLEETNSFVILLHFTDITEECVLSKLRGKISDANEMYMSYNASRDPNTGKISYTIKAGASVELLSDIEAHYYRKYLNIKYISCRRDLYAFISKERNFLFQNAKESRSTQEEEEDNTLLQEIKTKLQEANNLIPTLHYISKATNSINSELKEMSIYNNNQDVYFDTNSSNIDKFIDSTSVSSKTNDTPVNIGGDGRLNQIYLSLWATKHEIERPKLEEVSIVCIEEPEAHLHPHQQQKLATYLSNKICGQIFLTSHSPQITSEFSPNSIVRLYKTEQSDTKAASNGCSKIIEGSIINFGYRMSIIPAEAFYADQVWLVEGISEVIFYKALSKFCGVDLLKNNISILMANGIGFSTFIKILNAMNIPWKLRTDNDIFKIPKKKYYRMAGMQRAISILEDYRELDASEKKIIEENKEKLKELPTNIPTNEINTICSTLRSILNNHGIFLSEKDLENDMFNSPIKNDLIEFFNDLEEYEIITAMQEAKGNFMYNFIRQKSTSLSKLKEHSLTNLLR

SEQ ID NO: 62927 - protein, 472 aa, Bacteroides sp. 1_1_14
MQEKKTFDNLIIRSMNNSERSQLGQVEKREKIEYNHMDIILSLLEANIILIECIGILANYIFDNSKACRSYLKSRYKYLYVDEYQDTGIDQHYLFIKLKNMGIIMTAVGDVNQSIFEFSGKKSYYLKRIRQDKTFRSFILSQNHRSHQSIVNYSNRLIDSTCTITDIPEKDRRVFYFISLGDEKHIASFIDEKIASIMNAYNIDKFNKIAILFRNSKNAQYISQELNTPHKIVSPTKLDMQISIWASIFASILRFIFNPTNRFIDIVETYSSFDSLRNTQKRSLQKSNIVLNGIVDHGEICNKDLFIETSINIATILMPEAHNINDINLLKEVVFDSKQLDSYRSEDSNEINLMTLHKSKGLEFDAVIHADLYEWGLPSKKVENNNFKEPLYPNWEQDLNLHYVGITRAKKVCILIRSEKRHKSNGELTNAQDSEFIQLHNVHNLRFNPVNAIPFPTQRYMNEVKEKEFPRS

SEQ ID NO: 62928 - protein, 472 aa, Parabacteroides sp. 20_3
MILADITLKGFRNYKDAHIKLEKNTLIIGANDVGKTNLIWAMRLLLDRSLSDYDIEPRSSDFYVLEETNSFVILLHFTDITEECVLSKLRGKISDANEMYMSYNASRDPNTGKISYTIKAGASVELLSDIEAHYYRKYLNIKYISCRRDLYAFISKERNFLFQNAKESRSTQEEEEDNTLLQEIKTKLQEANNLIPTLHYISKATNSINSELKEMSIYNNNQDVYFDTNSSNIDKFIDSTSVSSKTNDTPVNIGGDGRLNQIYLSLWATKHEIERPKLEEVSIVCIEEPEAHLHPHQQQKLATYLSNKICGQIFLTSHSPQITSEFSPNSIVRLYKTEQSDTKAASNGCSKIIEGSIINFGYRMSIIPAEAFYADQVWLVEGISEVIFYKALSKFCGVDLLKNNISILMANGIGFSTFIKILNAMNIPWKLRTDNDIFKIPKKKYYRMAGMQRAISILEDYRELDASEKKNN

SEQ ID NO: 62929 - protein, 567 aa, Parabacteroides sp. 20_3
MTPTEQQKAILECRENLVVIAAPGSGKTFVLSEKIKNDIKELLDYQGIIAISYTNKASLELKNRSLANGISPKSSFFGTIDKFCIQDIIIPFGSLMQEKKTFDNLIIRSMNNSERSQLGQVEKREKIEYNHMDIILSLLEANIILIECIGILANYIFDNSKACRSYLKSRYKYLYVDEYQDTGIDQHYLFIKLKNMGIIMAAVGDVNQSIFEFSGKKSYYLKRIRQDKTFRSFILSQNHRSHQSIVNYSNRLIDSTCTITDIPEKDRRVFYFISLGDEKHIASFIDEKIASIMNAYNIDKFNKIAILFRNSKNAQYISQELNTPHKIVSPTKLDMQISIWASIFASILRFIFNPTNRFIDIVETYSSFDSLRNTQKRSLQKSNIVLNGIVDHGEICNKDLFIETSINIATILMPEAHNINDINLLKEVVFDSKQLDSYRSEDSNEINLMTLHKSKGLEFDAVIHADLYEWGLPSKKVENNNFKEPLYPNWEQDLNLHYVGITRAKKVCILIRSEKRHKSNGELTNAQDSEFIQLHNVHNLRFNPVNAIPFPTQRYMNEVKEKEFPRS

SEQ ID NO: 62930 - protein, 732 aa, Bacteroides sp. 3_1_23
MKIQSVHIRNYRKLKNCHIDFDEKKTVLVGANNSGKTSAISAIVWFLKNTDRFTLKEFTATNWAAINEIGEKWLEHDSVDEALLDSHQWDNIVPSMDVWINVEDGEQYRVNHLIPSLSSWDGKKVGVRGQYEPKDVKKLYTVYKDAKIKAKTLEGTEEWEKAGSPDLYPKNLCDFLGKGLNLREYFDVKYYIIDPSLDPDNEDEVQSTPDNEIGNNPLDGLIKVDTILASRDFSDPEGQTDSDIDTLSKQFQQYYKSSGQEDEELTCEGLKLLGGIVTANKTYDEKLKKTFEVPVGELKNINYPGFQNPEIRIRSKIQIEESIKHDSAVQFAIQGMEELVLPEKYNGLGYRNLISIYLKLIDFREKWLKELSEEKNIEPIHIVFVEEPEAHLHAQAQQVFVKKAFEALCNNKLIEENPWLSTQLVLSTHSNHVVNELDLNCMRYFKRVIDVGKKIPVSKVVNLSSTFGTDDETKQFVTRYIRLTHCDIFFSDAVIFVEGPAEKILVPSFLAKAGLDSYYISVIEVNGRHAHSFRKLIEKIGIATLIVTDIDATDTKIEDGKEKHPSVITAKGNDYKTGNPSIKSWLSGKEQIDDLLALDGREKLVNNVRIAFQTPVNVKWDKNKDDLTEVCPYTFEDALIFTNLELFRQEGLKKMGTITTIANLLKHSNSANELQNKIFKKLESKSGFQKADFAISLLYKDDFVNLVAPVYIQEGLEWMKSYLDSNGNRNGE

SEQ ID NO: 62931 - protein, 612 aa, Bacteroides sp. 3_1_23
MENNIDFQVDETLEKCILSTPRKSFFLFAGAGSGKTYSLVLLLKKIHNSIGKDLLLQGKNVAVITFTNAATDEIINRLDYSPIFHISTIHSFVWDVIKYYQADIKRLYCFYIEEDLKALEKKLEETEKKTTKTYLSNVEKFEYQKERLAKAQIIEKFVYNPNGSNPEYNALKHAEVIKISAQMILENKMLQRIIAQRYPILLIDESQDTKKELIDTFFEIQRNFADIFTLGLLGDQKQRIYADGKENIEDSIPIGWEKPVKRMNYRCAKRIIQLANNIGKDIDIHAEQRPREDANDGLIRLFVIQQREGLNKDEIEQNVMRIMSEQTQDAKWTTIGTEVKVLTLEHMMAARRLGFSRFFAPLYKVSKYQMTFLQGSVSEIEFFTKEVLPIAESIKEDGRVALEILKKYSPLLSGQNTEKPYELYLKCREEAIKVANLVNENGTIRVVVDEIIKSQLLTVPDVVRQAYMLSPSDIEDTVEEELRAWVEVMDLPINMVRSYDDYVNHRSQFDTHQGVKGLEFDRVMVIIDDSEIKGFLFSYDKLFGVKDLSNVDLKNKENGKETSIERTQRLFYVTCTRAKNSLAVVMYTNNPERVKTETIRKGWFEENEIIVM

SEQ ID NO: 62932 - protein, 594 aa, Klebsiella sp. 1_1_55
MRISRIRLINFANFSDVDVETGESIVIVGENKVGKSNFIRGLQLILDPGLSERDRQLGFEHFWDGLGEEKLGETIEISVDLTDFTDDARLMAHLNDCVLNPGPPMVARLTYRFQPKTELNRAPESLKDYEYVIFGGADPDMHIGGAFRRMLPIDVQGALRDAEKDLSSWRNSPLRPLIEELSASLDDETREEIQTQVDEAQRELADHDEVAATAERISERLIAIAGKQHAVPVSLGLAPTRVDALLRSLRLLLDSGIRGIGDASLGTANLIFLALKSLELDRLVDDGERDHTFFVVEEPEAHLHPHVQRLVYRYFLGTDGENGDEGTPLTTILTTHSPHIASVTPVRSIVLLRYDAEDKKTIAVSTANAPFTPRDEDDLQRYIDVTRGEIFFSRGVILVEGDAERFLVPAFADALDIPLDMLGITVCSIGGTNFTPYVKLLGPRGLNIPHVILTDRDPMEGGVPLVRKRLINILSVLENDVDHDDMDTDEVIEYAGEYGCFVNEITLEPELFTGGLGEAMKSVIEQELSLRRATLNEIQAWVDDTDQLDKARLLKLIERIGKGRFAQALAPSVSEDVCPDYIREALEHIRDAVA

SEQ ID NO: 62933 - protein, 605 aa, Klebsiella sp. 1_1_55
MPSRNVSAAYLAQAAELAENPGQLAAYHSRGHCVVLAGPGSGKTKTLVLKLARILAEDVEAPRGAACITYSQECARELTRRLEALGLREAPNLFIGTVHGFCLRHLLMPYGRLADLPIPFPLSVASQRASERLLRQSGDRLFGPNHPYKAIDLGRHRRSVLNRNSVAWRAEEELAAWAEAYEAALRQEGLIDYDDMVVFGQRLIVEHDWVLPLVQAKFPILAVDEYQDLGVALHRMVKRLAFEGGVRLFAVGDADQSIYGFTGADGALLMELAGRRDVETVRLQLNYRSGAGIVNASEMVLGEVRGYRASDLNRQTTIAFQLCPDGLEDQAVHAVAQIIPTALAAKPGRTLGDIAILYKDYRAGDVVADAVTAGGFDYIRVDTAAPYRKVALTSWVEDCAAWCAGGWRIGHPQLRGLTDRYLAFHRARLDDACARHKGQELTKLLWALRADQHPACDFVASLRNGLVDSLLATEPALSDQAEQLDRMTVALAEGGALAMLDITSLGGRDGSPEHLNLLTLHSAKGCEYDVVIMVGLDLGNLPWRNETPEKLRESRRLFYVGLTRARDEVHMLYSGFVDGRYGPMRLGRSPFLDELEVRMRGAGLQ

SEQ ID NO: 62934 - protein, 660 aa, Pseudomonas syringae pv. syringae FF5
MRIESITISGFRCFGPNEISIPISDEVTTIVGPNAAGKTALLQAMSKLFGVTRAQRTVSLSDFHLAPGQDPESRDSKELFIEAIVAFPELLDGSATAETIAPSFRHMLITRAAQAPVCRMRLEAQWDDDGTLEGEVSQNLFWIDCLDDEPAEDKYQPVAVTDRGLIQLYYTPASRDAASQIRATAGTLAARLLRAIEWSSDTEDKVQEATESLTAAFEGECAIAAITEALQTRWADLHDDVSNTKPRLSLVSRRFEEVINKIAVIFEQGPDGRERGIEALSDGQQSLFYFALAAAVFDLEREVVEGSVAGFREDALHIPALTLFALEEPENHLSPYFLARIIRQVRSLTEASGAQAIITSHSPAVLSRVEPSEVRYCRCNAKTRVSNVKRIELPTDDVEASKFVRGAILAYPELYFARFVLLVEGDSERIVLPQLAEALDLLIDPAFVAIVPLGGRHVQYFWRLLKGLGIPYATLLDLDLGRDGGGWGRVKTALEKLIEFGAPKSKLLQTSTGSLTDEELQGMHGWRNVANHSTQLSWINRLKEYGVYFSAPLDLDLAMLNAFPDDYAAVIPKGGGPRMTADKAAEVVLGTSGPGLSVYTGPYEDYPALFPSYRYHFLTHSKPATHLAALTRVSKASLTADMPVVLAEVVRHIASSLRRD

SEQ ID NO: 62935 - protein, 634 aa, Pseudomonas syringae pv. syringae FF5
MAVSSRRIARGDWKPVGVKALEANALKVVRSKKNRSVIAGPGAGKTELLAQRAAFLLQTDTAPSPRRILAISFKRDAASNLAARVRQRCHHSHASRFDSMTFDAFAKGLVDRFGQALPDRWRPRPDYEITTHTERDFREYLHDLPPPPAEIGTRNDVREIGSKTFERRHLLGSPLPVEGWPDPTVAQWAADAFWRVSLHGGGKSVLSFPMIGRLAELLLRVNPMARDALRLTYSHLFMDEFQDTTRVQYDLVSTIFRGTETIVTAVGDNKQQIMRWAMAMDAPFSAFDADFGGVRTSLFNNYRSSPDLVRIQHVLAQALDVQAVQPVSQTDGTIDGESCSILDFPSPKTEARQLAQSVASYIADLKLTPRDFVILVRQKAGEYAELLEPAFANENLALRNEAGMVGKVMLQELMTEEISKLVVNFLCLSMTPRAGSYWSTCQNWLASMRGIDADDSIRQSRLARVLDTYATELAARYSLPPRSKVASRALVDDILNFVGVEHVIRFNAAYGQGSWLEKVLDATAEHLLSSSLHSKDWSHTLDMYEGVHAIPLMTIHKSKGLEYHTVIFVGLDDGAWWSFSQDEIEATAGFFVAFTRAKQRVIFTYCASRGTRTKIATLYELLTKAGVQITTGSS

SEQ ID NO: 62936 - protein, 700 aa, Enterococcus faecalis S613; identical to SEQ ID NO: 62794

SEQ ID NO: 62937 - protein, 573 aa, Enterococcus faecalis S613; identical to SEQ ID NO: 62795

SEQ ID NO: 62938 - protein, 700 aa, Enterococcus faecalis R712; identical to SEQ ID NO: 62794

SEQ ID NO: 62939 - protein, 573 aa, Enterococcus faecalis R712; identical to SEQ ID NO: 62795

SEQ ID NO: 62940 - protein, 690 aa, Escherichia coli MS 57-2
MHIHQVEIKNFRLLADAELVLEEQTTVIVGRNNSGKTSLSEIIRRFLADGSATFQLEDFSSSCYDRFCDALEALKEGMEDHLVRELIPAIELRLKFQYDPAQPQLGPLSPFVIDLDPACSEAQVVVRYELKDGHLTQFLESHTEMPLSREDRLAFLRILRERIPNNFCVKIWAEDPNDPDNRRELPPSALRGLVKSGFINAQRGLDDVTSRESDVLAKTVENLFATASSASAGTADKQIADALKGAVQDIQTQIDTNFGNQLNSLIPALETFGYPGLGGQELHTETLLDVSKLLSNFTKVRYSGYSGIALPESYNGLGTRNLIFILLQLAGFYKAFCAEVTEPGVHLIFIEEPEAHLHPQMQEVFIRQLAKIAQQLVDGTEDRRPWPVQFVVSTHSPHIANAAGFESIRYFLGAPAQGTREGVRKTKIKDLRKGLNHIPIEDKKFLHQYMTLTRCDLFFADKAILVEGLSERLLLPVIIKKLESAEPERPKLSSQYATVMEVGGAYAHLFFELLAFLELQSLIITDLDAVLRAGGQACAVHLGTYSSNACLKAWFSEDTPFTLAGLIARSDDDKARNGNRIAYQCAEVTDGPCGRTFEDAFILANSALFGLVGRNTQELEIEARDKAAEWKKSEFALKYAITETEWNAPKYIVDGIRWLAGSNELMTQDPVLAQVVEATTSIEEGASADV

SEQ ID NO: 62941 - protein, 577 aa, Escherichia coli MS 57-2
MSEIHSPAEAASQRALESMYACLSEGRSFRLEAGAGAGKTYSLIKALRFLIERNKDLFEKRSQQIACITFTNVAKDEIVARTDRSPIVFCDTNHAFCWSLISSFQKPLRELIETMPTWAEKLEEVGGSLGNRSIEYNLGHRSIRDHRITLHHDDVLSLTISLMEHEKFRRVIAERFPIILVDEYQDTDKNWIEAIKRHFLGQARAPLFGFFGDHWQKIYGGGCGKLEHQDVVEIGKEANFRSDKIIVDALNRMRPELPQCVKDPEATGLVRVFHTNNWQGVRQKGVHWSGDLPLCEGQATLERVKTTLEQDGWVFSPNHTKILMLTHRLLANQQGYSNIVAAFKYNESFTKKEHEHIAFFVDKLEPACDAFTARKYGEMFNALSGITPLLRRHSDKVSWHNVMTQLLALRETGTIGDVIEFIRAQRKPRLPDKVEKFEQELLHFDRTADVEMPRRLKELEKLKNIPYSEVRSLRRYLDGYSPFETKHGVKGAEFENVLVVVGRGWNQYNFGEMLEFAGAQTIPVDKQDSFERNRNLFYVACSRPQKRLAILFNQALSPAALTTLGNWFGAETIIPAP

SEQ ID NO: 62942 - protein, 771 aa, Enterobacter lignolyticus SCF1
MHLRKLAVRNFRRLHDVVIDLASDISIFVGANNSGKTSVGHALQLFTGKSRFNIHDFNAECWTDIVTFGEGADAASLPSLELDIWFEVTPNDVHRVVDLLPSLSWSGSLVGMRVAFSPINPEEIRSRFLAVRQLAIDATPKDENGTLKYDPSPRNLWEYLRDRLNDEYELRYYVLDPAHFNAEMISEEGYEPTPLTGRDRSGREILNSLIQINFLNAQRHLSDGSGGSRSEDLSRVLSRFYGRNLEQKGEDYEALIALAASESAFNQHLERVFAPTLKSLAKLGYPGLSNPRMMIRSALDPAQIMNNQNGAVIHYALGEDDGNPTPPTLPDSYNGLGFKNLIFMVVELLDIHNQWLAIEENRPPVHLIFIEEPEAHLHAQLQQAFIRKIMDLLAMESQELMHYTTQVVVTSHSTHILYERGFRPIRYFRRKRSSNMSATDVLNLSVFYDNTDPEIRDFLERYLKLTHCDLFFADGAVLVEGNVERLLLPQMIATAAPRLKSSYLTVLEIGGAFGYRFQKLIEYLGLTTLIITDLDSVYCTPPEQDATEARADELDGLAENPAANDDGEEPDDDEEEQANTETPGKACIASHPGAMTSNQTLRQWLPKCDTVVALWEATEEMKIQSRTAECDALVRVAYQCQTDVTWKEETLALAGRTLEEAFALENLSWCQDVSCKPLKLRIARAVSMDLLQLAQRIHKRVQSKSFSKTDFALNLLLKKPDEWSVPTYIAEGLKWLEAEIAPPELEVAEGQEENVQDMSVALAETDGGRVA

SEQ ID NO: 62943 - protein, 625 aa, Enterobacter lignolyticus SCF1
MTSRIGSPDTQADIDVRICLDSSPPRSFVMVAGAGSGKTTSLIKALAHLADTRGSALRRAGQKISCITYTEVAVGEIAADVGNSQLFHISTIHSFLWSIIRPFHLDIAKWVVARIHEKIAEKQAHYDKPRTQAKTKSRLEDEIAYLSAQLECIDDIDKFIYGTGSNYAKGILGHDDILKLVPACVEAHPLLRRIVAKRFPFVFVDESQDTDPDVISALRTIANDNPDMCIGFFGDPMQKIYMSGAGAIPLSDGWAEITKPENFRCPTSVLGVINSIRASGDGLQQIRGRKTIVDGVEQTVLGTVNLFILPSNVERSAYLTSVRRYLANETSDEQWLSDTREGDVRLLVLVHRMAANRLGFPNLFSALTDKAPMSLSEGVNDGSAWPLRPFVQHILPIFAAAQANDQFQIMSIMRNECPKLEPSRLHGQAMVAVLNELQQGINGLLALLEDGSQATVRDILRHVRDCELLRLDDRFDNHLSDEPVNDGNDDFENVQNYLRCNAHELWAYRRYLSEESPFATHHGVKGAQFERVLVVIDDEEARFSQYSYGKYFQYIPLSDNDLANLEEGRESVLDRTRRLFYVCCSRALKDLAVVIFVPDVAVAQAAIIAQNLFPASVILRAHDLV

SEQ ID NO: 62944 - protein, 686 aa, Ketogulonicigenium vulgare Y25
MKIENFRLLQDVEIGFEDRTTLIVGRNNSGKTSIAELFRRLLSEKTLTFRLEDFSLGCHEKFWNAFEAFSAGAEVSDVLDTLPVIRIIIDVSYDVDMPDLGALGDCIIDLNPDCTYGRLVLTFGPRPDATTFLFADLPAPEEDAENARSALFRALGARVSATYISILEAIDPNDPTNRKPLETKVLTAIIQGGFINAQRGLGDDTKRERDVLGKVVEILFQSALSDPTDPEKRTTAEQLKSAVEDIQSDLHSDFNVKLTSLLPTFELFGYPGLADPGLITETSFDVERLLSDHTKVRYVGKNGITLPETYNGLGVRNLVFMLLQLLRFFREYQATPTAAGVHLIFIEEPEAHLHPQMQEVFIRQLDQITNAFVTQLNDNHPWPVQFVVTTHSPHMANEARFESMRYFLSKADENGVRRTIIKDLRRGMGTAPEPDREFLHQYLTLTRCDLFFADKAVLIEGTSERLLLPTIIRKTDNAAPGAPQLGSQYLTVMEVGGAYAHRFFDLLTFLELRTLIITDIDAVRPNANNKREAVPVAQGQFTSNGCLKALYGADISPAALLIKTPDEKITNDRRIAYQIPEQDGGACGRSFEDAFIIANPGLFALGEEDVATAAYELAAEQKKSAFALQYAITNTEWIVPHYISEGLRWLAQGNPAPVPPPVAVAVEILAEAAGVEIAPIQGGEHG

SEQ ID NO: 62945 - protein, 586 aa, Ketogulonicigenium vulgare Y25
MAEGQESPADAAGRIALERMFACLDEGRSFRLEAGAGAGKTYSLERALRRLIEKQGSALLRQRQQIGCITYTNVAKDEIIARTNAHPAVRPETVHGFCWSVLQDFQPTLRELVPGLPTWEERLAETGGVGHRRIHYELGYPGVTDDQVSLRHEDVLSLMIQAMSRPKFRRVLTSRYPILLIDEYQDTDAGFVDALKEWFLDRGEGPLIGLFGDHWQKIYGEGCGLVEHQALEVIDKQANFRSVDPIVQVLNRMRPDLLQMVSDPAAQGETRVFHTNNWPGQRRTGQGGGHWKDDTSPEAARAYFQHMKDRLAAEGWDLSVEKTKILMLSHSILAREQGYENIRSIYGQFNDPWLKKDDPHIKFLADQLEPACAAFEANRYGEMFEAFGSGMPRIRRHEDKIAWTNGMNVLIALRQTGTIGEIIDFIAAQPHMRLPAAVEQREAKLAEVGDEPVEGEPRRITQLRKLRTVHYTELIALDRFIDGHTPFATKHGVKGAEFENVMVIVGRGWNKYNFVQTLEWMDAAPPADKQDFFENNRNLFYVACSRPKVRLALLFTQLVSPAAMAKLTELFGENNLVALPPDPVVT

SEQ ID NO: 62946 - protein, 677 aa, Ralstonia sp. 5_7_47FAA; identical to SEQ ID NO: 62662

SEQ ID NO: 62947 - protein, 585 aa, Ralstonia sp. 5_7_47FAA; identical to SEQ ID NO: 62663

SEQ ID NO: 62948 - protein, 708 aa, Rubinisphaera brasiliensis DSM 5305
MKLIHACVSGFRRLENVLIEFDERETVFVGPNNSGKTSAAEVFRLFLKTGDFSVHDFSVSNVSEFDKYGRGEIDEKDLPSITLDLWFSLDPDTEFGRAGELLPDAEQDYNEVGMRIRYVVNDGAKLKQDFLARLTPGDGEQARKPLSYYLSMPGTLKQHYSLAYYALDNSTSEEVERPLKAEDGKRILRSLIRVEFVDAQRKIDDHENPGSTRLSKVFTRFYKRNLVQASTAEEANDIIDRHNNDLTGHYSAVFADLLTVIQSLGVPSVNDRRLRVTSALVPEKVLESNANLTYFDEQRGHELPESYNGLGIKNLIYLAVQICEFHLNWMSTEESRPLSLMIFIEEPEAHLHAQAQQTFITNAWKVIRDASVRVGEEEMTPQIVVTTHSSHILDTVDFGKVRYFRRCHCDGENAATTTTLNASVAMNLRSFRPTMQTPHAVDTETGEEDSEPMSEEKIEATLTFLKRYLKLTHCDLFFSDAVILVEGTVEKLLLPEMIDRVAPELKHRYLTVLEVGGAYAHRFASLLEFIAVPYLVITDIDSVVPTGSRSACRADTVGAVSSNATLKFFFRKSSIEELCDLEADAQEVSARRCFVTYQRPSPVNGYGDNATMHGRTLEESFTYENIDLFRSEKLSVGVDLTGDPDYEEEYQAVFEAIRASTFKKTEFALSVISSDADWVTPKYIAEGLKWLEAELRATVAADPEGAIA

SEQ ID NO: 62949 - protein, 613 aa, Rubinisphaera brasiliensis DSM 5305
MKCLEPTQADQEVLKCLREKRPFAMIAGAGSGKTTSLVEALKALDRLGGHRMLRDGQKAVCITYTNRATDVIRDRLRQNPLFVVSTLHSFLWGEIGHFPKSIREALRRSIIPAQIAKQKSKDNGGNSKAARIAREKAEELEKVLGQIDSVETFEYGDDSGYSDFPLGQIGHEDLLYIASDLFKNSKSFRRIIAQKYPYWFIDEAQDTSPEIIASLNELCNGNGLPIVGYFGDPMQQIYDTGMGNFSGPANFQLITKVENFRCSPEVIVLLNAFRDDVQQVPACKNASIEGSVAITLVKMEEPELPRKRYSDGQLERAQQKLIAAIDNWKWAANEDAKRLFLARRMIARRMGFLRLHDLFNGDFASNRAKSAFEKGEHFLLKPFVEVIVPLVKAHGEGDSNTIMRILTSRTRAFNSSGEHSGKAIREVRKIANDVTTTLAEKFESETLGQVLRYCTHQGLIRASENLELHLERSKREEEYDESQHGTEKTDWLADAFLEMKGTEVETYCSFLDDNTPYSTQHGVKGEEYDDVIVVFDDVEAAWTHYTFAKLLAPKAAGSPNDSQLARSRKLAYVCFSRAVKNLRVALFTLDPQAAAEELMAQGLFQKAQISIQA

SEQ ID NO: 62950 - protein, 357 aa, Lactobacillus crispatus CTV-05
MIRKSQEARGRSVNLSFQVLDDIKIEYPVVTIFALEEPENHISPHLLGKVMDKVKSITKLDNTQTIITSHSPAIIKRVLPENVRYFHLTKDAVTEVKKIKLPDDKGEKYKFIKRAVQTYPELYFSKLVILGEGESEEIVLSKIISSYTGLDEANISIVPLAGRMVNYLWDLLESLNIAHITLLDLDYGRYLGGKKRIKDIIDELKRFNPNDDELEKIENKCADLAENKNNLLDLTKQLEKYDVFFSFPLDLDFMMLAAFLDKYKGIASGSPKTKADERKKILDRTLKGKREEEVDYDKNDIELMRWYNMLFLGIGKPLVHFTALEDISEEELCNNLPEQLKRLLESVKNKLDKKNDE

SEQ ID NO: 62951 - protein, 620 aa, Lactobacillus crispatus CTV-05
MMNKDQWKPSNGIVLESNAKQAIFTNDNILVQAGPGAGKTELLAQKASYLFQTGLCPAPFNILAISFKRDAAENIKDRVSKRVGKEEGSRFISKTFDAFAKLIVDRFYLVLPKDLRPRPQYEISSNSTQTKIYEHVFGYVPDRNAVNDLLKVDLNDINPQSNNYKFWKYMLMGEEKTYLTFEMISRLALYIIQHNKYVRHIIRSAFPFVFLDEFQDTTVLQYDIFRECFLNSESKITAVGDNKQQIMLWAGADKEIFGKYTREFRATKVFLKENHRSALNIVKLQKLMYEKIDKDINPDIIINKNKDEGKVFLIETNEPSKEAEIVGENIIKEIRMGVKPSEIAILVKQRPEDYIRNIKEYLKTKNVTVRVESKYTETFSEPIVKLILKMILASINVINGQEWQELVDETSEIFLINLADAEIEQKYIKKLNVFLDKLFKNLLVQVHENRSKSNYYCKIVESIIDFFTINRLQVYYPEYLEIDQLNRTKTQFIEQLKECGSINELNTDIKEIWKEIIDNYLGKNSIATLTIHKSKGLEYNSVYFIGLEDSAFWSFSNQSESDRKAFFVAISRAKEKLYFTFCRGRQTVRNIYQTKKNIKEFYELFDKSGIVKEINDNNNS

SEQ ID NO: 62952 - protein, 686 aa, Marinobacter adhaerens HP15
MMSIGKMSMVDILCDRSVHGRSSCTQSLVVGKLPQSIKRYKDGLELIMKLHTMRLSNFRSFGQTPTTILLDDITYLIGRNGSGKTAALEALCRLFAFDPAQRRIQRSDFHVPIDEESESEERELWVEADFTFPELTEDEDNSTVAPHFGHMRLDEVDGIPRVRFRLNATMGLDGEIEENLVYVLDIDDEGNPLDVSQVPRSERRHIKLHYLPARRDPADHISYSANALLGRILRSIRWEEERETIKGLTTEISDSLIANPSVKAFSDALQASWETLHKGDFFTDPKITFVASEIEALLRHMSVSFSPGHDEELVDFSRLSDGQKSLLYLSLVFSSQAIGRKTLSEENASFDPDRLQPPVFTLIAIEEPENSLSPLYLGRIVTALNEMVADEDCQALIATHAPSMLRRVPPENIRYMRLGENRQSRVTHIQLPPKTDDAHKFVREAVQAFPEVYFSRLVILGEGDSEEIVLPRLLQAKGAPVDESSVSIAPLGGRHVNHFWRLLSALQIPYLTLLDLDVGRHQAGWGRIKYVNDQLKKFEPTKALPNWNLPKWNDSDLPVRTHHWFENNRDVFTELESRGVFFSYPLDLDFSMLLAFPEAYSVKREISDRPALQAVLGKNHHDASQYSEDEQSLFTSYHKHFKLGSKPAAHIQALANLDDNQLAQNMPQELNRLIDTVIAKLTELPE

SEQ ID NO: 62953 - protein, 554 aa, Marinobacter adhaerens HP15
MISVAEWKPADNLTLEPNAQKAATEQIHSLALTAGPGAGKTEMLAQRADFLLRSGTCTYPKRILAISFKVDASQNLRERVKKRCGYDLASRFDSYTFHAFAKRIIDRFRPVLEGNDALDVGFTIGDQKVPRKQITFVDLVPLAIQILKTSSIARNAVRQTYSDVFLDEFQDCTHQQYELVKLAFHNTPVRLTAVGDVKQKIMGWAGALEGIFLTFAQDFSAMPLNLYRNFRSVPGLLRVQNEIIKVIDPDSVMPDEQLEGDAGEILSTQFANSSDEASYLADTIKSWIETEELAPSEIAILVSKQLDLYAHDLIKALTARGIPFRNEQEMQDITVEPAARLIVDYLSCLYGKREPKAWIRLMKQLQPFADDDVQSEVSRSLDSFIRKQRKAMAGQTAEQRSTEWWEPAKLFLQHVGIETVAALSPEYESKARLRDVITDTKNRISELSQSTSTLEEALDRFSDDESVRILTIHKSKGLEFDSVIMMAIENEIFFGNQDENRCAFFVGVSRAKRRLVLTNAKLRPRPENHGGMWREHRSPQSEYLSYVEPFLTEH

SEQ ID NO: 62954 - protein, 685 aa, Caldicellulosiruptor hydrothermalis 108; identical to SEQ ID NO: 62644

SEQ ID NO: 62955 - protein, 641 aa, Caldicellulosiruptor hydrothermalis 108; identical to SEQ ID NO: 62645

SEQ ID NO: 62956 - protein, 690 aa, Listeria monocytogenes serotype 1/2a str. F6854
MYISKVKINNYRSFINTEIDLNEGINVLIGHNNAGKSNLLKALAIVLGSTSKKMSIHDFNKDIKLEKLKGGPPRITIEIHITQSTNEDLMGDDLVTVSNWLTKLEEPYEAKLQYEFFLPVTEHDNYLKKISNAGNSEDAWFIIQHDFLRLYIYKIWGGNPDNQITADSESLNRFDFQFLDAIRDVERDMYSGKSALLKDVIDFFVDYDIKSNKEITLDEQTRQINVRKEAFKVNADLLLKSINERLTKGKNEILSYTDDIGASFNNSYPSFDGALTENELYSVLNLIVEQESGMKLPIAYNGLGYNNLIFMSLLLTKMQVNSDGNYLGSNAKVFPVLAIEEPEAHLHPTMQNQFIRFLQQNIKKRKVKQVFITSHSTHITANIKLDDIICLYQEQGITKIAYPGKVFTTKDDEENIIPQENSKKYVQRFLDTTKSNMLFSEKIILVEGLAEQLLLPVLANYHGTSLEEKHIAIIDVGGRYFNHFLYLFEPNNSFSLKRKVVCITDIDPTRKKKDATGESFKKCYPYEVNADKINYEYQWNQALKMHIGADNKYIQVFSQEIGIGKTLEYQLAFENPFCTLLITPSMVNTEEIEKLMTNYHTSSFEELSQILSKTNENSRIIDGLKQSSQTWNEDMKKRALIASRYLNSVSKGANALELSSILQDNLEEKGTEKYVDFKVPKYIVEAIDWM

SEQ ID NO: 62957 - protein, 588 aa, Listeria monocytogenes serotype 1/2a str. F6854
MLKQLIGCDSILIIDSKTIIKPNLEFKIEAGPGAGKTEWLIAHIINVVQNSDILFSTRKVACITYTNTAVETILSRLGTSLSNRVEVTTIHSFLYRYVVKPYSSFIPEKYRVNISELNGHEDPFISYKHLKEWLADDSFDKLKHPSTKKQLLYNEQNYALRNWLLSMKCTLTESSAQFQCENSKAFYEGKRLISNANLNILNAELINYKKLYWASGYFDHEDILFFSHILIEHNPFILKVLCAKFPYLFIDEFQDTNPIQSFFVTKFRESGGIVGVIGDKAQAIYGFQGSDSSQFENFPIKEHCSYKILDNHRSSTDIVNFLKVIRTDLEQINCVKTQSDKVIIHVGSRFESYNYLKKIVENENLVSLSRDNITSNAMKTKIEGNSLNKKILKNYREVDSNNDRKRSIEAYIQAIELANNQKFKEAIKIIENLYKNQKNSKKKSLKNLIGMLKKNSIYKEATLKIFYDVLKEVTEEKIPGFRKGAIEKFYNITNYVDIAICMNIVDDNSNHITIHKSKGAEYNNVCVIDNDNLLKMLLNPDLTNEEHRIIYVAMSRAKKRLFIQLNDLTSADEQKLKKIYNVEIVRLN

SEQ ID NO: 62958 - protein, 675 aa, Bacillus thuringiensis serovar israelensis ATCC 35646
MLLKEIIIKNYRKFKNESFSMADDITLLAGANNSGKTSMINLMGSIMQSGKTPFCISDIPVKLSKKWVDEVYEIFVRCFDEDVLSTVEMIVHELFGDELSSLKGDLIIPATLIRFKIEYTETDDIRKFADFIMDLDPDNKNFYFEYLFQPTRKSFREALEDNYNKLYARYKKIKSLEGSSSKVQQFKEIILSIYEASIIEKCYFSDRNYIDKVEIDVSIFRRLFNYKYINAGRPLDDQSNGNFKSLSKNMIELATHNSNLNTLLEELPDQILSPIQDARIIEEVRSASVRNLSNTVKTISKASGGNTGSMILDIDINEETITSLLNQITNTKYQYEGYILDEASQGLGYSNMIYILLQLETYQRKIDPLVVNLFVIEEPESHMHPQMQRIFGKHLKKYYLQKKIQGLITTHSGEMVRLTEMKNLRVSRPLNHLESKIYDFSIFKESLSGDITLDTFYDWFYEIGFSEIVFADRVILYEGDTERLLIRKLLTLDAYEELNQKYIAYVQVGGAYAHKYSKVIDFLKIKTLILTDLDYKKGAVTVEAVKESNTTNATINSYYNDSKGTDLPTVLDLYKWKENGENNMFGGLALLSYQGQAEQYARTLEEAMLSKFYNFNVLEKKIELFGFKEGILINLNILFRTLLNQMKIIQIQITNIVLGILLNIQKIERLILCTH

SEQ ID NO: 62959 - protein, 602 aa, Bacillus thuringiensis serovar israelensis ATCC 35646
MATEIVENMFCVNAPAGSGKTTKIKSMIVNHKIKHPIDNILCITYTKRAAEELNKDFNEEGIHISTIHSFLHKFLKIYFCKTEMKDLYFEMFEDLIKESIENKEEKEHIVTRNQKYIEKHGCLSVESIKANIDAIYYNESSNNHLYTGGLAHDSLLLFAEKVFDKFPKIKMRLTQKYQSIFIDEYQDSAASVLRMFYKACLNTKSNLYFLGDKMQQIYKNYDGSFEEELKTLNTDIKLDINHRSIPDIVSVLNNIYNDKGFKQNPSKKNLDIKPDHPPRIIMCDNIQERLKRECSIYPDALLLFLLNQQKFASIGARELYKQFSHLERYSHAKQLSATDVLSDNTSENTDPLLKLLFIVGEVVDYYKKSNVGSIIQIFKANRKLFDMGIGTITSHRDRIDLTKLLKQLYEDYHKEISISEFLTLLRGCNLFKSSYIDNMGDEYLEVLKVKLNEFKALSNYLRNPAVSTQHGVKGESHNTVFFIAEDSFRTPIVHMHKFLKLWTIKELTLDSLESFYYDYNKWIEDTISHLGCKISDLNKESHNEHKIYLKTRVEQLCKHFEADFIFKDLCEESYSKYILNPNVTNIKKCFKESTVYGVPSGL

SEQ ID NO: 62960 - protein, 572 aa, Yersinia mollaretii ATCC 43969
MKIDYVYLHQYRNFAEAYINLAKNSLVIGSNDVGKTNMIHALRLLLDKSLSEADIEPTARDFHCGQNGMQADYFMIRVAFSEVTQDAVLSQLKGFVSATGHFFLEFRATRANHSYEIAAGYDLSAMEVIPSRHYLKHLHLKYIHSQRDLVRYIRSEKRHLLRLAQESRDDAQVDADAIQLQTLARLLESVNSGVKNLHYVAEATRDLNDELQALSHHHMGYNVSLDTGAIGIEQFIEQLELGASTNGSRVMLGGDGRNNQILLALWKAKSVLEHDQDSEVVIYCVEEPEAHLHPHQQRKLASYLISALPGQTIVTTHSPQIAASYHPNSIVRLLRSNGASRAASQGCSDCINSAWTGLGYRISILPAEAFFSSAVMLVEGPSEMLFYAALARAHGYDLDHSNVSLLSVDGVAFEVYKRVLNALEIPWAARTDNDISDILIGPRGAQEVRRNLAGMNRALSLAGMPPQPHRSQTYDHAASLADGTWQTVSTSVAPHGIFLSQIDLENDIAAELPTLLNGFKGHELIQAIAYMQGKKAIRMQEFVEHCGPQLRVQINGHLLKPLLHCIQAAAQV

SEQ ID NO: 62961 - protein, 542 aa, Yersinia mollaretii ATCC 43969
MATFTPSAEQNQAIQYESDMVITARPGSGKTSVLSCKVRNMVSELRPYQGIIAISFTNKASDELGRRCRADAFDVKSSFFGTIDDFCLREIIFPFARQLMSAAAEVKTVKIRELPDSVTRMLPVTPLKDGSVTNTIKFLPFIQQALALGFVPLEAVGMLAHYVVGRSLACQKYLVARYRAVYIDEYQDSGYFQHQLFQKLKELGLTAVAVGDNDQSIYAFAQKSPKHLLALTAQGSGFEHFSITTNFRCHPSINDFALRLLNPNHPITPTDNMRVLIKTINGDQRAMGLWLETAIPHLVDHYQIASAERVAILCRHQHSAKLIANHLRLSHRLVEDNPFEAAPTTEATLFSDLLKLRYDPRMTAESLIDRAGKLNRTTQELRALRRAILSCRSCLDGDLIVRVLAAAASLLRQQPSPVAVTELESVCGDTAKLRWFQRPSDNAVQIMTLHKAKGLEFDLVFHADLYDHVIPTRLYPPGTFGQVIFENETQCLNLHYVGVTRAIKACVLMTSNYRINGQGNVKNGDPSQFIGRNGAIATPIIW

SEQ ID NO: 62962 - protein, 634 aa, Yersinia intermedia ATCC 29909
MELEVIRISGFQSFGPELTEVSLENITYLIGPNGSGKTATLQALCKLFAFNPALRRIHRSDFHVPYDEEEVPEERQLWIEADFLFPELDEEDDNSTVAPHFSHMRLDDPRGLPRVRFRLTATMGLDGDIDENLVYVLDVNADGSPQNTAQVPRAERNHIQVHYLPARRDPADHITYGANALLGRLLRAVHWDAERDTIKGLTDQISDSLAANPSVNAFSESLKTTWATLHKGKFFADPKITFVASEIEALLRHLSVSFTPGHDGPLVDFSRLSDGQKSMLYLSLVLSSQAIGRAVLAEEDVSFDPDKLRPPVFTLVALEEPENSLSPHYLGRIVNALNTMTKNVDAQALIATHAPTMLRRVAPELIRYLRLTEARKTRVNCIKLPEKSDDAHKFVREAVQAFPEIYFSRLVVLGEGDSEEIVLPRLLQAKGAQVDESAVTIAPLGGRHVNHFWRLLSVLQIPYLTLLDLDVARYAAGWGRIKYVNDQLIVHEPEKKLPEDHGIPIWNSDTYKVRNYPHYFNLLEKRGVFFSYPMDLDFAMLLAYSKAYKVVEEEPDASTLKAVLGKSHYDSSQYSENELKLFSTYHQSFKLGSKPASHIDALAMLNDEELLENMPESLSRLADGVIAKLKELPE

SEQ ID NO: 62963 - protein, 545 aa, Yersinia intermedia ATCC 29909
MEPNAKRAAKARKRCLALTAGPGAGKTEMLAQRADFLLRTGTCRYPKRILAISFKVDASRNLKERVERRCGPDLASRFDSYTFHAFAKRIIDRFRPVLTGKNALDAGYTIVDKKNGPSRTQIEFGDLVPLAIQILQTSKIARNAIRKTYSDIFLDEFQDCTNLQYDLVKLAFQGTSLRLTAVGDTKQKIMAWAGALDGIFQTFANDFNAVPLNMYRNFRSKPKLLRVQNEIIRTLDPDSVMPDEQLDGDEGEVYAYRFEDSCKEAIYLADLINSWINSEQLPPAEIAVLVSKQLELYADHLMIELEVRGIPYRNEQQLQDITIEPAARLIVDYLSCLYGKREPKAWIRLMNQMIPFADEEIQSSAKKDLDQLIKKQRKKVSDARHTDSPFSDWVQLAIEFLKYIGSKMLVALSPDYETRSRLNDVIHETFARVKELLKSEPDFPKALGRFADDQAVRILTIHKSKGLEFDSVIIMAVENEIFFGNQDENRCAFFVGVSRAKRRLILTHADHRERPANAGRWNISRTAQSEYFSYVTPFVAGKNLK

SEQ ID NO: 62964 - protein, 609 aa, Streptococcus suis 05HAS68
MTIWENIKKVAYTPDSELEPILGINLQIWIQYSEEDSYQNIQPLMMDLNPDNNYIILDFSYIVPISRLHDLNTEISNFSDDFSKFESFMKKSMSKFFEMQINSRGYNPDIQKLTEEKSDLLEMKDIHKLIKIRGIRANREVSNKENNHSLSKTSNLFYKSNNGDDIDNATKNLLQSAITEADEALTKAYSGDGEDDGVFTSIFERVKKFGGNDSESELEIHSSLSEKDILSNNTTLYYRHDDSLLPETYNGLGYLNLYGMIFEIETLMADIKNNPADINLVYIEEPESHTHPQLQYVFIKNIKGLLKEHDDELKASGYTSGIQTLITTHSSHIVSDCNFDDLIYFKHDNGTAISKAFNSLKEEYEDDKLGYRFVKQYLTLNSSELFFADKVICIEGDTERILLPTMMQKVDIATPIEQGSNIMPLLSQNISIIETGAHSQVFRKFFDFLGIKVLIITDIDPVNKNEKNRFIACSAVNATSTSNTSLKSFFNISGDGIFSTVTQKSFAEKITPDNRIRIAYQIPEDNNGYQPASFEDSFIGLNKEFIIKQKDGLIEYEALKNFDDDEIEDFYTFARNKVNKKSAFASSLLYFEDEENTWKVPKYISEGLL

SEQ ID NO: 62965 - protein, 597 aa, Streptococcus suis 05HAS68
MIEEPKKSIVCITYTNNAVAEIKSRIINDNLWVSTIHEFIWHIIGNFQKEIKECLVELINDDSQKLFVSPKDVIEEESISLDYFDDVRVDYAEWYSMSITEQNKVQISHDHILIVAEKMFSKYKKLCDVLADTANYIFVDEYQDTSPLIVKILLEHLQKSTKKNVVGFFGDSMQAIYDSGVGDLNSYNLAKIQKTQNRRNPKKVIDLANKVRNDGLVQTPSNDDTAPNMDDGSVIAGTVKFVYGNDINQLDVLRNSKLYKALEFDIAKKTKELRLTHKLNAEMAGFSKLFELYNTDLFVKLITGIKKKINENKIADKGKTFEELVEEAKIAVGKGGPLIIDVVNSIPELLAFYDEIKTCSFEEVSNKSKVNKESLLAYKFNGLSSRYEAGTDRDRILKRLDLIYELLELYKTGKHNEFLRITKFNITSSEDKISLSKVMTKISVDDITIGKVIELAEESGLISKDDLFTNFIESRGHYLWSRLKIMPFQEYVNSIAYLREYVSVITQHKVKGSEYDNVLVLLDNGKWNQYNFDSLFGKGSVNENVQKRTKKLFYVAITRAMKNLIVYMPSNDSQIIQKAQDYFEPIDIIDVLSLVDE

SEQ ID NO: 62966 - protein, 690 aa, Listeria monocytogenes F6900; identical to SEQ ID NO: 62956

SEQ ID NO: 62967 - protein, 474 aa, Listeria monocytogenes F6900
MLKQLIGCDSILIIDSKTIIKPNLEFKIEAGPGAGKTEWLIAHIINVVQNSDILFSTRKVACITYTNTAVETILSRLGTSLSNRVEVTTIHSFLYRYVVKPYSSFIPEKYRVNISELNGHEDPFISYKHLKEWLADDSFDKLKHPSTKKQLLYNEQNYALRNWLLSMKCTLTESSAQFQCENSKAFYEGKRLISNANLNILNAELINYKKLYWASGYFDHEDILFFSHILIEHNPFILKVLCAKFPYLFIDEFQDTNPIQSFFVTKFRESGGIVGVIGDKAQAIYGFQGSDSSQFENFPIKEHCSYKILDNHRSSTDIVNFLKVIRTDLEQINCVKTQSDKVIIHVGSRFESYNYLKKIVENENLVSLSRDNITSNAMKTKIEGNSLNKKILKNYREVDSNNDRKRSIEAYIQAIELANNQKFKEAIKIIENLYKNQKNSKKKYVKKFNWYVEKKLYIQRSNIENLLRRFKRSN

SEQ ID NO: 62968 - protein, 690 aa, Listeria monocytogenes J0161; identical to SEQ ID NO: 62956

SEQ ID NO: 62969 - protein, 577 aa, Listeria monocytogenes J0161
MIIDSKTIIKPNLEFKIEAGPGAGKTEWLIAHIINVVQNSDILFSTRKVACITYTNTAVETILSRLGTSLSNRVEVTTIHSFLYRYVVKPYSSFIPEKYRVNISELNGHEDPFISYKHLKEWLADDSFDKLKHPSTKKQLLYNEQNYALRNWLLSMKCTLTESSAQFQCENSKAFYEGKRLISNANLNILNAELINYKKLYWASGYFDHEDILFFSHILIEHNPFILKVLCAKFPYLFIDEFQDTNPIQSFFVTKFRESGGIVGVIGDKAQAIYGFQGSDSSQFENFPIKEHCSYKILDNHRSSTDIVNFLKVIRTDLEQINCVKTQSDKVIIHVGSRFESYNYLKKIVENENLVSLSRDNITSNAMKTKIEGNSLNKKILKNYREVDSNNDRKRSIEAYIQAIELANNQKFKEAIKIIENLYKNQKNSKKKSLKNLIGMLKKNSIYKEATLKIFYDVLKEVTEEKIPGFRKGAIEKFYNITNYVDIAICMNIVDDNSNHITIHKSKGAEYNNVCVIDNDNLLKMLLNPDLTNEEHRIIYVAMSRAKKRLFIQLNDLTSADEQKLKKIYNVEIVRLN

SEQ ID NO: 62970 - protein, 690 aa, Listeria monocytogenes J2818; identical to SEQ ID NO: 62956

SEQ ID NO: 62971 - protein, 588 aa, Listeria monocytogenes J2818; identical to SEQ ID NO: 62957

SEQ ID NO: 62972 - protein, 595 aa, Comamonas testosteroni KF-1
MRVSRVRLINFANFSDVDVETGESIVIVGENKVGKSNFIRGLQLILDPGLSERDRQLGLEHFWDGLGEDKVGATIEVSVDLTDFTNDPRLMAHLNDCVIDPGPPMVARLTYRFQPKAGLGRAPESLKDYEYVIFGGDDPDMRIGGALRRMLPIDVQVALRDAEKDLASWRNSPLRPLIEDLAASLDDDAREEIQDQVDQAQRELAGHEEVVATAERISERLIAIAGGQHAVPVSLGLAPTRVDALLRSLRLLIDNGVRGVGDASLGTANLIFLALKSLELDRLVSDGERDHTFFVVEEPEAHLHPHVQRLIYRYFLGTGAEDGEEQPPLTTILTTHSPHIASVAPIRSIVLLRHDTAEGKTVAVSTANAPFTQRDEEDLQRYIDVTRGEIFFSRGVILVEGDAERFIVPAFAEVLDIPLDMLGITVCSVGGTNFTPYVKLLGPEGLNIPHVILTDRDPTNGNHPLVRRRLINVLDVIEGGVDHENLDADEVIELAEQYGYFVNENTLEPELFAGGLAQDMQEVIREELPRLRRETLNALQQWVDDPDQVDEDWLLRLIERIGKGRFAQALAPSVSQDVCPAYIRSALEHIRDAIA

SEQ ID NO: 62973 - protein, 497 aa, Comamonas testosteroni KF-1
MPYGRLAGLPISFPLSVATQRVSDRLLKQTGDALFGQNHPYKVIDLGRHRRSVLNRNSVAWRSEEELAAWAETYEAALRDEGLIDYDDMVVFGQRLIAEHDWVLPLVQAKFPVLAVDEYQDLGVALHRIVKRLAFDGGVRLFAVGDADQSIYGFTGADGALLMELAARRDIEPVQLQLNYRSGAGIVTASEMALGEARGYQASDPARQTTIEFVLRPGGTADQAAHAVAQIIPAALASKPGRTLGDIAILYKDYRAGDIVAKAVATGGLDYIRVDTAAPYRKVALTSWVEDCAAWCAGGWRVGRPQLRGLLDRYRAFHRASLDDSQAKREEQELTALLWELRADQQPAREFVASLRNGVVDHLLAAELALADQKEQLDRMTAALAEGGALASLDITSLGGRDGSPDHLNLLTLHSAKGCEYDVVIMVGLDLGNLPWRNETPEKLRESRRLFYVGLTRARDEVHMLYSGFVDGRYGPMRFGRSPFLDELEARMRAAGI

SEQ ID NO: 62974 - protein, 423 aa, Nodularia spumigena CCY9414
MKVKRLKMQSFRGIGDLTLDFNQNEPTILIGINGVGKSSIIECLAILLSRFTSSIQHSTPSGRLFTEEDITNGEKETHNEVNISFDSEEITWSLTKVKKGRNKDTSSNLSAMTKVAENIKENLHISHIFNIPIVVYYSTNRAVLDIPLKIRTKHSFEQIDAYENALTGNAITGLGSEFRIFFEWFRRQEDLENELRLENNAAYRDKQLEAVRQAISSLIPDFSNLRVRRSPLRMTLQKQGEELIVNQLSDGEKCLLAMVGDLARRLAIANPGLPDPLQGSGIILIDEIELHLHPKWQRGIIPDLTRTFPNCQFIVTTHSPQVISDVKPEGIYLLEKTDQGVIAKQPESSFGRDSNRILEDLMDVPERPQEIKDSLLELFRMIDAGNLESARNLRQQLANEIGIDEPEFVKADVLIRRKEILNR

SEQ ID NO: 62975 - protein, 774 aa, Nodularia spumigena CCY9414
MTTTIDFLSHLNPSQRQAVEHYCGPLLVVAGAGSGKTRALTYRIANLILKHGVYPEHILAVTFTNKAAREMKERIQRLFGEDLAMKKHGQKFDLLTEYQQMQLRSQVYKNTIKDLWCGTFHSLFSKILRFDIDKYQDEKGRRWTRNFSIFDESDVISLMKEIVNKQLNLDDKKFDARSVRYAISNAKNQGFSPQEFEREQPNYRGRVIAQVYNCYQEKLAENNALDFDDLILVPTRLFQQNDQVLDYWHRKFNHILVDEYQDTNRTQYDLIRLLVTNGEESKSAWEWQNRSVFVVGDADQSIYSFRMADVTILLEFQQDFGDGLADDDTRSMVKLEENYRSCENILQAANELIENNTQRIDKVLKPTRGSGEQIYCHKADNEIEEAEFVIGQIRNLAQQNPELDWGSFAILYRTNAQSRPFEELLVRYQIPYTVVGGMKFYDRKEIKDIIAYLRAIANPADTVSLLRVINTPRRGIGKATIESLVNASYELGTPLWEILSDETSVNTLAGRSAKAVNNFAKMINTCKAQAARVPVSELLQELLNESGYIQDLQNQGTDEAEDRIQNVQELYNAVLQFQEESEDVSLTAFLQSSALSSDLDNLKDGQKAVSLMTLHSSKGLEFPVVFLVGLEQGLFPNYRSINNPESLEEERRLCYVGITRAQERLYISHARERRLYGSREPAMRSQFLDELPEELLNTRNKGRHTQTKTAAKAGGKPYTPHNWQVGDRVLHKSFGIGEITHVFGQDNKVSVAVKFASLGQKIVDPRIAQLQRVD

SEQ ID NO: 62976 - protein, 585 aa, Streptococcus pneumoniae SP6-BS73
MEFKKLVIENFRNFSSIEVALSNKNVIFGMNDSGKTNLLFAIRYLLDRTIRNKGFIKSDYHRHDTSRPIKIQLELDLSDRKMEGDEESLKSSHSRLLISTVAGARNNSSLDTFFISLEAVYNEKELFGNPVLSWGSTLDNLVEVPQYGTRSDIDKIFQIVYVNPAIELDSFFKRNRRILFSDDSKTDEDVKLEEEIENNIEKLNENISNLHLITSVQSQLTEAYKSYRKENLEIKIQSEISISGYLDNLTPYINWNDDTHNYPTSGDGRKKLLSYAINHLISEKQYNKKVIIYLIEEPENSLHRSVQISLSKQLFVQNIYEYFFLTTHSAEVLYEMDNTQLIKITNQQDATGQSVYYTVPNEFSNLKKKLNKSLAQSIFYDRILLVEGPSEYYLFSAIFEYVSPNFEADGKYLLQVDGINFKPYSELYKALGIDFWIKTDNDLKASRGDKHVFSPIGLNRCIDLLDHSATPILDNYRIDFSSKDERKQNIKSKKEELYLTNHNLVLQLNADGIFISEIDLENDLAQVLSDSERNEMSKLDFVNWLQSSKQYNMLEYISNHLTKEIALKIVESGYFKVLAEFLDYE

SEQ ID NO: 62977 - protein, 512 aa, Streptococcus pneumoniae SP6-BS73
MSDIATQDKNVKKELLEYQGNILILANAGSGKTTFLTKKLKSDSKRLNNYQKLAAITFTRNATEEIKQKLVDIPDNVVVSTIDSFLDKEIILPFLNQKYEIQTSVQFSFRIDHNFSDYSTGIKQILQDGIFGTYDFPTSKHGKNFKCEVALDILKTIDSASEYIKYKFNTLYIDEFQDCDQSMNDLFLYLKNELGIPLFIVGDDKQSIYQWRGASPKYINNLWKNKNDFRKKRFIGNFRSLPRIVDFSLALTPEVTVDNIREEGSILYLEPNQDYPKEDIIKYLIDNGDINLQEKNYFLIGINKDIEETATHLNDILSNKVDYVRKNPFIDCTNSNFLQSMAQYYFLEDFSEYDVLNNLFPEYNDEFRKELLKKLKRLRQRPTQSLIEEIASYLDVSITNYEDKLESQILLEILSNLDNKKMFDTNLMSNNLLMTTHASKGLAADTVVIFVEYLIDWRTGLKFEDHYVAITRAKSKVIIIDNRTIYTSEINRLLSNNNGNFSFEDFIERRYI

SEQ ID NO: 62978 - protein, 696 aa, Bacillus cereus H3081.97
MKLTKVKICNFRSFHKERTIDLEDFTSIIGSNSSGKTSFFQALLKLFGETSREREILRSDFHVPSHIDPNALTENHFFIDVTIEFPEVISEDSIAKSTVPPFFGNFIIEEGGKAPYIRIRQEATWQKSNQPEGIIESNVFFVTIGHGNEILDVHKKMISKAYLSLIKMIYIPALRNPNDQLKMVSGTLLWRLINRINFEDQFKEDISDQIGSIHEIIDKQKGLSKLKEIIRTEWKKYHNESRYVNVDLNFNTNNIEDILKKIDANFSPTEVGKNYTVDALGDGLRSLFYFSLVGSLLKTEEVTLMEISDNPSLDINDRTFSNTPPLLTLIAVEEPENHVAPHLLGKIVSNLRGISEGGNSQVILSSHSASIIKRVDPVEIRHFRNSKEDLGTVINKILLPSKEADEYKYVKEAVKSYPEIYFSSLVILGEGDSEEIIIPRILEDCDLDIHTHEISIVPLGGRHVNHFWKLLTQLKIPYITLLDLDIERHGGGWGRIKYVIDQMLLNGTSTEELFHLKEDQTFDLNTIKGMYNWDLGEEHRNLDILSKWVKLLESHNVFFSAPLDIDFLMIKAFKVNYLETLNSNEGPRIKIGEVQKKISELEESDMQTKEYEDRISHDVACTLKDIAKIGKYYEEIDKELMIWYNYFFLNRGKPTTHILALNNLDKKTFLEKLPTVFNELIKAINKQLIVGGEESE

SEQ ID NO: 62979 - protein, 631 aa, Bacillus cereus H3081.97
MNKFLSPTEWFPVENMVFDETTLELIKSNQNMLVSAGPGAGKTELLAQKAAYLLQTNTCENPQKILALSYKVDAAKNLEKRVEERIGKELSKRFVSKTYDSFAKSILDQFKNLLPPFYQLASKYEVASNEDITNAYNAVKLPSDFKLNDFYKYTYLTESRLPIIDTPYGDIARSVWPIFLRGNQHLSPKLNFKMIARLAEFIVKNNLLLQKSLQLTYSHVFLDEFQDTPAHHYDLIETSFKNQQVITTAVGDKKQRIMLWAGALQNVFDRFKADFSAEEKVLVINHRSAPKLIELQKPMIRELVGEEIEIKHSERWESGQGEVELWRFGNESEEATFICSKIKDLIEKRSIAISDICILVRQQPEIFAKEILAYFNKNGIDVRVEDEYQILLKEELINLFISMIMLSQKKQAADEWIFITDTIKKIHGFSIMTSTNKIYELEMKVSSFIEQLNKELTDIKEFKNFKVVVEHICDFINIDLIRLVYSHYTKGYIEDLIEKFSRLLWKEYERCHEWVLAIERFMGEHSIPIMSIHKSKGLEFKIVILVGLEDKAFWGIKRDPGAELCTFFVGSSRAIESMYYTVTDKRNGRINSIKNIKTFYNLLSESKVVRGYNFSIGKHKVDEYFTTPSNS

SEQ ID NO: 62980 - protein, 662 aa, Clostridium butyricum 5521
MKSPYISKVILKNYRNFKDCTVNLSHKGVIIGENNVGKTNFIKALQLILDPSLSEETRCLSKEDFFDGLEDPFENNLEIIIEVFLSDYEENGNIVAQLDDATVNDDGEKKLKITYKYYPIESDNGNIDYGYTIFKGDNEEYKFTYEDRKYLNIKVIKAIRDVEREINNSRNSPLNRLIKNYCIEKNELKQIADNLSENSADILQLDEILDISKNLNNSFSNIIGLDNDLEVSLKTMNIDPNKILNSMKIMLANREAEDVSLGLNNLLYISLMLLSIKDNTIPTFLKKDRYEKLLQCDGSDILSKSYEKNKKENYFLKDNLLEEGEKELYKFMDENDPSDGGVTILVIEEPEAHLHPIYQRLIYKDVIKKNDNSVILTTHSTHITAIADIKSIVHLHKRNSGETEINTTASLDLSGPELLDLERYVDIKRGEIYLGKGVILVEGIAEEFLIPKFAEIMGKSLDEIGIIVCNINCTNFKPYVKLLMQLDIPFTVITDGDFYIIKEGEDKKQFHVLDSISEDEYEKCGYLGIENIETLVKDLRLTSKQIPADISKKDELFNELGLFVGNNTLEVDMMNSAAENEEALKKICEVFNMLTEGGTKQQSNFKNEIENEGYWKCLKKIEGNGIGKGRFAQTFTSRVMEEHIPQYIKDAIEYIYDKVRKY

SEQ ID NO: 62981 - protein, 600 aa, Clostridium butyricum 5521
MSYYKDKLEQIKRDSYQYDAYNSEDSTVVIAGPGSGKTTVLTLKIMKLLNEKIRKPRGLACMTFSKEAAREFKDRLIKLGYTGRKNVFLGTVHSFCLKEVLERFAHLYSYDIPLPIKIISDKDKNKLFNTIVDDLNLGNADIKIGDMDKERTLNISGISSVEIESYDVALKVAIEYEKRLYAKGYLDYEAVVKFATILIQNEQYVRKSLSKRFPWILIDEYQDLGRPLHEMILALFTNTNIKIFAVGDPDQSIYGFTGAIPDYLNEIYSKDDIISIELKNNYRSNQDIIDASQMFLKENREYKAKTRLREQADFNFVVCNIGIEEQYMQCIQNVIPKYRSKGVTFEDIAVIVQYNRHAKELASICKEENIPYYIAKHDYDRSDFIIWIEKCAAWVTDNTTQSFEEIFDFWKNLINRHCVSKINSQNSIFEKRNLLKVLKSSKVYSDKLEKWVKFIINTLGIIDLFDKSIIYPEEISNIDKFIKVIKESGYSNENIKLFSKIGKPENQITITTRHSSKGLEFEVVIILGMEEGNFPDYRSVTQRQIEEEERICFVCISRAKNACVLVRSEYYDIPTKRGLWHKPMEESRFWTKLYNRYIDE

SEQ ID NO: 62982 - protein, 579 aa, Clostridium perfringens C str. JGS1495
MKFKSLEIKNFRNFECININLDNKNVIFGMNDIGKTNFLYAIRFLLDKDVRKNRFVQTDYHRNNIENNISITLELDISDFDESEDTKNLISQAGDVRSSKNHEKFYIRVIGEYNSKEAFGEPKLFWGDDIESLKDMTNNGYSFKIDNIFQVVYINPLIDLDKIFIKNKRILMDESNSSEHDKNIMEEINNLTKEMNTKISSMSMIDNLQKNITKEYLGLRNEDIEIEMKSEMAIKGVFSDIVPYIKKKDDDKYYPTSGDGRRKILAYSILNLLNNKIYEDKIIVYLIEEPENSLHRSMQIALSKQLFSEDGYNYCFMSTHSSDILYELDKSNLIRIYSGEKIECKSHIYNIPTEFKTNKKKLNKHFCNALFSERVLLIEGPSEYVLFEKVMNEINSNYELDGGYILQVNGTYFKTYFDAFKDLNIKIIVKTDNDLRASTAKNSDSEYELLGINRCLGLIGEEKKQNIKIAFEKKGAAHKKSKLKEEKRKCFENNKISIDKFEENSIFLSEIDLENDLAQVIGEKIQSILGCKKTKIVDVLQSSKLYKMVELVDGLKKDDCEKIYESRYFKCLKELNNER

SEQ ID NO: 62983 - protein, 495 aa, Clostridium perfringens C str. JGS1495
MKDNEIREEILSSDDNMIILAGAGSGKTTLLTNKIIDYVEKTKTHYKIAAITFTNKATNEIKLKLKGKINGNFIGNNDSFVEQEIIRPFLNDAYGEDYSNDFIVTYKTNKFNFYNEGLKVLKDKNILASYEDNKKNFKFELALNILELSKVARQYIKAKYSRIFIDEYQDCDKDMHNLFMYIKELGVKLFIVGDTKQSIYSWRGANPKLFEEIYIGDNDFKKYELFINFRCSKGIQNYSNIIQYRNIDKYQDNNEDIDDVILLSNNYDINDAVNTLDIEESIAILVRSNAEAETIKNELNLQGYNFTFVPKTPLDELSTNNKNILIELAKYSKDKVYTHYDFVSTLPGDFSRKEILSIKEIIQPLKLNLEKDKIEDILINLFAFLNLSFFETKEIDSFVESIINTRYENAFNGEEFIHKVMTIHSSKGLEFEQVVICSKNYNLFIGKDSEEHYVATTRAKKKLVILLNDTLYLKKIKCICRDTGLILEDIAKFID

SEQ ID NO: 62984 - protein, 641 aa, Salmonella enterica subsp. enterica serovar Virchow str. SL491
MKLHSIRISNFQSFGAEPIELTLENITYLIGPNGSGKTAALQALCRLFAFDPSLRRIQRSDFHVPHDEQEAPEERQLWIEADFVFPELEGEEDNSSVAPHFSHMRLDDPDGIPRVRYRLSATMGLDGDIDEAFVYVLEVGPDGSPINPETVPRSDRNHIQVHYLPARRDPTDHIAYGTSALLGRLLRAVNWENEREKVKGFTDQISESLAANSSVNAFSSHLKKIWGTLHKGSYFTDPKITFVASEIEALLRHLSVSFSPGHDDNLVDFSRLSDGQKSMLYLSLVLSSQAVGRAVLAGEDDSFDPEKLRPPVFTLIALEEPENSLSPHYLGRIVNALNSMTSNEDAQALVATHAPSMLRRVDPEHIRYLRLTETRQSRIKKIQLPAKTDEAHKFVREAVQAFPEIYFSRLIVLGEGDSEEIVLPRLFQAKGAPVDESAVTIAPLGGRHVNHFWRLLSELQIPFLTLLDLDVGRYQAGWGRIKYVNNQLGLYQPEKVLPTTFSLSDWNDDKVPVRTHHFFENGTKSVFLELETRGVFFSFPMDLDFSMLLAFPNAYGVQQEVSDESTIKAVLGKSHHGSYQYSGDELNLFSTYHKLFKLGSKPAAHIDALAQLSNEELLANMPGSFGRLADAVIAKLAELPE

SEQ ID NO: 62985 - protein, 553 aa, Salmonella enterica subsp. enterica serovar Virchow str. SL491
MIAVDAWLPSDGLTLEPNALLAAKEQARCLALTAGPGAGKTEMLAQRADFLLRTGTCRYPKRILAISFKVDASKNLKERIQRRCGQELASRFDSYTFHAFAKRIIDRFRVVLTGNDALDTDYSIGERKVTRRQITFHDLVPLAIQILKASVVARNAIRQTYSDVFLDEFQDCTDQQYELVKVAFQSTSIRLTAVGDTKQKIMGWAGALDGIFQTFAKDFSAVPLNMYRNFRSKPRLLRMQNEIIRVLDPASVMPDHQLAGEEGEVFAWQFENAQGEAEYLADLIAGWIRNEKVPLSEIAVLVSKQLDLYANHLMTALEVRGIPYRNEQEMQDITVEPAARLVVDYLSCLYGQREPKAWVRLMNQLIPFADDEVQSSARQSFQRFFKEQRKIITMTELLDEPFSGWWDSVCSFLKKIGMETLVALSPDYESHARLGEVVRDTKARIEELLELTPDLPQALTRFSDDQAVRILTIHKSKGLEFDSTIIMAVENEIFFGDQDANRCAFFVGVSRAKRRLVVTYAKERDKPDNYSGIWRTNRSAQLEYFGYTSPFVK

SEQ ID NO: 62986 - protein, 714 aa, Vibrio sp. AND4
MKVARIEISNFRLLKSFALDLEDELSLVIGKNNTGKTSILACLDKLAVQSDKKAITYEDFNVDLMSSIEAVLLGEKALKSEEEYSPFGIQLKLFIKYTESDDLSKISSLIMSLDPTDDNVLLSFEYKIAFDRMVEMKSAYNKEAEKFEHSPRLFLKENLSDYFGTVVKKSLLMGDESQFIDLNKERINLKDILSIQFINAKRSVTNKKNDKTLSNQTSTLYKQVDESDEQVEASNEFKKELRKTDTKLSGIYENMFEGVIEKVNRFGGISPTDTTIRVASTLQHRELLDGNTTVMYQHQSHDLPEHYNGLGYMNLISMIFEIEMLMSRLRKSLKEQPASINLLFIEEPEAHTHPQMQYVFIKNIKTLLKENRLRQDGKEIHLQSIITTHSSHIVSESSFNDIKYLRKIPQSNQVHAKNLKDLELEYASKKDPIKDAELKQSYRFLKQYLTLNRAELFFADKAIFIEGDTERIILPAMMKKIDQACEDSDVQPLLSQNISMVEVGAHSQTFEKFIDFIGLKSLIITDIDSNKEVPKDGNPTQTERLKCPPNAAGASQTSNASLDFFFGTKELAFYKNLELSKKSLSKCPEQKVWKQDPEGLVKIIYQVEENGYLARSFEDAFFHINNELLKIGHNAFPSLTKKYYDKYQSGDIEVYEFAEKAVNSKPSLAIEILLNSKTVSCKKGGSEVDSIEIEFSNWDVPLYIREGLLWLQQN

SEQ ID NO: 62987 - protein, 637 aa, Vibrio sp. AND4
MATTELDLDKLSKEAKEVFKLIKDKKHFLLSGGAGSGKTYSLVEILRAVINDTPSVNIACITYTNAAVSEIEDRLSHDNLHVSTIHDFLWNNIKNFQFEIKQTLIELINDPEQTVINSSDKKMVDQSFFDDCDIIKYKEYVKIVNGIISHDEVVVLATKMFEKYERLCSIVKDKYPYIFVDEYQDTNPMVVKVLLEYMERSNKPNVVGFFGDAMQSIYDGSVGNLDIYTKSEPPTVYEVIKKQNRRNPLQVINLANLIRTDELVQEPSDDQSAPNMDNNGKVKQGEIKFLYSTSDNLKTVRQHLGWDFNCSTTVKELNLTHNLIAVQANFPELMRIYDKDKILEYIRDKVRKPLAENEPEYDSTGKTLAQVLEHVGNPNPTPAQNTYIDNHYECFELAKSLPFDQLSKLYVNKDQLLDDKKNYVGDDSKPNSNRDDLINHLFKIENCIRLYESKNHNRFIKATDYSILSVNDKVNLHKAIQAFQIDEGISIGKVIDLAHELGLVVKDDKVEKFAADRYYVYKQVCDIKYQEFRNVFNYLEGFLPFSTQHKTKGSEFPNVLILLDNGKWNQYNFKYLFEHDGTDSVRQRTEKIFYVCCTRAKEKLAVFFPNPTQKTVKTALEWFGEDNVVNLDECFFD

SEQ ID NO: 62988 - protein, 660 aa, Oceanibulbus indolifex HEL-45
MRIESVTLSGFRCFGPDPITVPIASEITAVVGPNAAGKTALLHALSKLFGVSRAQRTVERSDFHLGVDDDPEDREPKDLFIDVMIGLPELADGTATPETIAPSFRHMQIARAGDAPVCRLRLEARWEDDGTVEGEVSQDLFWVDTLDDDPGEDKCHPVSAADRGLVQLYYTPASRDAAAQIKATTGALAARLLRAIEWSSETTEAVEEASEDLAAAFEEESAIAAIVEALQKRWSSLHDDIVDTKPRLSLVSRRFEEVVSKIAVIFEQGPDGQERGLDALSDGQQSLFYFALAAAVFDLEREVVAGTVEGFRDDTLRIPALTLFALEEPENHLSPYFLARIIRQVRSLTDTSGAQAIVTSHSPAVLSRVDPREVRYCRCDPKTRVSTVKKIKMPAGIDETAKFVRGAMLAYPELYFARFVLLVEGDSERIVLPRLAEALDLLIDPAFVAIVPLGGRHVQHFWRLLKHLGIPHATLLDLDLGRKGGGFGRVKTAIEKLVEFGAPKAELLRIDKGVLPDAELAQMHTWQDAEDCKNLVAWVNSLKPHGVFFSAPLDLDLAMLGAFPDAYKAIIPKSGGPKMAADKAAEVVLGTAGPGNTLYTGPFKDYPALLPAYRYHFLTNSKPATHLAALTHIKKKDLVKKMPTVLAEVLSHVAKSLRRD

SEQ ID NO: 62989 - protein, 634 aa, Oceanibulbus indolifex HEL-45
MAVLSRRARPDDWKPVGVDALEANALKVVRSTDNRSVIAGPGAGKTELLAQRAAYLLQTGTAPAPRRILAISFKRDAATNLAARVRQRCHRHHAGRFDSLTFDAFAKGLIDRLGQALPDRWRPRPDYEVIFPNDRDYREFLYRQVGTPPASVGTYADLQGIAVKTFERRDLVGSPLPLDGWSTPTVGQWAADRFWQTSLHEGKRSVLSFPMIGRLAELLLRVNPMARDALRLTYSHLFMDEFQDTTQIQYDLLRTIFFGTETTITAVGDNKQQIMRWAMAMDDPFVAFDADFAGKRTPLYNNYRSSPELVRIQHILAQAIDARAVEPISKTAVTIAGDSCAIWDFSTPEVEAARLAAFVASEMKTHALGPRDFVMLVRQKAADYAAVLEPAFNAAGIPLRNEAGAVGAVVLQELLAEEVSELAVVILRLAMTKRAGRYWTECQEALATLHGITPDDEAAESRLAHELDAYTLKLCKAHPSPPKSKAAARIIIDDIMAFVGKDRLIAVHPAYGQGGWLEKVLDAAAVHLSSCSDSGGDWSMALDAYEGVHAIPLMTIHKSKGLEYHSVIFVGLDDGAWWSFANDQIEATAGFFVAFTRAKQRVVFTYCARRGARTKIATLYSLLEKAGVRTISVT

SEQ ID NO: 62990 - protein, 588 aa, Bacteroides intestinalis DSM 17393
MGNILIDKIRISGFRGLDDFEMSLTPITVLTGTNNTGKTTILKALQLSLGSRSFLSIDDLYISKEKNATEIIIDIRFVPINDEGKILNDFSEEWEEVFTSDNIRFIEDFSCVPFRTIISYNSLKSSFDIEQKILVDWYPSEGEKWQNIIAKNSRIDFSKTPFFYIEAQRDVVDDMKLKTSYLGKMLSDVAKAYNKKDLEELEKLISTLNQQAVEKSDILSTIQDSLEGINSAMDKSGTGVTISPFTKKIRDLNKGVSIHYGDSDNSFTMDYHGMGTRSWSSLLTFKAFIKHNAELAQKENEPFFPIIAIEEPESHLHPNAQKKLYRQMYEMPGQKIISTHSPYVACSANIENLRGLYKNLNNVSCGILNLNEMDDDDKRKLRQKVINTRGEILFSKAIVLFEGETEEQALPIMAEKYFGCPASELGINFIGVGGAGSYFPFLQFAQSFNIPWYIFSDGEDDPVSKMTAAVKKIRKELFTTIENEKNIFIIDHKEDFEKYIIRLDYLNDIKSYLKQIELSKCVNEQHKESKAKGIDFFCTNSYVLSESKKNKTKWALIYAHAIYNSLKPIPLLVSNLFDKIKIDLHYDK

SEQ ID NO: 62991 - protein, 615 aa, Bacteroides intestinalis DSM 17393
MINKIQLTSKQAAIVSFQQGALLVLASAGSGKTRVLTERIKYLVDSTKRKILAITFTNKASEEIKERLSDIDNIEERLYIGTFHSFCCYVLEKHGNMIGYQELPQVFSETDDRLRIIEDAIVETPTLNQYFSNLDSKQRNKFKTNALDIISKIKREVILDDDLEKRIKDKNAIMLYYSYRDLMASLNAIDFDDLLFLTYKLFVNSPKTAALYRRNFEYICIDEAQDLNKAQYMVLKALTGSEHKNIMMVGDPKQSIYGFNGSSSSFMQDSFVADYAPTIIELNDNFRSSRSILSLANKIVNAPSDLNNVAVNGVCEIHSFKDVCEEADWIASKIKEYLQNEHLKDIEGKLTENRITILARNRYLLLPIEEKLIEENINYFYKNNSNGLLFDSTSGKIFNLALQIKVNPKDYLHFEQLLALLNIEDDKVYSFNELGNRIQNKLYKDIVNSIVLLKDSGDNFNKMIDHLLQKIQENSDFNMIDENELHLAYNDLLEIKKNWHNYAISTKTKNIASFRNAIALGKTIQSKKEIGIALSTIHTMKGQENDIVFLIGMDDQTFPDYRALQKGGLELEQEKNNLYVAITRAKRYLFITYPLSRKMPWGDIKTRKISSLLQI

SEQ ID NO: 62992 - protein, 492 aa, Pedosphaera parvula Ellin514
MDGFADAIKELEELNYPGIADPKLRIATLLRPTDGLNHSAALQYELGVQAGNTSASQLRLPEEYNGLGYQNLISIVFRLMAFRDSWMRKGKAAKMSVLQTEKKTLLAPLHLVIVEEPEAHLHPQVQQVFVRKAYDILRTHPDLEDKTTLRTQLLVSTHSSHVAHECPFSSLRYFRRLAAPTDGVPTSAVINLSEVFGPNDKTEKFVTRYIQAVHCDLFFADGAILVEGDAERILVPHFIRKHFPKLHRSYVTVMQVGGSHAHRLQSLIEHLGLTTLIITDIDTGEAGGHHKSIPPMLGDGQVTNNATLKMWHPREKLFDKLIELDEKAKVKTSDFPQFSVRVAYQIPVSVQLEPTATVAEALPSTFEDALAFENLELFRNTGGNVIEGGDLVERFKAILNTPPVITELAKEISEAVRKTKGKAEFALDLLLIKEDLAKVKVPKYIENGLEWLECQLSENEQLVLQSAKTSTSAPAASVAPTEEALSPATVLA

SEQ ID NO: 62993 - protein, 641 aa, Pedosphaera parvula Ellin514
MITKTESLNETIDNHADVEIDGCLDLDKPTSFFLFAGAGSGKTRSLVKAIRGLRERSGIRMRLRGQQIAVITYTNAACDEITRRLEFDPLICVKTIHSFVWDLIQGFNTDIRKWLKVSLTEEIRTIQEEHTKGRSGTKAAADREQKIVALQKRLDLLDGLSGFVYSPTGENRTRGSLNHAEVIKIGAAFLKTKPLMQELLISKFPVLLIDESQDTSKLLMEAFFAVQAAHDNSFCLGLIGDTMQRIYSDGKVDLGRNLPADWKKPSKVINHRCPHRVVKLINKIRSSAAIDDQQQKARTEASEGHVRFFIVPSLDVNKSECEEQVRKRMAATTGDNEWLRLDGVKVLTLEHHMAAQRLGFAEMFRQLDGVADYKTGLRDGSLPLLRFFSEIVLPLVTAKREGNEFAVAALMRQNSPLLSREALFEIGTNQAAQVKAAKTGVEALLALFTGGAQPTFLAVLNSIADTKLFTIPESLLPFVSDKAASEPTSSETEEADEEESATKTLVAVRAFLDTPFQQIKPYADYVLGDSWFATHQGVKGLEFPRVLVIMDDEGAGGFLFGFEKLFGAKEKSSSDIRNEQDGKETSVDRTRRLFYVTCSRSQNSLALVAYSANAKMVQATLIEQGWFEQLEIELLSLPAVA

SEQ ID NO: 62994 - protein, 699 aa, Enterococcus faecalis OG1RF
MEIYIGEKTMKLKKMILKNYRSIGDDEQVIDFENLTMLIGNNSVGKTAALSALNKLFSDVPNERVLKRSDFHLPKGIQPENFKKQELVIEAIFEFDELLDDQAESSPAIPFFFESFIVEGPDSLPKLRVRLEASWEDGSTVDGTIESNIYFITCPETSEVTDDNKKNASRHDLNKIRLIYVPAVRDPGKQLKNVSGSMIHQVMNSINWKDETRENVKEHIDKINEDFSVESGVNILKNAIQKEWYEYQSDTRYTKADLKFNATTIDAAVKNTEVLFSPTETGREYSIDEMGDGMKSLFYMSIVDSILDVEAKINEEMVNGEDLSFTKEPPVLTIVAVEEPENHISPHILGKLVNKLRDISKKGNAQTIITSHSPAIVKRMNPEEIRHFRMNYGTLSTSIKKLTLPDNETNSDQYKYVKEAVKAYPEIYFAKLVIFGEGDSEEILLPKFFEADGSGLDSSGVSIVPLGGRHVNHFWRLVADLGIPYITLLDLDREREGGGWGRIKYVIKQLLQIGINREELLKLKNGKLLDDDRLNEMHSWAVTNVDNMNNIITRLENHNVYFSSPLDIDFMMLESYGQDYISTISDREGPRIKLSGTNKKVVDLNDSEKELDEFKERIIHDIGKTLKNNDATGTTYSKTQKELMIWYNYFFLNRGKPSTHIAVLSQISDSKLVEQSPEVLTRMMSAAKKLISEQRENYE

SEQ ID NO: 62995 - protein, 620 aa, Enterococcus faecalis OG1RF
MSNYTDISEWTPASGLSLEPNAIKAVKKEENILVVAGPGAGKTELLAQKAGYLFSTNLCPTPKKILAISFKKDSAENLKERIDKRYGRKYGNRFTSLTYDAFAKRMLDQFFMALPEESRPSKDYSIGNSEVIKTAFFECGFQNKENMRDYELNKYFDNLLASVSFPMKNSGIIERTWSKLLKGSETVSPTLTFKMISLLTTYIFQANAFLTKSLRETYSHVFLDEFQDTTDIQYNLVKTCFQNSKSLITAVGDNKQRIMVWAGARETVFRDFQKDFSASKIDLMMNHRSAPRLVELQKMMYEVLSEDPVNINTSGRWQEEDGEIELLLTDNDIEEAEYIAKNISRQIQNGIEPRDICILVKHTPNNYVGKIIEKLQEYEIRARIEIEYQDLLKEFITKLIISFIKLSINRQSPDEREYVMGTIMTLKGIGESTFETRYNTEQRNLSSTLDEVCERLKSVDSRVDLKNIFSNILSYFDVQKLKTMNPTYTQGLFFDRLVERIEELLWNEYEQVSNWDKAIENFVGENSVSIMTIHKSKGLEYEAIYFVGLEDGAFWNFRNQPEEDRRAFFVAISRAKEFLTFSFCKHRSGTKFPNQKHNTINEFFELLQKPGNAKVIDLTN

SEQ ID NO: 62996 - protein, 729 aa, Enterococcus faecium E1636; identical to SEQ ID NO: 62500

SEQ ID NO: 62997 - protein, 597 aa, Enterococcus faecium E1636; identical to SEQ ID NO: 62501

SEQ ID NO: 62998 - protein, 724 aa, Pseudomonas syringae pv. tomato T1
MLALRRFLVSKASAFRLQDLTLSHLVTIEAIGQAWEAAGAIPSANDWAEWLPTLDIWISAEQGELHHIRDLIPNFAWRGGLVGMRFRLEPEDMEDLYVDYRKQRERVEILKTEIQRLAAEGEDPPHLPLWPQSLHDYLNRRLGKMFKVRWYRLDPAQLQDPDPRTRSANRQSLSATSVALERNPLINLIRVHEINAQRGFGDSADEGHDDGKQSGGRKLSEQLRAYYNRHLDPGDSPDISDLGALRAIEAAQVAFDTRLSTSFEPALKEVAGLGYPNNSDPSIRVATRLAPTDGMNHEAAVLFELDSIGGAPGAPPLRLPETSNGLGYQNLISMIFRLMAFRDEWLKKFRTADEQSAAGVEPIHLMLIEEPEAHLHVQVQQVFVKHAYHVLCRDPLLERFPNLKSQLMVSTHSSHVAHEVEYQNLRYFRRLPAGMDGVQVPVSTVSNLSTVFGKKPQTKDFVTRYLRAQHADLFFADAVILVEGAAERMMLPHFLRKHFPFLDQCYITILDIGGSHAHRLLPLIDALGIVTLVITDLDAGSLRSAQPVQRDAGQQTNNPTLRHWTKAGGLPHSVDALLALADDLKTQQIDQLFAIRIAYQTPINIHLPLTGEQVEMLPNTFEDSLVLSNASHFSAKQVRRGLMRAFARALNGAESSNNLASLLFESLRDGDKAEFALQVLGDPGFAELTIPEYIREGLTWLQSKLERKQRELLVVPTAITEVTA

SEQ ID NO: 62999 - protein, 631 aa, Pseudomonas syringae pv. tomato T1
MSTTNDGLSEIVQRAEPDAALDADQIIQTCLNLDRPTSFFLYAGAGSGKTYSLVEAVRSFKERERERLIFEGRQIAIITYTNAACDEILRRLEHDPLVIVSTIHAFAWRMIQGFNDDIREWLRVKLGEDIAALQRQLDRSRGENKTTQTNRASRARKIRRLEELEQVTTFTYSPTGENRGRQALNHSEVIQMAAAFIQQQPLRDVMTDLHPVLLIDESQDTYGPLMEAFLIVQQQIPDRFCLGLLGDTMQRIYSDGKANLERAIPEHWAKPEKKINRRCPTRVIDLINTIRASADDHWQIPKEGAVEGAVRMFCTRQVAGRGFELEEEIAHRMAAFTQDAQWAVGQSGRKTLILEHKMAGRRMGFEGVFTPLHAAEHLRTGLLDGSLPILKLFMDDVMPISASAQQDSFSLMEAVRMRSPLLEPRHMKEAPDQLALMEQVSNATQELLALFEENDPLIADVVHVILSTGLLNVPDRLLAAQLLGVTDEEPPESIDRETLEIHAYQVVLGRRFSEMAAFAGYTQGLSPFDTHQGVKGLEFPRVMVILNDEEAGGFLFSYEKLLGVQPPSANDLKNQREGNDDSLARTRRLLYVTCSRAEQSLAIVVYTPQPEVAKQRVIDAGWLKADEIEII

SEQ ID NO: 63000 - protein, 629 aa, Geobacillus sp. G11MC16
MHLSKLVIEGFRCFNEKAEIPLNKGLTVILGENGSGKSAIVDAIRLILNDDEFGKSMVSERDFWHSFGESKNESSTSFRIDIEFSKLKPVEQVAYLPWLKTEDLSTASLHLKVQNKTNQNKHYKKELWGGNSSSSSFEWDTYKSIQCTYLPPLRDAEHRLRDVRGSRLARLITKIEPENSAKERLVETVKQNNQQLLKDELIVKAKTNIKSRLVETLGEKLAQDISISFSDTRFERIIENLKLLFYPFLDDSTSIDEFRELSENSLGYNNLIYLATVLAELEDVNEQEISCKILLIEEPEAHLHPQLQTKLLEYIEKQAKLKGVQVIVTTHSPTIAASIDLDNILVVNKTELNRSPVIVPLTNVGLTPKQKFFLQRWMDITKSTLLFARGIILVEGIAEALVIPELAKRVLHKHLASKDRISEYSLEEYSVSIINMGGIYFESFFQLFINAEKRGEGIPIRCAGITDCDPDKDSTPYNGKECDCKNPALKLKTKINNSKYCRLYSNLKTFEYDLALAEGNFPIMANTLLEIIETDGPTKKQIKEYIRLFPDAPVSEKAKMAKYLLDKIDDSNICGKGVFSQQLAYKLANKEIEFSVPEYIEKAILWACKLEGDGGNKGGESNTVEKSNE

SEQ ID NO: 63001 - protein, 615 aa, Geobacillus sp. G11MC16
MGNQILLKNQTNKMALIQSVLKHKDILNISSQQADFILQPLNYDCFLSACPGSGKTHSVSLKFAYEINNWISRTSGIAVLSFTNNAANEIKNRANNILKEKQVGYPHFVGTIDSWIHAYIFHPFANEVTGYTGENDDYTHKLIQDGNHGPWIGKYNYNGISILDYTFDKNDQLIFISKKVKSDNNPNIVKVLKKNKLKFAKDGFVTYSDIEYWAFKLLQKRGDILDLIAKRFPFIIIDECQDLSEIQLEIFELLKHAGVSIHLVGDLDQAIYEFRNVFPDKVRNKIKLWRLHQLELSLNYRSVQQICNVITKLSGKQQIVGIRSSLNKSCLLWVYDKKDDMHKVRDAFIKLLNKRNINIDDAVIIARGSSLVNKIKGYEQNSKLDKVKNSISFKIATAIAHWQSADVLDKQYAIQTLGNVLVDLAYDGKGIKRENIKTPFAYQPMEWRLALKTCLDRLVESSEFTKNDDSKQIWKDWIKNVLKKEFELFWNEFKEVTCSFNNVSTRLKSPNKLTDTPISKSLLLGKSNADSKIKVDTIHSVKGETYKAVLFVSAPTKNSEGGYFEHWLQRDTEANRFAFVACSRPEELLVLAIPEDTEEIHNLGFYQDNIKNYYS

SEQ ID NO: 63002 - protein, 808 aa, Yersinia kristensenii ATCC 33638
MSILSNCASRASRLKDSGLRRGAKLLQVGASLYGLRGATMSAADATTSLSGQISLRFVELCQFRRLGKVQLEIDPKTTILVGANNSGKTSILAALRHFLADGSSFGAFDISVSQWPKLRELGRAWDALEEDPSTSGASEGEWEEQLGTLLSAMPTLDLWFDAKAGMFHYVSPFLSKFSWKGGGVGVRLRLEPATNIEELKQLAWKYHLTRIPVKDMGKDSLAWPIDLLDFWLREPSQLGQVRAYKLDADNNPLDGIKTYVSQVLDADSSPIDRKHLQKLIKVDFVAAQRGLGSEEADSRSASGPHRIGLFSNQLLKFARQHLNVAATGHGHRADLIKAVAEAQQELDKKIHEAIGPSVEEVKELGYPGLHDPQEIRFRTRIQTADLLDHGTAVQYSMQKDSLEELLPEYSIGLGYQNLQSLSYQLVSFKAARLNPEKGAPVPVHLVMIEEPEAHLHVQVQRIFPGKAHKLISPNGSDELGLKSQLIISTHSSHLAHAENFDRLRYVRRIAKSDEQTMPTTEVVNLGQVFGDDKTTRQFAERYFRVQHTDLLFANAAIFVEGVAERMLLPLFIERDFAILNSRYLSFLDIGGSHAHRLRSLVERLRIPTVIITDIDPVEEKLGKPKKNGEPARTLVAVANTGQPGLQCGNPTLRGWHPKLQQLEDFKNPKDEHLVWNEIAECSVRFAWQLPVAEADSQWPSTFEDSLILRNIPWFKELMNEKVDDEGKQITPPKGALGSVARQVAENDNIPELLAALHKLMHGSFNKGDFAASIFEKVAAEEPIVCPKYIVDALEWLQTQLEPSKEVIP

SEQ ID NO: 63003 - protein, 603 aa, Yersinia kristensenii ATCC 33638
MEVLRRLTGVSKHEKGGQLARSLKMYGRSIRVVTYTKNAVSVINGRLGDNNLVSVSTIHSFCWELINGFNDDIREALIALKEAQLARDTAEAEAKPRGITPAKQRALDEIIDEIEILRATEVFIYHPDRNTYGPGALPHNYVLDATAWLLRNKPTLQSILKDRHPIILIDESQDTMKGVLDSLMLLAEKRERDLTLGLLGDHRQRIYTDGHADLPSIVPENWATPELQMNHRSQRRIVTLINKIWETELEGRTQPTKGSAQHPRTEKAGGTVRLFLGDTSRSPEDKVLSERWCAERMFEISGLADWNQGQYQLLALEHKLVATRGSFLDVYEAMVLLDPHAAAPSGSGDNKGPSSVQTLLNELAHLEACISNDGILNEFMATEVFRRYGRLDNIPQDYEARAARTDEILKAVNIFAAACAQPESTVADVLAPVLCASLFEIDHRLQEAYADKSPTPPAPGRGEDESKQTRRRRGWCALFAAPWKQLKCYRNYLAGISELATHQVVKGSEFKHVMVVMDDELAGGFLIKYDKVFGGMELSKRDKDNAEAGKETTIDRTLRLLYVTCSRAQESLALVLWSSDPAAAMARIEESQWFAEDEVQIIP

SEQ ID NO: 63004 - protein, 663 aa, Marvinbryantia formatexigens DSM 14469
MYLKKLIIKNFRIFDEMGIELIFNKGVNAIIGENNSGKSSVIDALRIVYSTVTYRKDIFFSKSDFHVCEDGTVVDYTQFDVYLEDVPRRMTEIWNPQSESGMGGDFHIKFEKYIAPNGTEKVRSVYWGFGTEGNQLSSDTFEATDVVFLGALRDSESEMKPSRNSKLAQLLRNLVPEEAVREELVQILNNANNDLLKKEQLKKTRNTINQNLARIEQEFLNQQIDIGLVEPRFDSIASSLRAWVKPKWILINKEDAVYETAHTYFQSNMDLKKIQDDAKGIYFEISILDSETELDKKVADRISEIANKSFELYQNGLGYNNLLFMSAVLGDMAIERGGVYQNLLLVEEPEAHLHPQLQELVHDFLSDANKNDGNIQIIYTSHSPTLASKIDIDNINLLYEYGHKKYCLPFSQTNLTEENKKYLQRYLDVTKSQMFFARGILFVEGISEAILLPAMAKALGRPFEKYAVELVNVDSVAFTPFVNLLSSDKVKTCFSKVSVITDDDRCAKKNEKDYIDKNYDYDDVSSEVATNLQNGQPSDRCNDLTTLCSGAGINIFTATKTLEYALCCSENNVYYMVEALKVCYTELGPKLETKVSSLSQLSEKAACVWLFIRTRDKCKGAVAQYISQVISDQHELRKKGKKIKKEFVIPDYLKNAIYSVTEQ

SEQ ID NO: 63005 - protein, 588 aa, Marvinbryantia formatexigens DSM 14469
MVEKMTEEQKEFLNAEGKVVINACPGSGKTYTVAHKLLSYVDNWEDYHSGVAVLSFTNVASNEIYEKAQSIHGSLGKLGYPHFIGTVDSFIDEFIVLRYGHLHTVGKVRPRIALSDNWKIPYKYWRSECNKNGCVDNIEQFYYGVDKKLYKGNEQVICDRRKAKMLPCQQYKKMLSDRGIVFQNETALFAYQLLKKYPEVAAAIAERFPIIIIDEVQDTSISQMAVFDLLSESGMKSIFLVGDPDQSIYEWRNANPKCMLQKLEDPNWETIELTGNFRSSQNICNVTSLFSASLQGNGSNNAIGEWKDEKEKPVLLLTKKNSEDEIINYFLDKCSKMGIEILPKNVAVLTRGRIYSDTDIAGLWKSKEIELFAKAAYEWKCGSRKKAYQEASKASYSMIFNEDIDEYVMNQNIRKYTDDDTWKDYVIDILVDMPDDETEIGEWVKSFSTFFYSVCARYGYEISIDKKLKDIFKIKQSDKKTPNFKQIPLRKYFEKKTEGKYTRSSIHGVKGESYDAVLIYVKSRTGSTITPKLLMEGPLDQELMRLAYVAMTRPRRLLMLAMLDTKGIKTCERFSEKLWKYEVLEGGS

SEQ ID NO: 63006 - protein, 572 aa, Vibrio albensis VL426
MRIVMIWLSVNFDVFIKNLLRLWYEKILLLTSVNLWGDYRVDTIEAQRGFTDPHSDSGKTVSSLSSQLNEYYKRHLNPSEMPEAEDLGALEAIENAQTEFDKRLDTAFEKTLGEIKELGYPGFTDPDIKLSSRLNPIDTLEHDAAVVFDVRKQNFGDNTFSLPEQYNGLGYKNLIHIIFQLITFRDRWLRVGKIGKKRSNEDIAIEPIHLVLVEEPEAHLHAQVQQVFVRKAYKVLREYGQVKEHLTTQMVISTHSSYVAYEAGFETLRYFKRKPASQEQPTPQAEVVNLSTVFSSQTKGKSDMSATNKFVSRYLKTTHCDLFFANGIILVEGAAERMLLPHFIAHHHKNLRRSYISILEIGGAHAQRLKPLIELLGLPTLVITDTDACSSSGNKARPKRGASLYFGSETLKSWFNFSDVSLDELLDLPSERKVRDNVRVSFQCGIHTKFSPKARKSKEVIPYTFEDAVALTNIELFKKLSKSSGMVKKMHLATKMRTLDACCNAMYKALDGEKAKMALDLLFDVEPEKLLVPEYIKEGLEWLESELDTMSLEYAWAPEANTSEDVKEFVDA

SEQ ID NO: 63007 - protein, 620 aa, Vibrio albensis VL426
MWMRDFNCLTGVDREIYEYLNLDNPRSFLLFAGAGSGKTRSLVNVLQEIREKNLARLIQSGQRIGVITYTNAACDEIQHRLSYDPLFHVSTIHSFVWELIEPFTEDIKGWLKTKLSADIDDLDLMISKARDINGKTTQQNIRKKESKSKRLNELTLVRKFSYSPTSNKVERGTVSHEEVIQITATLLNESHLLQNILTNRYPILLIDESQDTRKELMEALIRTQSLNRSKFSLGLFGDLMQRIYSGGKDDLETALPEDWKTPSKIVNYRSPKRIVSLINSIRNEDDGKKQEPKAEAIQGRVRLFIVDSVSANKFEVEDNVRYRMSSIADDALWLEPNQTKVLTLEHAMAANRGNFDKFYMPLSKVDHLRDSMLNGTNSSLRFLCNQLLPLIYAVKTRNDFLIASIIKKYSDVISPNNVQFCTDPISTLKETNDSVSRVAAMVVDGDPSISEVLKLVDKSSLLYIPDALKVLLVDVDRESIENEIEPSETSFAWEVALNAPLSHLNNYSSYINEKLGFGTHQGVKGLEFDRVLAIMDDDDSNGFLFKYEKLFGARALSSTDIKNQAEGRDCVVSRTRRLFYVICSRAQKSLAVVAYTQDPEAVRNKSLASGWFTEDEIEMM

SEQ ID NO: 63008 - protein, 663 aa, Vibrio albensis VL426
MKIKNVRIKNYRLLKDVSFSIDEKTTLIVGRNNTGKTSFAEAFRSFLNPAGPKVRYEDFNQSCLTGFEDALNALQGGAEDDVVRSMLPTIELELLINYQDNADEYGVLGDFIIDFDDQLFETIILISYQLKDGKISEFLGGLDSVNRKQYFADLRSRIGLHYEANVYAVEPTNLNNKARLEFSSFKKLLLSGLINAQRGLDDETHNERDVLGKSLGHIFKSASSVGAPEAFKAQSAEINTVVEELQEIVDTDFQQKVQALLPTLNIFGYPGLHDPNLSAATELNVKSLLESHTRVFYQRDDHFTLPETYNGLGMRNLIFILFRIYEYFREFQSHQTPPKGHVIFIEEPEAHLHPQMQEVFIRQLEQIVEQFQRELNDQQVWPVQFIVSTHSSHIANEADFSKVRYFLSKNGNETKVKDLGVAFQSEEAAGDREFLHKYLTLTKCDLYFADRAILVEGATERILLPQMIKKVDVALGTNLRQKYLSVVEIGGAYAHHFYKFIDFLELKTLFITDLDAVNSKQHHAAVMVSQGDRSSNVGISKWYGEDGYSDLATIRAKDPGSKIVGCRRLAFQIDEDISGLCGRSFEDAFILVNSDLFQLGNLTGVPLETAVYDKAKEIGKKSKADFAIEYCISSADWLVPKYIQEGFVWLDEDPDVAVAGVQP

SEQ ID NO: 63009 - protein, 618 aa, Vibrio albensis VL426
MYKFCGLAGSKVYSGRVCVVRRRPRCSCCRSAAMTTLSPAAQASVETLESLRSCIEQGQCFRLEAGAGAGKTYSLIESLKYVISLRANEFAISGKQVASITYTNVAKDEIKARTDNNPVIFADTIHAFSWSILQNYQEQLRQLIPTLGAKWQERIAESAGISHQTVKYDLGFASIKEQEISLHHDDVVALMARMLAFPKFQKLLKSKFPIIFIDEYQDTDSALAESIVQNLIDNDSGVMVGLFGDHWQKIYGSSACGLIRSPAGKIIEIGKRANFRSDKNIVECLNRMRPELPQAESDPSSTGTIKVYHSNDWQGMRQAGGHWKDDLPEEETRRFIQQTKSLMVEHGWDMSLSKTKILFLTNNLIATEQKFKNLADCFNYSEDYLKKNDKYIEFFVDTVELTALAFQQRKYGELLQIKKKNRSYLTSQADKTAWIENLEKLMRLRDTSTIGDVLDLLITTNVPRVPAKVSDSEARYQTLSVRDQESLAPDELRFVEKIRRLRAVPYFEVINLAEYINDKTPFSTKHGVKGAEFDNVLVVCGRGWNHYNWDQMLEWMEDGVPQRNAETFERNRNLFYVSCSRAKHNLTLLFTQRLTDKSLTALGKIFGHENIKGCPFKV

SEQ ID NO: 63010 - protein, 680 aa, Porphyromonas uenonis 60-3
MYIKEIKILNFRNFKEALIPFHEGVNVIIGHNNTGKSNLLRAIGLVLGYNYGHRLGVSDLFYETDLAVLQQQSPRIQITLLLRRSAGEALDSAEMGLFSNMMTDPELSEEAELRYEFKLTDAEEDNYKSDVANATTAKEIWKIIDHDYIRLYRTSRLGGNQAAGISINETLMQIDFQFLDAIRDVSHDLYAGYNPLLRDVLNFFIDYSVKNDSTKTEDEIKGQLKTLRDGFVQQSSPLMQTLQDRLQNGKNVFLKYALDTGATFNGAVPDFDGTVTENEMFAVLRMIIKYADGIEVPATYNGLGYNNLIYMSLLLARMQADSSITYMKRNAKILSFLAVEECEAHLHPAMQYKFLQFLQDNNANGHVRQIFITSHSTQIASAVKLDDLICLTSPALGQINVGYPRDIYKEDNDDVESKRYVQRFLDATKADMFFANKLIFVEGIAEELLLPVFARYLDKNLTDEHVLVINMGGRYFKHFLKLFDTNNPHTINKKIVCLTDIDPCRKKHGSDEAYEACYPYEYNIDADNYDYKHHADTEVIQYADHPNIRFYRQDVTYGKTLEYDIMRENPDCELLLTDSVSNLKEIKAMMAEEDVNEMMNKMRTSETNSRIKTSIGASEWTDEEKRKALLASRYLNSVSKGSNALELNVALMANLEKSATDRKEFNVPRYIVDALTWLLS

SEQ ID NO: 63011 - protein, 550 aa, Porphyromonas uenonis 60-3
MAIIITSEQTIPVDEPFKVTAGPGAGKTHWLISHIKNVVSNSNKLDVVRKVACITYTNVGIDTITSRLNMRNDVVEVCTIHSFLYANIVKPYIHLVAKEFGLELSKLVVIDDSNFKTEGIAISVLKLINKSWVNARSYLKGLNNATWHYSKHAYNDYKPRYPIKAGKWFVGNDCYMGFKRWLWSRGYMSFDDILYFSYILLSRYPHIYKLIKARYPYIFVDEFQDTIPFVVDFLTQLGNKGVIVGVVGDKAQSIYDFLGATVQQFDSFTVPEMQEYEIRGNRRSTKQIIDLLNIVRTDFSQDWLNGLEGMMPELLVGDMLNCYQQSIEKSGTDEIQSLAFQNVLANSMRKKNGVREVEKILEIDFDSNAGRQMIIKTLIKAVEYTKMNDLRNAWHQLDIINRDRTITIVALRRLLDGYKDYKDGSLMDFYNFLVNDLQLKITKITGKAIKDFYVNHTYADAVLGVKYGDSNDKHKTIHKSKGEEFDNVFVILEKEEDLEFLLSPNLDGNNVHRVYYVAASRAIKRLFICVPTLSEENYIKLKDMPINIPS

SEQ ID NO: 63012 - protein, 641 aa, Xanthomonas fuscans subsp. aurantifolii str. ICPB 10535
MQLAVVRISNFWSFGPEPVEVKLDSMTYLLGPNGAGKTAVLTALARMFGTTGGMRAVLPSDFHVAMGEVPAEGKAASLWIETDFTFPEVKEGEGTAAVPIFFSHMQLQSAGEVPGVRIRLTAEMDESGEIEQRLEYVLAADEDGAPTQLRGMPKLDRQAIQVHYLPARRNPADHIAYSAASLLGRALRAADWTAERTKANDLSEQLGEAVTENAGVAAFGKALTVGWGKLHKGKFFAAPSIAFGTGGLAEVLKQVSVRFSPGHETPSVDFERLSDGQQSLLYISLVLAAHAVDVAAFADDESPFDRARLRPAAFTLLAVEEPENSLSPQYLGRVIQSLRDLKKESGGQAIVATHSPAILRRATPDLIRHLRLDADRTTQVSRIVLPDEAQESGKFVRQAVMAYPEVYFAKLVVLGEGDSEDIVLHRMLGAMGIEADAASVCVAPLGGRHINHFWRLLSSLSVPYVTLLDLDYGRFGGGWGRIRTAHRYLRSYPNGHAIRTIAELKVMSGWKASCLTPEFKAEREFLMQAGVFFASPIDLDYAMIMKFPETYGIDQYVPTDEEEKKSIAKAVLGKNGSFELFEPIDKGYFRDYHRIFKLGSKPAAHLQAMSKLTDEQLLNGAPKSLKDLCKRVVAMLAEDVE

SEQ ID NO: 63013 - protein, 547 aa, Xanthomonas fuscans subsp. aurantifolii str. ICPB 10535
MITPAQWSPVAIEMLEPGAKAAITAVHGNSMVIANPGSGKTELLAQRADFLFRTGTSRYPKKILAISFKTDAAHTLRRRVRDRSGFNHAHRLNSMTFDAFARRIIAIYRPLLKPKDRLDHGFKVGVTRVNAIQVAFKELVPLAQQLIEQHPMIKRSINMAYSHVFLDEFQDCTSAQYKLIHTLFKDTSTSITAVGDAKQKIMGWAGALDGVMGKFADEFAAVPLKLVQNWRSAPAIRRVQNRMIIQMEPVSAVAENDIVGDEGRVYLAHFADEQVEAARIAEKIEEWIAEGIAPHEIAILHIRQSAMFNQAIDGELDRRSIPRRNEQALQDLVSEPVTEFVVNLLRVLGRKPAPSAYASVLYALTAQDDDEQGDWIRLLSVARDRVAGGLSADHAELAFEQLQEVMALIPIATLLLLSSEYDSGRVAEILGQVYEVLGNFIHQHHDLDQALARFLDEGSVRVMTIHKCKGMEFECVVLPCTERETWWGDQNDNRSAYFVGVSRAKQNLVVTYVDRRGAPIGASAQWDVIRHPQEEFLGYVRAEAIPL

SEQ ID NO: 63014 - protein, 599 aa, Acidovorax delafieldii 2AN
MKLTRIYINNFRNFLELDVALDGSAVIVGENRVGKSNLLYALRLIFDPSLPDSARQLGQGDFCDGLGEPLEGEKITVFVELTDFEDDLDLLALLTDFRLDDAANTVRLTYEFRPIPGLDGFPQADEDYEFICFGGEAETKKFGHDVRRRIAMDLLPALRDAEGDLAAWRRSPLRPLLERAFAGVSGEELRGVRDAVHAATEQLAEFPAVQTLEKDLRALFTSMSGPKQDIEPSLGFGTTDVTRLFRNLKLLIDGGLRTIGEASLGSANVAFLTLKALELRQLMSENRRDHTLLAIEEPEAHLHPHLQRSVYRHLFEDLAAAPAGEQLSLLLTTHSPHIASVAPLRSLVLLRESKDESTVGTSAATIELTEDEEDDLARYLDVTRAEMLFARGIILVEGDAEKFLLPVFAASLGHDLDHLGITVCSVSGTNFTPYAKFLTALGIPFSIVTDWDPRIDRQALGFNRSWKLVQTIESARTGKEPTRLIRELKSIEDVNVFAERCEEHGVFTNVETLEVDLFRDDDFTTAILAALREQPWAAPRMAWLDEWEADPSTLNVENYLKMIEAIGKGRFAQRLASRVEGVAPPAYIANAIAYVVGRV

SEQ ID NO: 63015 - protein, 592 aa, Acidovorax delafieldii 2AN
MSDRAAYLRAAAQLRGNAGQWAAYESRGHCIVLAGPGSGKTKTLTTKMARLLAEDVAEPRGVACITFNNECARELEGRLAALGVEPDGRVFIGTVHSFSLTQIILPYAKVAGLGLPDDFGVATRAERQAALSNAVLRTMDYAGNPQDWEFRLASYRRSILNRDSVQWQETDPELAGLVEAYEAELRLRGLIDFDDMPLLAVRALREKPWLQRALLAKYPVLVVDEYQDLGLALHRMVMGLCFSAGMRLFAVGDADQSIYGFNGAQPELLRRLSEREDVETVRLRLNYRSGTRIVAASSVALGEERGYEAAEGAPLGTVFVHAVQGAYPQQARHLIANLLQRAMAGKPGLRYRDVAVLYPAAWIGDSVADAARQAGIPVVRTDGNALYPRASRLMQWLELCAQWCCGGWRAGDPRFSRLVAEGRRLFAESIRGEDQVGDFHRRLIDGLWNVRDPSLPLHAWLVRLKEQLIDPLGLGCVSLRDELETLAAFVARTSPEGDCPGMLLGEMAGDGGGLDRLTLSSLHSAKGREFAVVFLFGMDAGRLPRNDAGRQQLAEARRLFYVGFTRAKSEVHLIHTVGRASQFVDELEQHLR

SEQ ID NO: 63016 - protein, 729 aa, Staphylococcus aureus A9765; identical to SEQ ID NO: 62500

SEQ ID NO: 63017 - protein, 575 aa, Staphylococcus aureus A9765
RYNLYVNACPGSGKTRVLTRKIAYQAIKHDGSLKRIIAITYTNRAAEEIKERLSLLSIDDDINIWVGTIHQFCLEFIIYPFKMNLSRVSKGFTIIDDYTQRAYVSQINNMLNLNLKTYELNKIDLSLSHDFKINEVQYTQVSEMYHTMLEKNKEIDFDMILLVAYKILTVNSNVARNIASNIRAIYVDEFQDTRELQYNVIAKLLQNNPQIQSMFVGDIDQAIYGSLDGIAKSVEELEMLTSHTFQSKTLHGCYRSNQRLVDFYSNFQSCPYEIESRGNNKNDRGFISYDCKVTKEDLPNIIKNIIKEKIESGIHEKDICVLAPQHYPLFSLGEYLKKELPYCNFDAINISPIKVNNHSLFFKLAILYFTESGENVRRRKLIANDILIILKNEFGIEVKDYFIDLDLLQLINSVKRMYSGDDNGVDLYKFVTKHIFVNLNIDEKNYPSIFKHYLFFINEVEDRIKNNSLSSSVSSFKKMFKSRDGITLTTAHKVKGNEYDTVIAINLLNGKIPHWNEIFNVSDKGISSARKLLYVICSRAKNNLFLFSEVGYFTSKGDLLYPTQLLDKIEFDYNI

SEQ ID NO: 63018 - protein, 696 aa, Ruminiclostridium thermocellum DSM 2360
MNCMYISKIQIKNFRNFKQFEAHFNNGINVIIGHNNSGKSNLIKALALIFDSNTKKHLEIDDFNKYISLEDLKNEPPKISIAITITQQEDENLMSDDLVTISNWLTKLEEPYEALLTYEFMLPVKEHERYKKKVNNLEKEEEIWEVINRDFLRLYTYKIWGGDPINKTVADSESLQKFDFQFLNAIRDVERDMFTGRNTLLKSVLDFFIDYDIKSDKEKTEDEKLSEISEIKRKFSIDANNLIKSLQKRMEKGKKEILSYAYNIGASFDNSYPNFDGNISDVQLYSALSLIVEYKTGIKIPVSHNGLGYNNLIFMALLLAKMQINSDGTYLGSNAKVFPILVIEEPEAHLHPSMQYQLLKFLNTNIKQNKVRQIFVTTHSTHIAASVSLDQMLCLYKYKNDTQIAYPGKVFPDEKSKKYVQRFLDATKSDMLFSEKVILVEGIAEQLLIPIFARYLECPLEEKHATVINVGGRYFNHFLYLFDENNPFAIKRKVACLTDRDPERKEKSQSRYKKCYPFEFNLQPDTYDYRYNTLLDKYEVRENHKRICQNIASFKQDKNSSTFEYDLILSNPSLDILVTESLKNSEEIKSLMQAYKNGEPLDEFYKLLRNNPENKRIIESIEKANSKEWSEDEKKKAIIASRYLNSVEKGENALELAYVLKENLDKKGTEDFQDFNVPTYIIEAIKWVCQDDDNKF

SEQ ID NO: 63019 - protein, 579 aa, Ruminiclostridium thermocellum DSM 2360
MIINSDTRIPIENHFRVSAGPGAGKTHWLVNHIKNVLQNSTRLSNARKIACITYTNIAVETILKRLGTAADQVEVSTIHSFLYRHVVKPYCSFIASDVGLNLEKFNGHNDTIVSNSRIKHWLENLPCKDQLKKPCECNQLLYSKVHRKALIKWLETLYYSFDNDKLYITGDSKKAYYGKLHLTNQCLKILESELFQYKKLYWKDGIVDHNDILYFSYKLIEKYPFIIQILRAKFPYFFIDEFQDTNPIQLSLIRKIGQKETIVGVIGDKAQSIYSFQGASMTQFEKFYLPNLIDYVMVDNRRSTNQIVDVLNLIRKDIQQNKFRKVEGDLPVILVGDRNKGYEKAKELCNNSEICTLTRDNATANSMKKEIDENISDKNLFLELKILDSNSKRCNVVYSCIQAVELANNGNYKEAIKKLEYLFTERNDKHAVKKMALSCLCLLINNYNSFKDKTLMDFYSFVKDKIFTDLSKFRKGNIKTFYEKHTYQQLAAYVNIVDDISYFKTIHKAKGDEFNNVLLILKEKDLDFLLKPNLLKNEEHRIYYVAISRAKEKLFICVDNLNPQNILKLNTLFNIVILN

SEQ ID NO: 63020 - protein, 729 aa, Enterococcus faecium D344SRF; identical to SEQ ID NO: 62910

SEQ ID NO: 63021 - protein, 328 aa, Enterococcus faecium D344SRF; identical to SEQ ID NO: 62911

SEQ ID NO: 63022 - protein, 667 aa, Leptotrichia goodfellowii F0264
MFLKSIKINNFRKFRKEGNKVEFTNSKNYQTNVNVASNTTLIVGKNNSGKTTIINALEKLINKNINVSDFNFHYLKEILEKGKIEIPSIEFNIIIGLEEETENKEIKNNDNLNNLLPFMTLKDLKDKEIEITIKYEIEEEEIFKEEIKKIKKIRNKESRFLKFLKILEEARYRFKYYREDKTEVENFDLGKLIEIKTIKANNIEGEKSLQVAFSKIIKYRYKELIENNEEKENIEKKFQEINNNLTEQINEKHGKILNKALNKIFSKKNLEVSLKADLSFDNLINYLLKYEYVDEDLFIPENQFGLGYTNLMMIVANLIDYMEKYPETSFNSKINLICIEEPETYMHPQMQEMFIKYINDVISELLKSHKKNINSQLIISTHSSHILNSKIQFGGSFDSINYIISLDKKIEVIPLKDELISFSGRREDEDFKFIKKHIKFKVSDLFFSDAVILVEGITEYNLLPYYVDKDENLKKYYISLFNINGDYALVYKKLLKLLKIPVLIFTDLDIERIEDEKKSFSQIESLENKTTTNPTLTKFNNSKNISNLPEYLSEENISIYFQRKINEYYPTSFEEALILTNFNNPLLNTVLREIKPQIYEEIVKSKFENNKHNSYKWQKKLKNEKSEFSNKILYNLIITDNNDLKLPNYMEDGLKDLLKRLEKNGRK

SEQ ID NO: 63023 - protein, 662 aa, Leptotrichia goodfellowii F0264
MLKNISKENIKQEKEILKNLFSNIDNYQSTLFNAGAGAGKTYALIECLKYIIKKYEKELKIHNRKIICITYTNVAAKEIKERLGNTELIKVSTIHERIWELIKIYQKELVEIHLENIKIEIKKIEEKIEIKKEYRDKILEIKGNFYSNENLKSKEYRKKMEQLGIPDGLLKNVNNFKILAKNIIKVENYKLCIQKIEKNEYKEITYDPLYNSDRLYKMRISHDTLLKYGYLIIEKYSLLRKLIIDQYPYIFIDEYQDTDEKIVKIMNLLDIESKRINNPVFIGYFGDYVQNIYENGVGRIENDHLELKKINKIYNRRSYSEIIEVANKIRNDEVNQKSIYTDSFGGNVEFYKGSKEKLEEFLRKNKRIYNTTKNKPLHCLLLTNRMIASFAGFEKLYEFFSKSEYYSGVNYNQLNTEFLSNEAEKMGEIPRLLYRIMRFKNKIENSSTFLKEIIIIKELHERNIVQLRELINLFSLQKVETFLEYIDLICKIYDETNNNDYKVIIGKIFDIKEISAQGIRSYLLESLYPNLEDKTEKIIEIDDILKENINEYENWFDYIEDNIKSDIIYHTYHGTKGLEFENVIVVMENNFGRDKDYFKRFFKYYNKRDKLDENDREKFEKARNLLYVSVTRAIKNLKIFYVDDISEFEDEIKKIFGEIKIF

SEQ ID NO: 63024 - protein, 565 aa, Vibrio cholerae RC27; identical to SEQ ID NO: 62564

SEQ ID NO: 63025 - protein, 458 aa, Vibrio cholerae RC27; identical to SEQ ID NO: 62565

SEQ ID NO: 63026 - protein, 768 aa, Vibrio mimicus VM223
MPDIPPETEVSKGIKLRFVELSNFRRLGKVQLNIDEKTTILVGANNSGKTSILAALRHFLADGSPFSAFDISISKWSKLRALGKVWEDLTEDPLTVTEPEEKWKEQLQILLETMPVLDLWFDADVGMYHYVAPFLSKFSWKGGAVGIRLRLEPVTNIEELKQLAWTYCSARSPVKDMGQDSLAWPIDLLDFFLREPLKLGRVRAYKLDTDNNPITGLVSYETQTLDVQTSPIDRKHLSRLIRVDFIPAQRGFGSEETESRPSSALQRVGMFSNQLIKFAQQHLNVASSGHSQRVDLIKAVAIAQKELDSKIQEAIADSVQEVQELGYPGLHDPQEIRFRTRIQTADLLDHSTAVQYSMQKDSIEELLPEYSIGLGYQNLQSLSYQLVSFRSARLKPEKGSPVPVHIVMIEEPEAHLHVQVQRIFPSKAHKLISPTEKEASSLNSQLIISTHSSHLAHSENFDRLRYVRRVAKSDTIPMPTTEVVNLAEVFGDDKKTRQFAERYFRVQHTDLLFANAAIFVEGVAERMLVPLFIERYFNELNSRYISFVDIGGSHAHRLKPLIEKLRIPTVIITDIDPCEEKEGKPKKNGDPTKKLVAVANTGQPELQCGNPTLRGWHPKLQKLDDFKTPTEGQLVWNEIEDCHVYFAWQLPIAKANNCWPSTFEDSLVLTNVSWFKGLMDEKFDENGVEIEVPKGALGSVAKKAVETEDFQQLLSELHSLMHSSFNKGDFSASIFELVSSGEDIECPGYIANALTWLQKQLEPSGVME

SEQ ID NO: 63027 - protein, 651 aa, Vibrio mimicus VM223
MSKQSIITDNDRDTGVVEEICGYLTEVPPRSYFLFAGAGSGKTRTLVEVLRRITGVVKHEKGELLARNLRLYGRSIRVITYTKNAVGVINGRLGENDLVKVSTIHAFCWELISGFNDDIKAALIAIKEAQLEKETEEALAKPKGITPAKQRDLDEIREDIEGFRNTDLFIYHPDRMTYGPGALAHNHVLDVTAWLLKNRPTLTRILKDQHPIVLIDESQDTMKGMLDALLTIAEPRGSGLTIGLLGDHRQRIYMDGHADLPSLVPDSWAMPELKMNHRSQRRIVDLINTIWEAKLEGRTQPANGIRQHSRTEKAGGFVRIYIGDTKISPEDKAIGERWCADQMCSASGVEAWSKGEFQLLALEHKLVATRGSFLDIFNAMVLLDPNAAAPSGSGENKGPAIVQALLNEIIDLEGCINPNGTIDEFKVTEVFRRYDCLDGIPEDTVERAKRVEEILRAIETFAAACASPLATVGEVLEPILSAKLFNVDTRLAVGYADKSPPPSVPARGEEESKQDRLRRGLCALFSAPWNQLKKYCNYLSGNSVLATHQVVKGSEFPHVMVVMDDKLAGGNLFCYDKIFGGVNLSKSDSENINKGKETTIDRTLRLLYVTCSRAEESLALVLWSSDPTSALERVNNSGWFVDKEVEAIPSP

SEQ ID NO: 63028 - protein, 802 aa, Acidovorax avenae subsp. avenae ATCC 19860
MKLQAYRLQNYRRLRDVVIELDDEISIFVGANNSGKTSAVQGLYSMLRGDAKKFEIFDFSAALWAEIDAIGVSNPGDEEAPKKLPCILLDLWFRVDEDDLATAMPLLPSTEWDGKCVGIRVAFEPRDDHELVGRFHDLHQKANNAAIAMAAKRKAAGSSGADVETGHGVEGSAEVSEYKPWPESLTKYLTKELSKEYTFRYYVLDERAFDGCLPVDANYEPLPLGKEPGGAAILKSLVKVDFLRAQRHLDDPDAGSSDRAESLSRRLSRFYHRNLEKRGDDHAALEALDTSERELNFHLKEVFSDTLKRLAKLGYPGVNNPEIVIRAALDPTTVMGQNAKVHYMVPGAATAHLPDSYNGLGFKNLVYMVVELLDLHEQWKADEDKRAPLHLLFIEEPEAHLHAQIQQVFIRNVLRLLEDANDHSTFFHTQLVITTHSPHILYERGFSSIRYFRRVSDQLDHQTNVRNLSLFKTSDTDAPGREFLQRYLKLTHCDLFFSDAVILVEGNVERLLLPAMIELAAKRLRSSALTILEVGGAFAHRFQELIAFIGLTTLVVTDLDSVIVKADDENAAAQTIGAGDTVDDDDDLKPFEVEDDDATQPSGKKKSKKRGSTCHAHVDGAVTSNQTLISWIPRKRSVAELWEVTAEQKTLSLAEGSSAAVRVAYQTKVSVTVGSVTAQLCGRTLEEAFGLENADWCQAEANRAVGLKLKCAPNSPEELAEKLHDRVVGKNFDKTRFALEVLASGPLNGWKVPTYIAEGLAWLEAKVAHELEADAAIASEVATIEPNAAGTISVIAGAEQTA

SEQ ID NO: 63029 - protein, 645 aa, Acidovorax avenae subsp. avenae ATCC 19860
MSRRVDSPDTDADREIHACIAAMPPQPFVVRAGAGSGKTTSLIKALDWVVSEHGASMRAKKQKVACITYTDLAANEMLADVNSNPLAHVSTIHSFYWAIAKTFQADIKIWLNNEIRRRISELEEDSKNYSSRVRQATRDRNQADQDRYARNLEALGSVKTFNYGVGSDYAKGILGHEDILQFADFLLQNRPLFRRVVALNYPFVFIDESQDTFPSVVKSFREVEAQMRGKFCLGFFGDPMQSIFMRGAGDIAREDHWRAITKPENFRCAKQILDVANAVRAHGDGMKQVRGLHEKIDGELKLVEGSARMFVLPNTLNRNEALARVREWSAAANNDEGWTTPDLAVKILVIVHRMAASRLGFGGIYSALNDKTSDAMKQGMQDGTGWPVRPFLSFALPIVAAMSAGNEFAAMNLLREFSPRLKPGTLTGRRVAGVLRELRTAVLRLVAMLDEAGTTVGDIAIHLRDSGLFDFDERYERVLGFVQDISDVAQEAEAADTAPVEGRSLDAAMVKFLRCAAQELRPYERYVSEDSPFATQHGVKGAEFDRVVVVMDEDESDYRTYNYERVFANADARAADRAQAQNGDENTWSRTLRLLYVCCTRAKRGLVLTFFVADPATAVENVVSSGILPRSAVFTQDALAAQAIR

SEQ ID NO: 63030 - protein, 656 aa, Peptoniphilus lacrimalis 315-B
MRLSKIKIKNYRLLIDAELDIDAKTTLIVGRNNTAKTSCSNCINTVLQGNDFSYNDYPISKRENLYNLFFQFMEKKLSYEDLCRGIEPISIEFVVDYSLDDQDTKLGALSPFIIDVDVDTTTALIRAEYQLKIDESKLRELFKDSCYSNDKFAPKAEEMHAKLASNFSRLFGLIIYAVNPKNLEDWQVKSHRELKDLFPYYPIPAERILGEDGTQKNESLSSLIADYFSLNEEDLTPDIAEKVKELRAVVDGANKNVQKESDRILSDLVSKAVGFGYPNVEELQLGVTTELKIDDQIKNQTRLSYSSGASDESLPSSHNGLGYKNLIKMEFLLAAFARDVEKKGDACIPLLFIEEPESHMHPQMQHAFAEHLEKFLDKITTVHIQTFLTTHSAHIANTMDFSKIRYAKKSKSGVVYKNLDIFARENADNMDFIKKYLTLSRCDLFFADKIIFVEGASERLLLPDMIEKCEKEKLFDSEKYKLPAQYYALIEIGGAYAYKFIPFADFLGLPCLILTDIDSMIDGRTKAVVSKGKTTSNATIKWWMRKIKGIPQNSKDKIYLADITAATDAEKTLRKCHIEYQTSENGICGRSLEEAIMNVNRSHYGFTEPVAEEDLEFTEKSKTDFALNLICNNPNYSIPQYIKNGLTWLNRQRVLE

SEQ ID NO: 63031 - protein, 581 aa, Peptoniphilus lacrimalis 315-B
MSKNYEYLNYNIAKAEADKVDEQIISALKAGRSFRVEAGAGSGKTYSLNRVIEWIQANKWNDYRRKKQNVICITYTNAAVDVISQRLSQDSFILPSTIHSFAWNAIKQYQSTLISIIENDASLTTTETDFSKVLEIRYTLGHRYVSQGVHYLHHNDVLKLFCTMLDNAKFRRVFSDNYPLILIDEYQDSYKPIITRFINFFIAEGIGPQFGFFGDAWQTIYQTNNACGAIEHSKLQEIKKGSNFRSAPRIVKLLNDIRPDLPQQSAIDNFEGEVVVVTCDDFSGERRTERTFKDDLPAEELKSRLFQLSEHIKKNVSKDENIKILMITHKVLATQQGYERLLAIIDDGLRDKQDPFLLFFMNTVEPIYEALSTSNMQLLFDTLGIRRYPITKKADKMKWKEFESQLKKARNGRAIDVINTIVETKLVPIPSLVDGYYHLYFDAPDTIYGLDATIQNVLDLDYSQFKAAIEFLYPESEFSTEHGVKGEEYDNVVFVISKGWNQYQFETYAPMITGKVPIPVGKEASYERNRNLFYVCCSRPKKRLFLFVSIPLNSTFRNFLIDIVGLENIYTFNEYLDNKAK

SEQ ID NO: 63032 - protein, 669 aa, Bacillus cellulosilyticus DSM 2522
MNELSAPYISRVKIKNFRNYKDVDVVLSHKQVIIGENNVGKTNFLRAIQIILDPKLSDEDRYLNESDFFDGLVDPMKNGDEIEIIIEIKGFEHNKSLLSMLADATIRASEPVIRLTYHYFPVTNINGKYEYEYTIFQGEKTEVAFNHSHRKYLNLKVINAIRDVEAELKNIRRSPINQLLKQYKIDKDELVEISNKLKQQSNDILTIDELVDLQTQINKRFSNVLGNQPYSKIALETVDVDPNRILNTLKLMIGIEKQRPTSETSLGLNNILYISLILLSLEDKTIPSLIKKDTYDELILENESDILTLCYEKTEKENYSLKQDLNEQNLIDLYSFMDTNHSSTEGFTIPAIEEPEAHLHPTFQRIIYKDVMKKNTSVLMTTHSPYITSVAPLDSIVHLRATNQGTVVHSTATIELTDGERRDLERYIDVKKGEIYFGKGVILVEGIAEEYLIPAFADLLEKPLDLKGIICCNINSTNFKPFVKFLDLLGIPYVALTDGDFYIEVKDDDDNEPTRKFHIMSEGSNQQYGYLGNERISSLLIDLQKLNESKIPDSFQEQDKFFSKLGFFIGRYTMEVDIMDTCSASEDGKKVIFDIFNELTSGGSRQQTNFRKEFEERKYWDCLKKIESSNNGIGKGRFSQRLSTSCRVEHIPSYIDDAITDIYARVDEV

SEQ ID NO: 63033 - protein, 599 aa, Bacillus cellulosilyticus DSM 2522
MIPYEKKLEQIKKDESQYAAYNSNVSTVVKAGPGSGKTTVLTLKIMKLLYEKIKPPRGLACITYNKEAVKEFTNRLYDLGYKKRQNVFLGTVHAFCIAEVISPYIHLYEYDVPLPLTIISEKDRKQIYDNIVSELDYDPKKIRIEDMDKERTLSIDGISSVALEPFEVALRIAKEYEIRLRSKGMVDFIEIVKMATLLIQNHYYVRKCLEAKFPWILIDEYQDLGKPLHEMVLALFHKTNIKIFAVGDPDQSIYSFNGAIPDYLNELYRHPNILPIELFTNYRSHQDIIDASLVGLNQEGRKYISGKDFKSEAEFHFVTCEEELDDQYNDVVNSIIPECIEKGIPLEEICILVQGGKEIKAIGNLLAKTNIPFYVSKFDFKRSDVVMWLESCAAWVINNENESFSKLFDFWVSLYNRHIKVLTLTQLMQERKKVYKMLAESRTFTNNLEEWLNFVIEELKLNSVLESSKVYPDELDNLTLLFREIKDQNQSNYDLEKFANLGKAVNQVTVSTRHSSKGLEFEVVIMLGMEDGTFPYYLNVNDPKKLSEDRRVFFVCVSRAKRICYLLRSKKYTRMTWNGQRTFYPKPSIFWKELYQSVK

SEQ ID NO: 63034 - protein, 645 aa, Micromonospora sp. L5
MKITRLRLSNFQSFGPEPTAIDLDGLTYVLGPNGSGKTAALEALSRLFSPLAAERKIRLEDFHVPVDQRASEVQSGEPTLWLEVDVECPEAGADGQHASVPPNFSHMAIDTADGVPRIRVRLTASLAPDGVIDEKIEYVLEADEAGEPARCADMSRYDRGHIEVHYLPARRDPADHIAYTTASLIGRSLRAADWTTERKTLSDLTAQITASLATNTAVAGIGVQLTNEWLGLHRGTYFKEPSIAFGRGELEGVLRQLTVTFSPSHDGAPLPFERLSDGQKSLLYISLVLAWQSLARRVLNGEETSLDADRLRPPVHTVIALEEPENSLAPQYLGRIIRQLRGACSHGDVQSLIATHAPTLLRRVDPHSICFLRLNAARETTVHRIVLPDDDESAAKYVREAVQAYPELYFSRYVVLGEGDSEQVVLPRVLAAAGIAEDDASVSVVPLGGRHVNHFWRLLNELQIPYATLLDLDSGRYHGGWGRVRNALKQINKVRPGTYTEAQLSKLPKWDDDQDFPTLVDPGFKDGHGPIEALEQQGVFFSHPVDLDLMMLAAYPDAYGVDPKAPDEKTIVAVLGKSHVNETRLPDNVLELFDDYHGKFDLGSKPATHLAALADLSDEELLQELPDALDRLVEHVRASLAGLPE

SEQ ID NO: 63035 - protein, 553 aa, Micromonospora sp. L5
MIPPDQWHPVDGLTLEPNAMKAATMSNENVVVAAGPGAGKTELLAQRADFLLRTGQCPYPRRILAVSFKVDAARNLRERVRRRSGSQLAARFDSFTFHAFAKRLIDNFRPALTGQNALNPDYRIDPDTRIAREQITFADLVPLALEIVEANAYARGGIRQTYRHVFLDEFQDCTTQQYRLIKAAFGQSPALLTAVGDTKQRIMVWAGALDGVLQTFAEDFSARPLPLYQNFRSAPRLRRMQNRMIAQMDPEAVSPAQDLAGDDGIIEVLHFDTEHDEAQAVADLIEGWLKESVAPSEIAILVRQQPHLVAAALGSELRGRGIPFRNEQESQDLAAEPAAALVFNFIRVVADDRQPDAYAELMRIANRLSASEEEASRFDSQLKRMLGTARAAVRDPAFEAEKPGAWSPLVHEFLQLVSRPVLTALLPGYQQGKRLDDVIEQALEAFGRELVVDGNAVQALRRLSEVEAIRFLTIHKCKGLEFEKVVVLGVEEQLFWGSNLTTIMSEFFVAISRAKHHLVLTHASYRKRPEGTATRWDEWRIPRRELLRFSQED

SEQ ID NO: 63036 - protein, 637 aa, Lysinibacillus fusiformis ZC1
MGINVKEVRLRNFRSYKFADIKMPFSGVLIGSNNVGKTSMLYALQVVFERGIRVSGEDIYIEDGETLTNEKKAYIDILIEPSNDSNETPNEFNDTWFELFGELRSENPETLDQFVAIRTIIKFNILKGEYDIERKALIQWPNSEEVENYSDYNRNRITDRLLQSIPVFYLDAKRDISTEMKDKYSYWGKLVRDVDLTNSSLTQLESSLNDINEQIIDESPVLEHLSKNLNKISQTVDTKDSKIIINPVSRKIRDLNRGMDITFKDQKSEGFPISNHGMGTRSWITFLTLVAYIEWKIQKMKEDNIPYHPIILLEEPEAHLHPQAQRKIYKQIQKIDGQKIVSSHSPIIVAQAELENIIHVSKLEGVSQVNYINLQNLFGEEIRKIQQEIFKSRGDILFANAIILCEGETEEQALPVFFKEFFGNEYFEYGINIISVGGKGKYKPFLQVAKDLKIDYYILSDGETETIKKVTKDIGKTFGTEKGIEEYSNVKFLPNECDFEMYLLSEGYDNELIKAVEDLFGESYISSFISKRNGKLQKREKTQDICGECNQHIFVDLIRDYNGEEGFQKALLDCIHDNKTSYSSIIADIIIQESEGDKKVPKIIRELFEDINKNMGILKNEGGIVDVPVDGETTRDS

SEQ ID NO: 63037 - protein, 625 aa, Lysinibacillus fusiformis ZC1
MFPLTEKQLEIVNHIDGSLLVTAGPGSGKTRVLTERIIQLLNLNKKRILALTFSNKAAEEITERLKLGVEEDRFENVFVGTIHSFCLDVVMNRGNLIGLPSGLTLFENDADRIEILKRVFAEMPDIGEFMDENRDKRNLLKNCLNKISKLKQAYISPEVLSDSQIESDILFARIYEAYNNMMLAQKALDFDDILFYSYRIFTERPQIAKSYTRLYKYIFVDEAQDLNEAQYKIIRALCKDFSNLMMVGDPAQSIYGFNGSDSSYMTENFKSEFNPVEYNLVENFRSTKKIIDAAKKIQVNSKSSVVYPLEGELSIIPLENEEEEAEWIKDKVNELLINGNEWIEGAVELEKIGIIARNRYIFNSIEENFKKNDIAYNYGSSSRSVESESAEMKIFEAGLRVIINPYDNVHFNQIINLLHYKCDVKNNRFLDTMLEIDVDMVTNVDKEIFKAVKNSWGILIEDEEGFTKALTEISNVLFSQTQSGDLDEGSQYLINKDIEMWREHWIRYCGQTVVGQRSFSHFRNQVALGRTQMHNSKGISLLTVHMSKGLEYDIVFLVGMCEGTFPDYRATNEQSYNEELNNMFVALTRAKRICYLTYPKYKLMPWGKLKYQSPSRFLKIISDEY

SEQ ID NO: 63038 - protein, 648 aa, Geobacillus thermoglucosidasius C56-YS93
MYISKLYIKNFKCFSEFEIEFNEGLNVIIGSNNSGKTTIIKAIEYIFNRSVSKTPSIDDFNKELDDLDNPPEIIISATLRSSHNDTLEDKAIVASWLTKLESPWEATLTYKYFLPESNWKEYKGAIKEAQNDKERWEILENFLKKYVSRIYGGKIENKIRAETEYLEKIHCETLDALRDVESKMFTGRNPLLKQLLTHFKDNEPNNEKSSDSLISSKQEFQKYSNKVVENIVSRLNRKEILRFAQNTGAAIGGEPDIDGRLEEADVLSILRLIIRNETGIEIPIINNGLGYNNLIYMSLILAKFKMITSKEYGENAKTFPILLIEEPEAHLHPALQYNFLKFLKEEIDKQTLSRQIFITTHSTQITSAVGLDPIICLERDNKQQVQAKYPGRVFSNSPEDQKSKGYVERFLDATKSAMLFAKSVLFVEGMAELILFPVLAESVGCDLERNHVAIVRADALTFSHFIKMFGAGISPDRKRYALQKRVACVIDTDPCRKLKKEEKGKKRTWTSCYPFELEQDPDNYEYKTFSGALTNLEQRTNGCVNVEVFYNKTGKGKTFEYDLAWENYLNPILFQDIKLDDFESLDNSDWLPEDKERARYAASYLKYADRRKGELALEIAHRLKNDKSAKLILPSHIKSAFNWVCYKE

SEQ ID NO: 63039 - protein, 602 aa, Geobacillus thermoglucosidasius C56-YS93
MFQSDAITIDSEYLMDKKDLHKHFKIIAGPGAGKTHWLVKHIRNVLQNSERLGKVSKIACITYTTVGSEEIIERLGTDIQRVEVSTIHSFLYKNIVKPYCYLLRNSDGTTLVNVDEMDGHEENKVSNGRLMEWKKANNLFYMKDDSQIKECLEALEWYLKEDEIVLRVRRNVNKKIDGYYISKDHLLSYKKLCWKRGIIHHEDVLYFSYKILKEFPIILDCLSAKYPFIFLDEFQDTNPIQTEIIKWLAYKGSVVGIIGDPAQSIFKFQGASRNDFIAFSLPNQLNFKITQNRRSSPSIVKILNFIRKHDSLQQTPIREGKSYPVMFMEYNDDNIMELITIFHRERENKNLNNDYCVLARYNDSVKILRDVKTLNVWDALSETDSSKRDRFIRNIILARQFAKEGRYEVAVKQMMKVFTTDRNRSLKSPFRPGQTITSMQKRSLAVSLLEYVMNYPNSIENISLYNYYNDLSLFLSKAGYKITNYGKGKAKDFAETTIMSDLINDLKMPEEKTSTIRTIHKAKGAEFESVLVLLDNIELLELLLNPDINSNEDDIRILYVALSRAEDFLFIATPPLTATQRHQLEELGMKMVSKTVREEQLT

SEQ ID NO: 63040 - protein, 569 aa, Shewanella baltica OS678; identical to SEQ ID NO: 62582

SEQ ID NO: 63041 - protein, 484 aa, Shewanella baltica OS678; identical to SEQ ID NO: 62597

SEQ ID NO: 63042 - protein, 639 aa, Shewanella baltica OS678; identical to SEQ ID NO: 62598

SEQ ID NO: 63043 - protein, 556 aa, Shewanella baltica OS678; identical to SEQ ID NO: 62599

SEQ ID NO: 63044 - protein, 617 aa, Granulicella tundricola MP5ACTX9
MEVFLGDVVYLSQLTIRNFRKLERVDVSFQSGLNILVGPNNVGKTAVIDALRALLGGHDEPLPRLSSDDLFRSKTGEVATAIEFGYVFSGLDLDDEADFLPSLIATGPGKSLEAHFHIRYSDPEKSSGRLRVKRWSGALEENSLNSEMTENLRGVYLPPLRDVALGLRPSRSSQLARLIHILADEAGQSGIEKALEKLDTDLKSHPPIIDIQLAITGHHEKMLGAQLAQVLEVGLSASDFQRFSSRLSLMVDSFDVEQNGLGFNNLIFMTVVLSELARNPEITYRGLIVEEPEAHLHPHLQSILLQYLEKVKSLKKSQKSATENLGEKEPPAESVAEEEVGDEIEGAVQVFVTSHSPHFASIAKLSSLVCLVEGDTGTKSFLPRSVVFDKGKREKLERYLDVTRAELFFAKRIIFVEGAAELMLVSVMAQKCGYNLRDYAVSLISVEGLNFDCFLPLFGEDSIRVPVAVITDADPFTMVGEESVPVYPGANDAIEISANAKVLLQSTDQFIGVFHGQKTLEYDLALFESNRTLMLKALKVLHPGIGATLDKEVAAAKGDAAKAKVLFSGMFERSSNNVQKGRFGQVLAQELLDAKNDCAVPPYIKKAIEHVCCGKKA

SEQ ID NO: 63045 - protein, 574 aa, Granulicella tundricola MP5ACTX9
MNEPSLEQKAIILEKLRPLCVIACAGSGKTFTAVRRMDTICSFLPQRRDNVALLSFSNVAVDLFGKTYRDDIVTMKRTRSSQVCIETFDGFLTSKILRPHANRVMKCASLPFLLSGTESFLSNPRYQFRPKGQQFPIKVDTVEAFLHDGRTVFFGRYQKAQVELERALQTVEALGALGAYTHNLGRYWAYRVLREEPRILKALARKFSQIVIDEAQDVGSSHIAIVELLAEAGSQVTLIGDPNQAIYEFCGADGNYLKRYALRKGVLKKELTINRRSVPRIVAVANSLSKRDDSAFRSTPASHNGAYFVRYDKGEESQVIEAFEKAVLAAGLDLSRSAIVCRANERKKRLRNFGSEVGQGVTKQFAAAAMARDSAGDYQQAFRLTARAVVMLLKSPPDHLCSRMLDVSRYPEYRSLRRIVWGFTRQPESGLPSATLKTASEWHPALLVRVKALLQKLNKEYGFSEMPNIGMKLAKKQLPDLPMVQTNQQKIIVDARLRVETVHGVKGESLDAVLYMAERAHLKALLDGTGSETGRIGYVAVTRARDLFWLGILTADATLHQKELVAHSFIEVSA

SEQ ID NO: 63046 - protein, 694 aa, Afipia sp. 1NLS2
MKLSGISIRNFRRLESVTIDIEDKETIFVGPNNSGKTSATAIFRTFLGERDFKIHDFAVARMADFDAFGASDEAMALPEISLDLWFTIDPNTIAFGRVFTLLPKLSDFTRVGIRLSYGVEDQKKLRDQYSAAYPADQKGNRTKTLSQYLATDNNLSSHSAIRYASLEEKTVEGGGFDVLLNPLEPDEGRRLLKHLVRVDFVDAQRNINDDDSSRSNRLSSAFASYYRKNLEQTDHAAEAHRVIDENNKLLTEHYAKQFDPLISLIKHLGVPSINDRELRIISSLSPETALRGNTELLYVDPGRAHELPELYNGLGFKNLIYMAIQARHFHSQWLLTAENRPLCHLIFIEEPEVHLHAQVQQTFIANVWSVIDQSAKASGQPGLVPQLVVTTHSSHILDAVDFEKVRYFQRCHLSGEVANGGIRNASDVRSLRAFQPEAEVIDDILVSPAESLTFLKRYLRLTHCDLFFADAAILVEGAVEKLLMPSMIEASAARLRATYLTVLEVGGAFAHRFEGLLAFLRIPYLVVTDLDSVAPTGYPSACRADVPDARTSNATLKKLCVQTTIGGLVGMPAADKINEAKDRCIAFQNDVVVADGAAQQSMRPRTLEEAIAYENFALLRAGTLTIGVEIPDSLPEAYQAIYDRIRSDNFKKTDFAMSLLAGTTAWKVPLYISEGLSWLETRLCGAAPDAGTGA

SEQ ID NO: 63047 - protein, 611 aa, Afipia sp. 1NLS2
MTTWVESEADAKVRACLDGHRSFALIAGAGSGKTRSLVEALGRVRDREGRGLRQNGQRIACITFTKRAVEVIKSRLGFDDLYLVSTLHGFLWEQIGRFPDDIRDALRLGRLPALIEKERAKDNGGNSRAARDARAKAERLEQELMGLAEVGDFQYGDVRFSDYLKGRLSHDDIIAIASYLFAHNLTFRRITGLRFPYIFVDEAQDTFEGIVTGLNLVSVGEGLPIVGYFGDPWQQIYDESAGSFAPPEGAETITKTENFRCSESVIRPLNAYRGDVEQYAAGDNKGREGSVEFRLVQSEAPELSRNRYSDAQIERALVRMDAAVAEWGWQDRDDVIKLFLVRQMIARRMGFADLNRLFNGPYASSRAEDDFEAGEHFLLVPLTTTILPLIAAHESGDSRKIIDILRRDSPAFAADGPNAPNTLKMMIDMSNALVGQLADLWNTGPLGDILRFCQDRQIIRVSEKLREHLGRAPRAEEYDAEAHGLDKGDWLADAFFQMDVGQIAPYASFISRNTAFSTQHGVKGEQYTKVLVVYDDVEANWNNYSFTKILTPATAGEPTDGQRERGRKLAYVSFSRALDDLRVLLFTPTPEAARAELLERQLLQPEQISVV

SEQ ID NO: 63048 - protein, 278 aa, delta proteobacterium NaphS2
MKTLHASTVISLQDFQPKNTSDQEGEDNRSETLKFLKQYLKLTHCDLFFADAAVLVEGIAEKLLLPKMIEKEAKELEFCYLTVLEVGGAYAHRFADLFKFIGIPYLIITDCDSIDPNDSRKSCRADTPGAKTSNACLKFFYDKNITVEQLKNKKDADQILADSCCYLTFQKPVTVDGYQVNEKMHGRTFEEAFIYENLTLFKDGKVTTSITVEGDYDKDYEQIYNLVKSANFKKAEFALDIVFLEEDWEVPHYIKVGLNWLKSKMGNQLETIQEAPIS

SEQ ID NO: 63049 - protein, 614 aa, delta proteobacterium NaphS2
MSSNLIPTKADTEIKECIDENRSFSVISGAGSGKTQSLLTALSYIRDSKADELRKKDQKILCITYTNRAVGVIFSRLNFDEIFYVSTLHSFLWTVINRFSTDIRKTLIDHHIPAQIAKKREDDNGGNSKKAVAAREKIASLQEDIKFLQEISDFSYSDNSTFSNYSEGQLSHDDIIAIAGHLITNNAILQKIMAQKYPYVFVDEAQDTFPEIVTALNTLCSGSNLPIVGYFGDPVQQIYDKRAGNFSGPEGFKLIKKEENFRCSKAVVNLLNAFRTDIQQVSAGEVSKLEGSVEIRLVAAEQPEGPRKRYTDEQIDRVSSKFNETLKIWGLHENEETKYLFLVRQMIAKRLGFETLQKLFTGLYASTRAQEDYESGDHFLLKPFLKVISPLLIAHKANNQKEVLDILRNSSPTFNPKGKNATKSLRKMRNLARSLIEELLEKWSNNTLQEILLYCQENEIIEVSERLSQHLERSPRNEEYNKDLHEIDKEEWLVDDFFKMRTGEIEPYVEFINEHTPYSTQHGVKGEEYKNVVVVYDDIEAAWNLYSFTKMLVPEIAGNPTEGQLDRSTRLAYVSFSRAVENLRILLFTADPEGTKNILIEKSLFHEDQVIISQ

SEQ ID NO: 63050 - protein, 570 aa, Escherichia coli NC101
MKREFKLEISSLKLKGFRNFKDAFINFNYNTLIIGSNDIGKSNMLHSLRILLDKSLSESEIEPDELDFHLENGTPCEEIEIIVHFKDINEDAVLSILKGNVSDSGESFIKYSAIKSDLSYKLFIGSSLESLQEINSRYYLKFVNLKYIQSQRDLEKFIRKEKRQLLKIAQQSLTPGERVEDDDLLREISSDLQVINDKISQLIYVERATKDVNDEIKKLAHHYSEYSVQLDTGVIGINEFIDSLQLGANSNGSSVMLGGDGRNNQILLALWKAKSIREHDIDNEVIFYVIEEPEAHLHPHQQRKLADYLTTELPGQTIISSHSPQIAVNFEPGSVIRLLDRAGHTVAASEGCSRYITDGWEGMSYRMSILPAESFFSNGVFLVEGPSEILFYQSLAKSLNIDLDYWNISIVSVDGIAFKIYVAILNALEIPWVMRTDNDISKIKDKWQYAGINRCLSIVGIDNFEHSDVEIAPMDTVTNGEWLKVSKIINEHGVYLSKIDLETDLVEELNTPVLNALDKKSNQSAIKYLQKKKALRMRELLKIIRKDLHKLNAGNLVKPLNHLVKLIKGE

SEQ ID NO: 63051 - protein, 541 aa, Escherichia coli NC101
MSVFSPTHQQTLAIDYTGSMVITACPGSGKTTVIKEKIRNITASLPDHKGVIAITFTRKASSELERRCKSEGHDVKHSFFGTIDSFCLKELIIPFLSRLWGGTPTECKVLKRLDPPYSYFIENNFSGTPSIININEDSGYKKLYDNGILWMGSFSALALKILNESSAAKRYIKARYSHIFIDEYQDSSLSQHQLFLKINELGLYSIAVGDVWQSIYEFRGGNSKLLLELVSKTEVFKHFEINFNHRCHPSISNYASRLLNPSYNLLPTDDIRVFRRRLSGNLKDNAVTISSWISDWLESGEWELEKANQIAILARKEKSLTRFCSGLNLNFRLYIDTPLDKIGTECSDLYKDLLAYKYGSINTVQEFINKVFDGVIINDNIKFFLRKKIKEIKTELKYEDLIHKFHDIADILGINSTEHTDEAVIKTISNEVLVKQFKPLDDNELQVMTLHKSKGLEFKVVFHLDLDEWSFPYRKPGSEDKYTPLYPTLQQELNLHYVGITRAENCIVLINSSLRENSGGEFKKSDESYFFKLPQLNGLYN

SEQ ID NO: 63052 - protein, 655 aa, Lactobacillus iners LEAF 2053A-b
MEFNDGLNVIIGANNSGKTGLIHAIRLLSSPSDININDFNKNNLINYKEKYIDEAPSIRIEYDIQHEIFEEDTTDESILKILPFLGMEKMAESRISTEKDTKYNIYATIQATFCLDSKFTEEYKKEVQDISNFDDYFLMLNRYINDHYLWIYTNGKTETNIDSKLAKKIFDIQYINAERTGTDVAIEIKKDISSLLKDSEKKREYDALISELNDKLKELLEPSITKMSNLFNYEKNEIGLEKGNISITSQINSKLSAEDSYITEVKDTKFNYNLPLVYNGLGYNNLVNIYMSIKLSDVKKGKDFKILCLEEPEAHLHPAMQYKLFKFISNLNKSNKLNQQVFVTTHSSNITAVSGLDSMYIIQYDRQGEVSDCFQQSLKRQLTDKDDSTFKSDAKNHLNKFLDVTRSDMLFADKIILVEGIAEKILLPIFMEKLGYPYEDDHISIVEIGGKHFEYFIELFNGNPVKKKILCITDNDFKWFNDDGENCLFKEYLEYEAPHLKKLISRYKFNEFKIVTQIKGGSTFEDELFIENFKNEDIVSSLFGLPLSNTMKEFCKNNGFSINDWIKNKELIDGRSIKLISKYLDCYKKKIELDPENQEFYEKLIFSKLFLHYASNKKGDVALSLITDKNFFDDKDISKLIVPGYIMEGLEWLNQ

SEQ ID NO: 63053 - protein, 642 aa, Lactobacillus iners LEAF 2053A-b
MVKSITSGDILTKNELLNHIKIYAGPGAGKTHFIVENIKNIISTNKLITNSENRKILCITYTNKAVDEIANRLQGFNEYIEINTIHGFIIENIIKPFQTDLINIMKNDFNIKVCNGSTISSQVEGLSLLHGIDKETIYKYINIEKNTSDSYSYSKMKMSEVQVDVDKFINGIRLNKDLKSSLTNPKNFSVEDIVPLKKYIWSEVRKLTHDEILYFGYRIIQTNPIALYTLRVKFPFIFVDEFQDTNPIQTEIIKLIGSKSTKIIIVGDVAQSIYSFQGAKVSDFLEFNINNEVEEYSIDSNRRSTENIVNFCNFIRCSDKNIFQSSIRKYKDDKTIIEKISIKFLLGRSDEVKRTLYSILNDNGVILARSWVDAFKFIQNIEENQSVILKKIYNSYYNTPIMIRDEIIKHNNVMWVKAFKIIFNLWEGYNNKSFGDIILTLQKYFQISPSKIEINHIYSIYEFLKELFIDVSSDTLTVDIIEKFNSLIFQKKNTILKKLFGINDIGIYIFSEYDKEDLKQNVKCLKWNTSYCLFNEVFCENSKYMTVHQSKGLEWDKVIVSLNPNSFDKREGVDLNKMFTSPVLVNETALDEFTRLFYVACSRAKNELYIHLEDESLQSVIRSSLENFQEKSGIDINYEFIQ

SEQ ID NO: 63054 - protein, 752 aa, Streptococcus vestibularis F0396
MYLKSLSIKNYRKYGEKEQTINFAHSKWPEKTDDESESKKIDITEQYISKSSSLIVGKNNSGKSTIVKLLNTLQNTKSGSRNIFKYTDFNLKMLSDWYQENIESKSEEEIKKLDKFPFLEFQLVLGIDDENDLISSFEDILVVSGIKTVETQENQDIAEVTIDIKYEVADERSFREELIKLKNSNSETDNQQDKNIVYKKEIQYRQFLGLFSSNYFVLNFYPIGREEPTKEFSLSSLLKVETIEANTVKNDKTLSQAYNKIVSTYIKNNDITTIDKLVGDINYQVKDMVDTNIKNILQSAVSSIESTKNLKMNLHPDVTLEKIFANSIIYEYQEGNNNIPESQFGMGYTNLMVIIAKIVDYIELYSKKDINGSVNILCIEEPESFMHPQMQELFIKNISKAIATLLGKKQQLDTFQIIITTHSTHILNSKIQSGNTLNNISYLGQAGANNIIKNISDDAIVSGRDIDKKAYEYIKKYLRLEVSDIFFADAVILVEGVSEETYLRYEIDKHPILKNHHIKVYRIDGAYAHQFISLLDLLEIKTVIFTDLDLKRSEDEKKIEIKSKVFEDPSDFDIIPSNIDDLEGKYGEMGSSLTTNGTLQYFIKTELNDENAKFGEINSKIIDMLTDKEELIVEYKNISVYSQGKINRYYATSFEEAIILTNAKNSEGSHKNKQSLIKLLQFVHPKKKYFGDIDESSEIADKSYMYQAQLSDGKSKFSTGIIYLSLTDDEFNLKQPKYIESGLKLLCDYFEE

SEQ ID NO: 63055 - protein, 318 aa, Streptococcus vestibularis F0396
MAFTINPENKQLEIDIQQEINECLDNFESFCFDAGAGAGKTYALQKSIEHILKSEGEILKLSNQKILCITYTNAAKNEILDRLGKNSSVVVSTIHEFLWGFIAIQQELLTEEHKNKIKGELEKIEQKINGNSLSSNVEQNEFRERICDEDFLKVFYSVSSSPAKTFKEVIKGFDEYFSPYLSSVKSFRDFVKDINKKYKLGITLKEIEDKKSKKVIYNPVQNRDKLENYVISHDTLLLYCENIITSQNLLKRLFSDRYPYVLVDEYQDTDEKVVNIIDSIREYSNSKQNFVVGFLETPYKIFTVQEWVFCQIKKNIRV

SEQ ID NO: 63056 - protein, 662 aa, Clostridium butyricum E4 str. BoNT E BL5262; identical to SEQ ID NO: 62980

SEQ ID NO: 63057 - protein, 600 aa, Clostridium butyricum E4 str. BoNT E BL5262; identical to SEQ ID NO: 62981

SEQ ID NO: 63058 - protein, 653 aa, Escherichia coli 2362-75
MKIEKIKLQNFRCFGHEVVELNFEEELTILVGGNGSGKTAVLQAVSRLFGTTSAQRSVQRRDFHIPIDRQELQSGDSLFVEAVLAFPELEEQDASPLDAVPEFFNQMAASGEGEPLKARIRLQATWTDDGTPEGAIEEDIRWIRALDDNFEWDDCSRVQAVERSSIQFIYLPANRDATTQVTALLKGRLWQAAKWSTAFRDASYVNAGQIQSSFEEEEPSKFLLERLSKRWQQVHEADTDSKPRLRLIENRFEELVRKAEFTFTPDEEGQERRLSELSDGQRSLFHIALTAATLETEREAFSLPADDSSFEQDKLRRIHLTILAIEEPENSLSPFFLSRIIKQAREIGALPSAQVLLSSHSPSILSRIEPEEVRYFRMDRSARCSSIRELTLPEDDVEASVYVRLAVKAYPELYFARFVILGEGDSERVVIPKIAEEMGVSLDPSFVPVVPLGGRFVAHFWRLLNDLEIPHATLLDLDLGRRHGGANAMRSCLQNLAAIGSNLGSTNGANAAQLTDQQLYNEGLQGQWLQAFRREGVFFSYPIDLDFAMLLAFPTAYQVANPGGNGPQSSAAAIQAKKVSTLKTGGNPALYTAHYDDAFKWYPYLFLSRSKPETHLAAFSRIAGGGVTASAPVELRALIEYVTDKLNLSGENE

SEQ ID NO: 63059 - protein, 621 aa, Escherichia coli 2362-75
MTRVSRDDWVPQGVGGLEGRAWEALRETDSSILVTAGAGAGKTEFLAQKATYLLQTGICPAPKRILAISFKKDAAQNLAERVAKRCPRDQARRFDSMTFDAFTKGLLDRFRPALPEPFNAPGTYQIVNPFRRDYDDFIERHGYHGVSAQQLERRLLLTDLPIDLSNGSEVHRALADYWHEQFFGGDEISLSFPMINRLVKLLLQENSYIRRALQATYPIVFLDEYQDTTYAQYDMLLTAFDGSDAVFTAVGDDKQRIMGWAGAMNDAFDQFENDFAARRITLLSNWRSHVDLVRIQHEIARRIDDNVEEVQAQGTREIEGEVSAIWQFRSADDENNYLAEWVSREVQSERVAPHDVAILIRMRADQVEGEIAPSFAARGLRIRNAARSVGEIQIQDLLGEELTGIFVPLLRLGATERSPENWEQTQQNYLFLEAADPDNDLTQERLLVKLEAFVRKLRTELAHRQPSPDSAEEIAEMLLEFVGTPRLRQSFPAYQRARDFERVWSGFVTLLKECAEHSSSWTEALDEFEGIGQVALMTVHKSKGLEFHTMIFYGLDNQTWWSLTPQRGEELNTFFVAFTRAKQRAFFSQCVERGHAIGWIQQLLAPAGVETIDGTTILGTT

SEQ ID NO: 63060 - protein, 770 aa, Methylovorus sp. MP688
MHLHSYRLRNFRRLKDAHIELADDISIFVGSNNSGKTSATQAIHAFVTGGRDRFSLYDFSSSCWKAFDEAGGINLAEPVPDGLSLPSIELDLWFEVAASDLYLVIPLLPSTAWEGTKVGIRVSLAARNPINLIQNYQEAKAKGREQAAELPPGSEYVPWPRSLTDYLQRELKSEYELRYFILDRTHFDENFREIGDYIPEELSGEPGGGTILKSLIHIDSLGAQRHLADPNPEAGGRSEDLSKRLSRFYKRNLNQRQDDHTALKALFDSEQALNIHLDGVFKPMLDRLAKLGYPGINNPRLKIMSALDPAHVMSQDARVHYQIGDGEDIATLPDSYNGLGFKNLIYMVVEILDAQARWGTMDNRPPLHLIFVEEPEAHLHAQLQQVFIRNVLELLNIEGDDGSIFGSQMVITTHSPHILYERGFKPIRYFRRKKVGNEQLTEVLNLSAFYQAQPDDRDFLEKYLKLTHCDLFFADAAILVEGNVERLLLPLMIRKVAKTLRSACLCILEVGGAFGHRFQSLIEFLGLTTLIVTDIDSVALVAPEAGDAVDDEEVEEFEVPADEEESLARHDQDEGQNPVGEPVAAPLKKKYGKACLPNQPGAATSNQTLIKWLPGKLTIEDLRNALEADKTHELVDGAKVRVAYQTERAVTWNGSTENLCGRTLEEDFGLENPEWSQAAARKPLGLIVKGGIADPSALAKGLHQKVSRKNFDKTKFALALLTENEDAWHVPAYIRDGLVWLKGEVQIELETLLPDAVPVAEVGSIGAEHD

SEQ ID NO: 63061 - protein, 648 aa, Methylovorus sp. MP688
MISRANKPDTQADIDLRNCLGNVPPRSFIMKAGAGSGKTTSLIKGLSSAIQIHGEKLKKARQRIACITYTEIAAGEIWRDVGSDPLVHVSTIHSFMWLLAKPFQNDIRVWVSARIAEKIEALVQKQASYGPRVQQRTKDKDARDLERLHRQSGRIAAVKGFRYGTGSDYVKGILGHDDILRLVPYLIAERPLFRTLLARQFPFIFVDESQDTTTEVIEALKTVEREPGVTLCLGFFGDPMQRIYATGTGLVEAEPNWADIPKPENFRCSTKVLNLANAIRRDGDDLVQVPGQRLGPEGIRPTPEGSAHLFILPADDTRDANLARVRDWMAAQTGDNRWRLGDGNEEQIKLLVIVHQMAAKRLGFGELYSALNSKAPAAFKDGFLDGSAWPLSPCVKFLIPIAVAHTEGRQLEVMRLIREYSPLLEKETLAGANVAERLKTLRELVVSIAEGIAGNSNVTIGDLLKQVYAAGLLILDPRLASYLDPEAAPPAPTAEGEENDDGQEDDESNKEMASMDAFLACPASQLLAYQTYISERSPFSTQQGIKGAEFDRVLVVLDDAESTHFQFSYEKYLGLKAPSDTDRKHIEAGEETTVDRTRRLFYVSCTRALKDLAVVLFTADSEQAEAHVRQLDLFEDDSIHVQAVFEES

SEQ ID NO: 63062 - protein, 690 aa, Escherichia coli O83:H1 str. NRG 857C; identical to SEQ ID NO: 62940

SEQ ID NO: 63063 - protein, 577 aa, Escherichia coli O83:H1 str. NRG 857C; identical to SEQ ID NO: 62941

SEQ ID NO: 63064 - protein, 646 aa, Alistipes sp. HGB5
MYLSEINISGYKLFGSDFRATFNEGLSVIVGENGSGKSAIIDAIRLLLNEDEYGRIGISASDFHRPFDKPAKSLGSDNIKISARFNKLSDVEQVAYLPWINPDNMIEALLNFNAENKQDNKGRYKRNIWGNKIASGIFEWNLLDAIHCIYLPPLRNALEKLESYKGSRLARLIKNLSPAIPEGEKHPLETEFSTFQQKLLEDETIKKVDATIKRNIIESAGTIFGQDAMIQFAEINFNRIVERLRLLFYPIIPNAGKVNEYEMFRDLNENSLGHNNILYLATVLAELEGLSKNETLHKILLIEEPEAHLHPQLLSKLLYFISSKSKEANIQVIITTHSSIVASAVGIDNVKVLSCTGLGKNPDYISLSECGFNDNCKFFLSRWLDTTKCALLFAKNVLFVEGIAEMLLLPELAKVYFADLIRQGRLKSELNTLEDFGISIINIGGVYFDYFMQIFGGYTIKKEGELTRCASINVRCAGITDNDPPKDTAPIKYAEGDNRLLFMIKQLEQNSKNARLFTNLKTFEYDLALETGNIIPLFNLLLEKIDTNGATKRKATEYSTIDWIQKERDTDKENMEAFFTEKAEAAKFLLDTIENGTFITKGEFAQLLALKMVNEEIRLIVPTYIKNALDWLVEPYINKDDEKEAK

SEQ ID NO: 63065 - protein, 634 aa, Alistipes sp. HGB5
MKKKRNRIYEQLGLSIDTNDPEIEKLSENQLDFILHDISHSCYLEACPGAGKTEVIGLKSAYEIRTWKEVFCGFCIISFTNKAAGEIKSRIEKYAGNRASSHPHFIGTLDSWIYNYIFIPFCTSDVQNHKVSIIEVGSNANFLNAYCCKTGYITATRTIPIFANKYYFDCISQDFVIIIDRAKVSLSDYLNSDAFRAYRADKDWLTNKKVYESFMKTKNAFNEKGFFTFEDVENCCFKLLMQRKEIATRLATRFPLIIIDECQDLSPVQIELLSILRENGTRLILVGDINQSIYGFRQANPEYLLKYVRRNDIVKLSLTDNYRSNQSIVNCFSHIIPSNPPIKGKRQALFDRSVLVWEYDDDTLFTLPRRYVDFLKQSDIAPCNSSILVRSNNFRNKFMGNMIDENNPYTLLAMAIYLWKKTAKTKTDTQLSIYYAGKYLSQVCYNGDGNKRDFFCPSNFESLTWRKLIMNILAGIDDLLFPFENLQGQKYKWCEWARKARTYFDKLKNDFPECSDNIDNAKTKRLPNGYGNEEVLLYLEAMNNINELPITTIHDAKGQTFDSVLLISEKDKHSKGGHFEQWFNSNNVEYKRLGYVAASRAKHLLIIAVPILTQEQKQHMIEIGLIENPVLALF

SEQ ID NO: 63066 - protein, 670 aa, Clostridium sp. HGF2
MCRQKGQNMQLSKIKIKNYRLLIDAELEVEPKTTLIVGRNNTAKTSCFECIGNVLDGAPFSFNDYPLQKRENLYTKIALFMEKKITFEELAKQLEPISIEFLVDYSLDDPEDNLGALSPFIIDVDVDTTTALIRVEFRLKADEKALWKLLEESYYKDGVFTLDDDTHNAIVANFYKLFELTVYAVNPKNPEEKQVKKHKELKELFPFHIIPAERLLGEDGTQNSSLSALISDFFDMSEDELDPSITKKVKELRSIVENANKSVQQQSNEILSTLVSSSVGFGYPNSEELQLGVTTQLSIDEQIKNQTQLSYTAGASKESLPSKYNGLGYKNLIKMEFLLAAFAKKVEKCGTACIPLLFIEEPESHMHPQMQHAFAEYLEAFLGKITSVGIQTFLTSHSAHVANTMVFSKIRYTQKTKDGVTYKNLSTFAQENPTHIDFIRKYLTLTKCDLFFADKAIFVEGASERLLLPDMIEKCAKAGDFDSQAYKLPAQYYTLIEIGGAYAYKFIPFIEFLGIPCLILTDLDSVLGTEGKNGRTYYKSVPVYLGETTSNETIKWWWRKSKGLSEDDKGKIPITEITSMTADEKTKGKCHLEFQTKEQGLCGHSLEEAIRNVNRAHYELEDTITEDDIEFSGKSKTDFALDLVYECDDYTIPAYIKSGLKWLNEQKILE

SEQ ID NO: 63067 - protein, 581 aa, Clostridium sp. HGF2
MIENLHGRNYELAKAEADKVDEQIIEVLQAGHSFRVEAGAGSGKTYSLNKVIEWIQSNKWAEYSRKKQNVICITYTNAAVNVIAERLSKDSFILPSTIHSFAWNAIKQYQSFLINIVTNAPDFLPDEGDFLKITEVTYTLGHRYKENGIQYLYHDDVLKLFCILLDNAKFRRVFSDKYPLILIDEYQDSYSPIIERFIKYFIAEEKGPQFGFFGDAWQTIYQSNKACGVIEHDKLKVIKKGSNFRSAPKIVDLLNEIRPDLPQTSAIDDFEGEVFVITCEDYTGPRRADRNFKNELPPEELKSRLNKVTEKIKQETPADEELKVLMITHKVLATQQGYEKLLDILNDGLRDKEDPFLLFFMETVEPIYHALNTSDMQLLFDTLGIKRYPITKKAEKNKWKELQRQLDEARKKRAIDVFEIINRTKLIPIPPKLDGWYHLYQNTPETIYASNTSIEAFLNLDYAQFIAVKDFLHPEAQYSTEHGVKGEEYDNVIFVISKGWNQYQFETYAPMITKKAVIPSGKQASFERNRNLFYVCCSRPKKRLIFFVTVPIDSTFKSFLVELVGEQNIFTFSQYIERKID

SEQ ID NO: 63068 - protein, 611 aa, Pseudoalteromonas sp. SM9913
MSILVNSVRISGFRGISNLELSLPKVVVLIGQNNAGKTSIIKALQLAIGDYSRHLTDEDFYIDCYDNVRSEIIVDISIVPVDGSSQRANIFADEWVEVFGDWIQADLEENDFVAIRTICEKDSIKGGFKVSRYPLSRWPGFENWTDESAKINNKISKRIDAIPFVAIDAQRDIHQELREKTSYIGKVLSDISFESDDKDALEELIAELNESAVEKSSVLSELKTHLDSLSQSFEGQGQADITPFPKKIRDLSKRFSIHFGEDDSNSFSMEYHGMGTRSWASMLTVKAFIDILEKKHVEEEECFFPLIAAEEPEAHLHPNAQRTLYKQLTDIKGQTIISSHSPYLAALANQQDLRVITKNIDQGTRVFSLNEALEPEDLRKIHREVIHSKGELLFSTAIILSEGETEAQALPLLFERYFSQAPFNLGINFIGVGGSGSKYKPYLTFARDFNIPVFIFSDGEEKPIKGLQKQFNSLFGGVDVTTATNVTILEGTDFEGYLLNSGFQGEIEAAIKAHDGDNRITKYISNKQGKQTKAVISDKPPCETCNQPIYEPGLYDYSGDEGYKKAILEILDSDKTKYAKVVADHLSTLEPEDLPPKIIALFEQIKAGVKL

SEQ ID NO: 63069 - protein, 638 aa, Pseudoalteromonas sp. SM9913
MISLSPSQQEIVEFDIKSAIQILASAGSGKTRVLTERIRYILNNTKKDKVLALTFTNKAAQEMQERLADFVGVEERTWVSTIHSVAQSIIESYGHTIGLSSDLHIYERDQDRMELFLQSLRDSNINIDEYLNINDPAEKRKRNQVMQDYMDAFAEIKRELLTERDEIEVRFPNEPRFYDIYQDYQEALLNSGGIDFNDILFLAYKILNKHSNIARTYQVMYKHVCVDEAQDLNKAQYELIKVFCGERIKSILMVGDPNQMIYGFNGSKDYFEKDFLNDFKPKTFTLRENYRSSKEVIKLANVIKPNSQINHEAAFNGYAIIQPCFNEEVEANWLIRGIKSLLEAKEHYEIEGEISLEKMVVIGRNKFVFNKLKEKLDENNITYHFNKGERQTEPDSLFGKILDYAIRLKLNPKDWIDGKKLCSLLKVQQPNEWNDNNLLLTWSQAVESSALPLAQVQAFLLQEIHKIDDEQPNIRKFYMALKDKLGEYSSAELTEKEQIELVISVQELDEFQKRWTTFKRRSLGVSLKSFRNAMTLGKLDSATQGKGLTLSTVHTMKGLEKDIVFLIGMCDGVFPDYRATSPKDLNEEKNNAFVAVTRAKRWLYISYPQYRMMPWGSEKHHNASRFINKLAANPMINE

SEQ ID NO: 63070 - protein, 566 aa, Escherichia coli W; identical to SEQ ID NO: 62788

SEQ ID NO: 63071 - protein, 541 aa, Escherichia coli W; identical to SEQ ID NO: 62789

SEQ ID NO: 63072 - protein, 696 aa, Ruminiclostridium thermocellum DSM 1313; identical to SEQ ID NO: 63018

SEQ ID NO: 63073 - protein, 579 aa, Ruminiclostridium thermocellum DSM 1313; identical to SEQ ID NO: 63019

SEQ ID NO: 63074 - protein, 655 aa, Lactobacillus iners ATCC 55195
MEFNDGLNVIIGANNSGKTGLIHAIRLLSSPSDININDFNKNNLINYKEKYIDEAPSIRIEYDIQHEIFEEDTTDESILKILPFLGMEKMAESRISTEKDTKYNIYATIQATFCLDSKFTEEYKKEVQDISNFDDYFLMLNRYINDHYLWIYTNGKTETNIDSKLAKKIFDIQYINAERTGTDVAIEIKKDISSLLKDSEKKREYDALISELNDKLKELLEPSITKMSNLFNYEKNEIGLEKGNISITSQINSKLSAEDSYITEVKDTKFNYNLPLVYNGLGYNNLVNIYMFIKLSDVKKGKDFKILCLEEPEAHLHPAMQYKLFKFISNLNKSNKLNQQVFVTTHSSNITAVSGLDSMYIIQYDRQGEVSDCFQQSLKRQLTDKDDSTFKSDAKNHLNKFLDVTRSDMLFADKIILVEGIAEKILLPIFMEKLGYPYEDDHISIVEIGGKHFEYFIELFNGNPVKKKILCITDNDFKWFNDDGENCLFKEYLEYEAPHLKKLISRYKFNEFKIVTQIKGGSTFEDELFIENFKNEDIVSSLFGLPLSNTMKEFCKNNGFSINDWIKNKELIDGRSIKLISKYLDCYKKKIELDPENQEFYEKLIFSKLFLHYASNKKGDVALSLITDKNFFDDKDISKLIVPGYIMEGLEWLNQ

SEQ ID NO: 63075 - protein, 642 aa, Lactobacillus iners ATCC 55195
MVKSITSGDILTKNELLNHIKIYAGPGAGKTHFIVENIKNIISTNKLITNSENRKILCITYTNKAVDEIANRLQGFNEYIEINTIHGFIIENIIKPFQTDLINIMKNDFNIKVCNGSTISSQVEGLSLLHGIDKETIYKYINIEKNTSDSYSYSKMKMSEVQVDVDKFINGIRLNKDLKSSLTNPKNFSVEDIVPLKKYIWSEVRKLTHDEILYFGYRIIQTNPIALYTLRVKFPFIFIDEFQDTNPIQTEIIKLIGSKSTKIIIVGDVAQSIYSFQGAKVSDFLEFNINNEVEEYSIDSNRRSTENIVNFCNFIRCSDKNIFQSSIRKYKDDKTIIEKISIKFLLGRSDEVKRTLYSILNDNGVILARSWVDAFKFIQNIEENQSVILKKIYNSYYNTPIMIRDEIIKHNNVMWVKAFKIIFNLWEGYNNKSFGDIILTLQKYFQISPSKIEINHIYSIYEFLKELFIDVSSDTLTVDIIEKFNSLIFQKKNTILKKLFGINDIGIYIFSEYDKEDLKQNVKCLKWNTSYCLFNEVFCENSKYMTVHQSKGLEWDKVIVSLNPNSFDKREGVDLNKMFTSPVLVNETALDEFTRLFYVACSRAKNELYIHLEDESLQSVIRSSLENFQEKSGIDINYEFIQ

SEQ ID NO: 63076 - protein, 659 aa, Mobiluncus curtisii subsp. holmesii ATCC 35242
MAKMRLSKIKIKNYRLLIDAELDVDAKTTLIVGRNNTAKTSCSNCINTVLQGNDFSYNDYPISKRENLCNLFFQFMKKELSYEDLCRGIQPISIEFVVDYSLDDQDTKLGALSPFIIDVDVDTTTALIRAEYQLKTDESKLRELFKDSCYSNAKFAPKAEDMHAMLASNFSRLFGLIIYAVNPKNLEDWQVKSHRELKDLFPYYPIPAERILGEDGTQKNESLSSLIADYFSLNEEDLTPDIAEKVKELRAVVDGANKNVQKESDRILSDLVSKAVGFGYPNVEELQLGVTTELKIDDQIKNQTRLSYSSGAGDESLPSSHNGLGYKNLIKMEFLLAAFARDVEKKGDACIPLLFIEEPESHMHPQMQHAFAEHLEKFLDKITTVHIQTFLTTHSAHIANTMDFSKIRYAKKSKSGVVYKNLDIFVRENADNMDFIKKYLTLSRCDLFFADKIIFVEGASERLLLPDMIEKCEKEKLFDSEKYKLPAQYYALIEIGGAYAYKFIPFADFLGLPCLILTDIDSMIDGRTKAVVSKGKTTSNATIKWWMRKIKGIPQNSKDKIYLADIAAATDAEKTLGKCHIEYQTSENGICGRSLEEAIMNVNRSHYGFTEPVAEEDLEFTEKSKTDFALNLICNNPNYSIPQYIKNGLIWLNRQPVLE

SEQ ID NO: 63077 - protein, 581 aa, Mobiluncus curtisii subsp. holmesii ATCC 35242
MSKNYEYLNYNIAKAEADKVDEQIISALKAGRSFRVEAGAGSGKTYSLNRVIEWIQANKWNDYRRQKQNVICITYTNAAVDVISQRLSQDSFILPSTIHSFAWNAIKQYQSTLISIIENDASLTTTETDFSKVLEIRYTLGHRYVSQGVHYLHHNDVLKLFCTMLDNAKFRRVFSDNYPLILIDEYQDSYKPIITRFINFFIAEGIGPQFGFFGDAWQTIYQTNNACGAIEHSKLQEIKKGSNFRSAPRIVKLLNDIRPDLPQQSAIDNFEGEVVVVTCDDFSGERRTERTFKDDLPAEELKSRLFQLSEHIKKNVSKDENIKILMITHKVLATQQGYERLLAIIDDGLRDKQDPFLLFFMNTVEPIYEALSTSNMQLLFDTLGIRRYPITKKADKMKWKEFESQLKKARNGRAIDVINTIVETKLVPIPSLVDGYYHLYFDAPDTIYGLDATIQDVLDLDYSQFKAAIEFLYPESEFSTEHGVKGEEYDNVVFVISKGWNQYQFETYSPMITGKVPIPVGKEASYERNRNLFYVCCSRPKKRLFLFVSIPLNSTFRNFLIDIVGLENIYTFNEYLDNKAK

SEQ ID NO: 63078 - protein, 696 aa, Gemella morbillorum M424
MILRKMKVKNFRLLKDFELEFKDELSLVIGKNNCGKTSALIILDKMLNSSKVMWEDINLECQKELYEKIIAFDISEQEKVTSLETVNLQLFIEYYDNDSYANIQKFMMDLNPENNIIVLEFISLIAVKKIIELKNIISEKNIEDFKSFSKFMSKNFANFFETKKYSRGFDVEANKITQDRSEEIDNKDIQKVIKVVGIRADRAVSNDDRNHVLSGLTGKYFSSYKAAKDESESVFTRLEEKLEEADKELYKIYNGEKSEGEEPIDGIFSDVIDVIKTYGGAENGIDIAIESSISEKNLLSDNTNLSYRQGVDCSLPETYNGLGYLNLIGILFEIETKIQELFEQPADINLLYIEEPEAHTHPQLQYIFIRNIKSHIKAHRNKLLKEKNKQLQILITSHSSHIVSECNFDDIIYLKKNGNTVIAKSFNSLKEEYGGDEQKGFKFVKQYLTINRSELFFADKAICIEGDTERILMPMMMHKIDSKEKPKADLIPLLSQNISIIEVGAHSHIFMPLFSFLGTKVLFITDIDSVKAEKKIDKNGKERTVYTSCHPDEGTHTSNASIKEFFKDTGIDILNNQFKELVGKNAEDKIKDNMRIAYQIPESDGEYQASSFEDAFIALNKDFILKNKEGLCEYGALKDFSNDEIENGDYYNFALNNVKKKSGFASSLLYFDDENGEEDEKWTVPHYIEEGLLWIR

SEQ ID NO: 63079 - protein, 635 aa, Gemella morbillorum M424
MDTLTLEKEVLEALQCIKNGENFILEGGAGSGKTYSLISLINALTEELPDIKIVCITYTNNAVAEILSRIENENIWVSTIHEFIWDLIRKYQNEIKDILVELINDEGEKNFKKPKGFDDDLISKDYFKNLYVDYDEYYSVTPNVENKVKISHDHILIVAEKMFEKYKKIADILKDIADCIFVDEYQDTSPLVADILLKHLEQSGKKNVIGFFGDSMQSIYDDGVGNLNQYSLTKIVKTQNRRNPRVVIEVANKFRDDDIEQVPSEDINAPNMENGTIIEGSIKFLYGNETDEFISVKEKNIFESWDFSDGKQTKELRLTHKYNAEMVGFKDLYDLYNADLIITLISKIKGKIDKENLDSDKTLGELALEVKPTYKKVELLDQINGNELYQPIYSVLEGMSWEEAYEKCRVTKESLMSYKLNGVSGRYEANSYRDRILRRLDILEEIIELYEANKFNDFLRITKFSIHNRNDKICLKQAIDYLVSEDNQTIEDVLKFAEVKGLLKEDELFNDYILSKGFYLWERIKKITFNQYRKSILYLKEFSPICTQHSVKGSEYDNVLLVLESDWNKYDFNTLFGKGSSNSNVQLRTKKLFYVCITRAKKNLIVYMPTNDSDILEKAKEFFGEVNVMDISSIE

SEQ ID NO: 63080 - protein, 679 aa, Streptococcus australis ATCC 700641
MEIKKIYIQYYRLLNDFSLELKNDLSLIVGKNNCGKTSVLSVLEKIFNKNSNRNLVWEDINLNHRREIFENIKRVSDIPDSELSSILGINLQIWIQYSESDSYQNIQGFMMDLNPENNFIILEFSYIIPTQKLREISSLTCDFADDFSKFESFMKKNLNKFFEIQIYSRGYNPITQEMTEEKSDLHEMKDVHKIIKVRGISASREVSNKENNHSLSKTSNRFYKLNNGEEINSKANNLLQSAILKADETLTRAYSGDDSVEGIFTSVFERVKRFGGNDSEAELAIHSSLSEKDILSNNTTLYYKHDDSLLPETYNGLGYLNLYGIIFEIETLMADIKNEPADINLIYIEEPESHTHPQLQYIFIKNIKDLLKEHNDELKESGDFSCIQTLITTHSSHIVSDCNFDDLIYFKRDNGTAVSKAFNSLKEEYGDEQLGYKFVKQYLTLNSSELFFADKVICVEGDTERILIPTMMQKVDTTNPINQASNTMPLLSQNISIIETGAHSQVFRKLFDFLGIKVLIITDIDPANKNENNRLTSCSAVDATSTTNASIKNFFDISGDEVFSIVAQKSLAEKITSDGRIRIAYQIPEDENGYQPASFEDAFISLNKQFIIDQKAGFIQFEALKDFDDSEIEDFYKFARDKVNKKSAFASSLLYFEGEENTWKVPKYISEGLLWLRKQ

SEQ ID NO: 63081 - protein, 640 aa, Streptococcus australis ATCC 700641
MVEKTVEPEVEKVFEVIKQGQNFILEGGAGSGKTYSLISIIEKISMEEPKKSIVCITYTNNAVAEIRSRIINDNLRVSTIHDFIWHVIKNFQKEIKECLVELINDDEQILFVAPKEVLGEELISLDYFDSVRVEYTEWYSMSITEQNKVQISHDHVLIVAEKMFSKYKKLSDILKDTANYIFVDEYQDTSPLVVKILLEHLRKSTRDNIVGFFGDSMQAIYDSGVGNIDSYGLEKIQKNQNRRNPRKVINLANKFRSDGLVQIPSSDVAAPNMNNGNVIEGTVKFIYGDGITHLEDLRNSELFKELEFDIPQKTKELRLTHKLNAETAGFSKLFELYSSDLLVKLITDMKKKFNASELVDKGKTFEELVEEAQIVVRKGGPLIIDIVKSIPELLAIYEEIKTFSFEEVISKSKVNKDSLLAYKFNGLSSRYEAGTDRDRILQRLDLIFELIELYKIGKHNEFLRITCFKITSSADKINLSKIMKEISDNDITIGKVIKLAERTGLISKDDLFTNFIENKGYYLWLRLEKLPFQEYVNSIAYLREYVSVITQHKVKGSEYENVLVLLDNGRWNQYNFNSIFGKGSSNEKVQNRTKRLFYVAITRAMKNLIVYMPSNDRQIVEKAKDYFEECDIVDVLSLVD

SEQ ID NO: 63082 - protein, 639 aa, Pseudomonas savastanoi pv. glycinea str. B076; identical to SEQ ID NO: 62732

SEQ ID NO: 63083 - protein, 560 aa, Pseudomonas savastanoi pv. glycinea str. B076; identical to SEQ ID NO: 62733

SEQ ID NO: 63084 - protein, 328 aa, Pseudomonas savastanoi pv. glycinea str. B076
SPYFLARIIRQVRSLTDQSRAQAIITSHSPAVLSRVNPREVRYCRCEPKTRVSTVKKIRFPVNEVDASKFVRGAMLAYPELYFARFVLLVEGDSERIVLPILAEALDLLIDPAFVAIVPLGGHHVQYFWRLLKHLGIPHATLLDLDLGRDGGGFGRIKTAIQKLIEFDVPKTAVLEIDKGILSDTDLEKMHEWSTTGDHANLQAWISNNLRPHGVFFSAPLDLDLAMLQAFPDAYAGIIPKGGGPRMAEEKAADAVLGTAGPGLGAYTGPFEVYKALLPAYRYHFLTNSKPATHLAALSRLKQKDLREKMPAVLAEVLKHIEASLRRD

SEQ ID NO: 63085 - protein, 542 aa, Pseudomonas savastanoi pv. glycinea str. B076
MAVSSLRVRPEDWTPIGVKSLEANALKVVRAGINQSVIAGPGAGKTELLAQRAAFLLQTEAAPTPRRILAISFKRDAASNLAARVRKRCHSSHASRFDSMTFDAFAKGLLDRFGQALPEFWRPRPGYEITTYYERDYRNFLDLIAGSPPGDIGTKASLRAIGAKSFERKHLLGAPLPVAAWPKPDVAQWAMARFWHYSLHEGKKSVLTFPMIGRLVELLLRINPMVRDALRLTYSHLFMDEFQDTTQVQYDLVHTIFCGTDTVVTAVGDNKQQIMRWALAMDDPFSEFDADFGGLRTTLFNNYRSSPDLVRIQHVLAQALDSGAMEPISQTEGTIDGESCVILDFPSPKTEARHLAKTISAAIADKKLLPRDFVVLVRQKAGDYADVLRPAFEAEGLSLRNEAGTAGQIMLQELMTEDLSKHLVSLLRLAMNPRAGRHWSNCQTWLALLRGVAADEPGVQQKLAIDLDAFARALSANYPTPPGDEATSRSLVTEVLNFLGRERLSSSYPSYAHGDWLDTVIDSALKHLLDCSLNSIDWCSLP

SEQ ID NO: 63086 - protein, 661 aa, Pseudomonas savastanoi pv. glycinea str. race 4
MRIESVSLSGFRCFGPNPITVDVSAEITTIVGPNAAGKTALLHAMLKLFGVTRAQRTILRSDFHLGPDDDPENRDSKYLFIEVSIAFPELKNGTATAETIAPSFKHMLIDRAEKPPICRMRLEAQWDDDGTVEGEVSQELFWVDTLDEQPENDKRHPVAVADRGLIQLYYTPASRDAAAQTRATTGALAARLLRAIEWSSDTEDAVQETTESLTAAFEDESAIAAITKALQTRWSDLHDEVVDTNPRLSLVSRRFEDVVNKIAVVFEQGADGRERGIEALSDGQQSLFYFALAAAVFDLEREVVAGSVEGFRDNALRIPALSIFALEEPENHLSPYFLARIIRQVRSLTDQSRAQAIITSHSPAVLSRVNPREVRYCRCEPKTRVSTVKKIRFPVNEVDASKFVRGAMLAYPELYFARFVLLVEGDSERIVLPILAEALDLLIDPAFVAIVPLGGHHVQYFWRLLKHLGIPHATLLDLDLGRDGGGFGRIKTAIQKLIEFDVPKTAVLEIDKGILSDTDLEKMHEWSTTGDHANLQAWISNNLRPHGVFFSAPLDLDLAMLQAFPDAYAGIIPKGGGPRMAEEKAADAVLGTAGPGLGAYTGPFEVYKALLPAYRYHFLTNSKPATHLAALSRLKQKDLREKMPAVLAEVLKHIEASLRRD

SEQ ID NO: 63087 - protein, 556 aa, Pseudomonas savastanoi pv. glycinea str. race 4
MAVSSLRVRPEDWTPIGVKSLEANALKVVRAGINQSVIAGPGAGKTELLAQRAAFLLQTEAAPTPRRILAISFKRDAASNLAARVRKRCHSSHASRFDSMTFDAFAKGLLDRFGQALPEFWRPRPGYEITTYYERDYRNFLDLIAGSPPGDIGTKASLRAIGAKSFERKHLLGAPLPVAAWPKPDVAQWAMARFWHYSLHEGKKSVLTFPMIGRLVELLLRINPMVRDALRLTYSHLFMDEFQDTTQVQYDLVHTIFCGTDTVVTAVGDNKQQIMRWALAMDDPFSEFDADFGGLRTTLFNNYRSSPDLVRIQHVLAQALDSGAMEPISQTEGTIDGESCVILDFPSPKTEARHLAKTISAAIADKKLLPRDFVVLVRQKAGDYADVLRPAFEAEGLSLRNEAGTAGQIMLQELMTEDLSKHLVSLLRLAMNPRAGRHWSNCQTWLALLRGVAADEPGVQQKLAIDLDAFARALSANYPTPPGDEATSRSLVTEVLNFLGRERLSSFYPSYAHGDWLDTVIDSALKHLLDCSLNSIDWCSTLGGCRQNKLNFHSLV

SEQ ID NO: 63088 - protein, 639 aa, Pseudomonas savastanoi pv. glycinea str. race 4; identical to SEQ ID NO: 62732

SEQ ID NO: 63089 - protein, 560 aa, Pseudomonas savastanoi pv. glycinea str. race 4; identical to SEQ ID NO: 62733

SEQ ID NO: 63090 - protein, 745 aa, Pseudomonas savastanoi pv. glycinea str. race 4
MRITKIKMQNFRLLKDISVDLESGLSVIIGKNNTGKTSFLLCLEKFIGGTATRNTFTFEDLNSDVKDNLLKIVSGTALNESSIGIVLKVFIEYDDDDDLENIGDKVIMDLDPDNKVVVLAFEYKATTDDIATLVEDFKELTAKKNAEKKSLPSLFEYLRDKHNKYFTISRRSLYFDMQTKKEDDEHFVDLDLENINLSKIINFKWISARRNVSNKDADNSLSQLSAKIYKKLEASNPDESVVEEFKDTLTNTDAKLNIVYQKIFEGVINDVKKFGGLSQNDSVIKIVSSLQHRDLLEENTTVMYGLGNNEHDLPENYNGLGYLNLISMIFEIKLKLHDFHKDINESPSDINLLFIEEPEAHTHPQLQRIFIKNIKSLLKPGIKRVDGVRRDLQTILSTHSSYIVSESDFEDIKYFKKTDKGVTSKNLKDLKDYYEDSQHYTFLKQYLTIHRSELFFADKAVFIEGDTERVLLPAMMSKVDQEDLIKELETGVVDNIPLLSQNISMIEVGAYSHIFEKFVNFIGVRSLIITDIDASAMMPVIDKATGQPKLNKKTEVQLRLQKCKVEHGTHTTNASLRFFYKKEDLAFYQNLDSSQKTLEKMDDAQWSPSILGKLLCAYQVPEKNMEGEVYHATSFEDAFFHINRVFIKSLAFDEGDFFIGDKKLPSLVQIHLKSFASGDTDAFDCAENAITSKPSFAMEILLNSTIKTVSVLNANTAKLENFSIDFSNWNTPLYIKEALQWLKQG

SEQ ID NO: 63091 - protein, 633 aa, Pseudomonas savastanoi pv. glycinea str. race 4
MAQTRLALEPEVRSIFDLVDQGKNFLLSGGAGSGKTYSLVQFIRQVLAEDPKKTIACITYTNAAVAEIRGRISAPNLHVGTIHEFLWDIIRPYKAELIDALIFSLKSESLTSIKNPDDKFDPEVLRGAEVQYKEYTRVREAIVSHDEILKLAHGMLSAYPKLCDIAKDRYKFILVDEYQDTSELVVDILLVHFQKSSKTSIIGFFGDAMQSIYDEGVGDLNKYRKLGLVEEVKKLQNRRNPKLIYELANRLRTDGITQEASTDENAPNMSEGKVICGNMKLVFTATDLDKLDEVKDSLGWDFKDVKENKELNLTHNLIAPKAGFAELMLIYDGDKIIAYRNRIKDFIKDGNIEEDFSGFTFGEVIDYLVERFPGKVKDVTPTKGMKPFIDSHQELYQIALATPYVTFRRMYVAKESLIDDKKDDPSATSKAGSKRDALIKHLFKIQNIINLYETGRYNEFLKRTEFKIRSVEDKRLLKKIIDEISAMSDRSIGEVIDRADELGVCKKDDNLSIFFSRSRYLYERVISVKFNEFQNLFRYLEGYTPFSTQHKIKGAQFDNVLVILDNGNWNNYNFKYIFEGAGNESVIERTRKLFYVCCTRSKRSLVVYYRNPSEKALATARKWFGDECVQCID

SEQ ID NO: 63092 - protein, 677 aa, Streptococcus infantis ATCC 700779
MRINKINIRNYRLLKDFSLELKSELSLIVGKNNCGKTSVLSVLEKVINKRSSLTWEDINLNHRKVIFENIKKVSDIPDSELEPTLGINLQIWIQYSEEDSYQNIQPFMMDLNPDNNFIILEFTYTIPIQKLRDLNYQVSDFIDDFSKFELFMKKNMSKFFEMQVYSLGYNPSTQKLTEEKSNLLEMKDVHKIIKVRGISASREVSNKENNHSLSKTSNRFYKLNNGEDIDTNANNLLQSAILKADETLTKAYSGDDSNEGIFTQVFERVKKFGGNDSEAELAIHSSLSEKDILSNNTTLYYKHDDSLLPETYNGLGYLNLYGIIFEIETVMADIEKDPADINLVYIEEPESHTHPQLQYIFIKNIKDLLKVHDDELKTRGATSGIQTLITTHSSHIVSDCNFDDLIYFKRDNGTAVSKAFNSLKEEYGDEQLGYKFVKQYLTLNSSELFFADKVICVEGDTERILIPTMMQKVDISNPINRTSNTMPLLSQNISIIETGAHSQVFRKLFNFLGIKVLIITDIDPANKNGNNRLTSCSAVEATSTTNASIKSFFDISGDEVFSIVAQKSFEEKITSDNRIRIAYQIPEDENTYQPASFEDAFISLNKQFIINQKDGLIKFEALKNFDDSEIEDFYKFARDKVNKKSALASSLLYFEDDGNTWKVPKYISEGLLWLRRQ

SEQ ID NO: 63093 - protein, 640 aa, Streptococcus infantis ATCC 700779
MVEKTIEPEVEMVFEAIKEDKNFILEGGAGSGKTFSLISIIEKISRDEPDKSIVCITYTNNAVAEIRERITNDKLKVSTIHEFIWSIIGQFQNEIKYCLIDLINDDEQKEFIRPLDYPSESQLTDTYFENIRVDYDERYSMSIIDNRVQISHDHILLVAEKMFSTYPKLCDILIDIADYIFVDEYQDTSPLVVKILLEYIQNRTKKNIVGFFGDSMQAIYDSGVGDLSSYNLIKIAKAQNRRNPKKVIDLANKFRDDGLVQTPSSDDTAPNMDNGSIIPGIVKFIYGNDINQLEILRGSQLYRKLEFNAPSKTKELRLTHKLNAEMAGFSKLFELYNTDLFVKLITGIKKKINENKIVDNGKSFKDLVEEAQIVVRRGGPLIVDEIKSTSELSAFYDEIKTCSFEEVSSKSKINKESLLSYKFNGLSSRYEAGTDRDRILKRLDLVYELVKLYKTGKHNEFLRITKFKITSSKDKISLSNVMTEISADDITIGRVIELAEECELISKDDLFTNFIKNRGHYLWSRLKIMPFQEYVNSIDYLREYVSVITQHKVKGSEYENVLVLLDNGKWNQYNFDTLFGKGSSNENVQNRTKRLFYVAITRAMKNLIVYMPSNDRQIIEKAKDYFEESDIVDVLSLVDE

SEQ ID NO: 63094 - protein, 679 aa, Streptococcus parasanguinis ATCC 903
MEIKKIYIQHYRSLNDFSLELKNDLSLIVGKNNCGKTSVLSVLEKIFNKNSNRNLVWEDINLNHRREIFENIKRVSDIPDSELSSILGINLQIWIQYSELDSYQNIQGFMMDLNPENNFIILEFSYIIPTQKLREISSLTCDFADDFSKFESFMKKNLNKFFEIQIYSRGYNPITQAMTEEKSDLHEMKDVHKIIKVRGISASREVSNKENNHSLSKTSNRFYKLNNGEEINSKANNLLQSAILKADETLTRAYSGDDSVEGIFTSVFERVKRFGGNDSEAELAIHSSLSEKDILSNNTTLYYKHDDSLLPETYNGLGYLNLYGIIFEIETLMADIKSEPADINLIYIEEPESHTHPQLQYIFIKNIKDLLKEHNDELKESGDFSCIQTLITTHSSHIVSDCNFDDLIYFKRDNGTAVSKAFNSLKEEYGDEQLGYKFVKQYLTLNSSELFFADKVICVEGDTERILIPTMMQKVDTTNPINQASNTMPLLSQNISIIETGAHSQVFRKLFDFLGIKVLIITDIDPANKNENNRLTSCSAVDATSTTNASIKNFFDISGDEVFSIVAQKSLAEKITSDGRIRIAYQIPEDENGYQPASFEDAFISLNKQFIIDQKAGFIQFEALKDFDDSEIEDFYKFARDKVNKKSAFASSLLYFEGEENTWKVPKYISEGLLWLRKQ

SEQ ID NO: 63095 - protein, 640 aa, Streptococcus parasanguinis ATCC 903
MVEKTVEPEVEKVFEVIKQGQNFILEGGAGSGKTYSLISIIEKISMEEPKKSIVCITYTNNAVAEIRSRIINDNLRVSTIHDFIWHVIKNFQKEIKECLVELINDDEQILFVAPKEVLGEELISLDYFDSVRVEYTEWYSMSITEQNKVQISHDHVLIVAEKMFSKYKKLSDILKDTANYIFVDEYQDTSPLVVKILLEHLRKSTRDNIVGFFGDSMQAIYDSGVGNIDSYGLEKIQKNQNRRNPRKVINLANKFRSDGLVQIPSSDVAAPNMNNGNVIEGTVKFIYGDGITHLEDLRNSELFKELEFDIPQKTKELRLTHKLNAETAGFSKLFELYSSDLLVKLITDMKKKFNASELVDKGKTFEELVEEAQIVVRKGGPLIIDIVKSIPELLAIYEEIKTFSFEEVISKSKVNKDSLLAYKFNGLSSRYEAGTDRDRILQRLDLIFELIELYKIGKHNEFLRITCFKITSSADKINLSKIMEEISDNDITIGKVIKLAERTGLISKDDLFTNFIENKGYYLWLRLEKLPFQEYVNSIAYLREYVSVITQHKVKGSEYENVLVLLDNGRWNQYNFNSIFGKGSSNEKVQNRTKKLFYVTITRAMKNLIVYMPCNDQQILEKAKDYFEQSDIVDVLSLVD

SEQ ID NO: 63096 - protein, 681 aa, Streptococcus urinalis 2285-97
MFLEKVEYWDFRKYKSTDDSPGLTVKFQRGMNLIVGENDAGKTAIIDGIKLLLGTLSDDYDRIVDTDFYTMDGKIFNEEFKIIGLFKGLSDEEAAKFLEWISFDEGNNPQLKITLKVVKKKNPNGKEYFDRKIYGGDNHSETIIDSEAKQLLKAIYLRPLRDAQRELRPGPYSRLSNILSAHPQIGEGGKQELLDIVGKANGEVKEFFSKDEHNVVQLIMDQLATFYDKNDFEKSKIAFNVSEANIYSILSRLSLDTESVNLGLGNSNILYIAVELLLMHDDSDYIGPRIALIEEIEAHLHTQAQIRLIKHMENNSSTQFILTTHSTNLASSINPKNLILLYNNQAFSMAESETLLGKEDYEFLERFLDATKSNLFFAKGLIFVEGDAENLLLPAFAELIGYPLHEYGVSIVNIGNTAFERYIKLFSRRGDDRIELPVSIVTDVDVRPLEYYNDKGTTGEVYVIESQNEFQQILSELGLESDLTDEDRPYGTIFSTRNKLKDEFEISETLDENEFNKKVAKELTKDYINILIGVKKNNIIQKYKDYNANSKTFVAPAWTLEYSLARSPLVKLLWKSIHETRYKNPYSPVNQNKFDEINNQLTTSDDTISSELAYDIFKPLNDKKVSKAIVAQKLAIEIGKLASENKEQLKTEVLSNDYTQYLVKAIKYAAQINEEEGGTDE

SEQ ID NO: 63097 - protein, 618 aa, Streptococcus urinalis 2285-97
MNELIASIEKSLLPSGCHFSEEQKDVILHNDTMDVVAGPGTGKTTVLTARVKILLEQLKDSGQGICVLTHTNVAVDEIKSSLRKLGIEDIKTPHFIGTIQDFFNTFFAKKAFHLILGDKKMRVLDDDIFRERFNKQFVGYYQFLDVSVLKYLPNPAGKIDKWNFSQEAKPVRVESKVGGRNKQYNNAFNTSMENLFKSGIITNNCCLELSKWYIEQHNEMFRNIISKRFDYLLLDEVQDTSQFQFELIQSLFDKTSVIIQKFGDPYQAIYNIWGGDTELAWEIDDSMEKRISKTSRFGESIVNIVKNVCVKKYDDLESDSKNNSFPPYFIVYDNGDDLINKYCSLIDRLEKGNETFKNSSKSKVIVSAQHKDLENTFGERYQRVVVKDLNYRSDLDLFLDICLKELSRNFENNFEDRLKEDGFRIKIFKIIKNLRNEDDEKIIDGLSALLDELIDDEGLLQNKNTLCNEIKDKLQNNFSKNIQIQTNVSVDNAGKDIRLGTIHSVKGETHKATLLMLNSKFTNGYADTSPSYSILQLLEKYLSNNYVELPEDKNDEEKETEKALKLAYVALSRPTHLVCIGIPAQLIERDSDFLSNLQKAGWIEFPTINDTTIVNNLM

SEQ ID NO: 63098 - protein, 689 aa, Streptococcus dysgalactiae subsp. dysgalactiae ATCC 27957
MKLTKVIINNFRSFGESQIIELNNQTVLIGNNSSGKTTVLQALSKLFSDKQNDRIIRKSDFHLPKGLRPGENSRTLFIETIFEFDELDGTAYSPAIPSFFEHFTVSQGDAKPFLRIRLESSWEDDGTVEGSIDTQIYYISSPEDIIKDEDKHRAPRKDLDKIRVLYVPASRTPEKELGNASGSMLSRLVNSINWTDDEIKEITNKIDELNNTFLSESGALTQINQEIQKSWKLYHEDNRFSQAELTINSSEMVGALRQIALKFSPTTTEEAFTVSDLGDGLRSIFYFSLVDSILDIELEITKDREENPDNPRFKLIPLVLTILAIEEPETHIAPHHIGKLIKRFKQLGNNDNSQVILTSHSPAIVKRIDPEDLRYLRIENNDRVLQTIVSDIQLPQAIDASYKYIKGAIQAYPELYFAKLVVLGEGDSEELLLPKFFDLLGKEVDSSQISIVPLGGRHVNYFWKLLNALRIPYITLLDFDNERYGGGWGRIKYISQHLYELNTEFQEWFNTQGLDFNEIGARECESMEDKRLINWFNKLEEFNVYFSSPLDIDFLMLQHYKEHYLDMLSSKEGPVVSYADSGGNNKKVKLTDLDCIDKLQLEGLEKRIEEAKIATLKDKSGPGDSFTREEKELMIWYQYFFLGRGKPTTHMQFLSSISDDELTRNLPPVFEKIVNRAEELLGDIEHGKE

SEQ ID NO: 63099 - protein, 605 aa, Streptococcus dysgalactiae subsp. dysgalactiae ATCC 27957
MVKSEEWFPKGDIILEETALGAVKDVTNCLVIAGPGAGKTELLAQKLDYLFSTNKCVSPKKILALSFKTDAASNLKERVKKRYGDEYASRFTSLTYSAFEKRILDQFRDVLPEDIRPSRDYLIEDWDTIKELLSMNGINVNGWRMSDIRNFVENIILNDGNTHKLKKDLLKGTQDNKPVLLYRQITKLSTQIIATNEYIRKALQMTYDFVFLDEFQDTTYAQYNLLKTCFLGSSCKLTAVGDNKQAIMRWAGAKPDIFPDYIRDFNSNEYQFLMNHRSVPKLVEFQKEVHQILNSNHSSIQTNNYPEFQEGEITLFEFENESLEAELIANDIESKIQGGIRPSEICILAKQKVDDYSSKLITTLSSKGIKARIENEYQELLKDLTCNLLLDLISCSQGKRDPLIWENISNFYGNINGIDEFTDELILAKSYKEIDNIVSDITYLISNFIPNEESMLNLIECIIEKIDEKRIISNFSTYNGKSDLYIIVKNFSKLLYKEYSQTQGEWLDIVSSFKGENSIPIMTIHKSKGLEYEAVYFLGLEDSAFWNFNNQPEEDKSAFFVALSRAKSDLIFTYCRLRNNRSQNKRNINEIYSLLIQSSLVDVVN

SEQ ID NO: 63100 - protein, 653 aa, Escherichia coli E128010; identical to SEQ ID NO: 63058

SEQ ID NO: 63101 - protein, 621 aa, Escherichia coli E128010; identical to SEQ ID NO: 63059

SEQ ID NO: 63102 - protein, 648 aa, Staphylococcus aureus O11
MIEIADLTALIGANSSGKTSLIMALLRLFGQKNTDRTLIKTDFHIPESADISKINEIDLMIEAKVIFPELKLESPANIKTVPEFIKHLIIEETDADPYLRIRLKGKWIQGSTPEGNIEQELVYVKIPYGREEKEEDLTRVPIHHQKLIQMMYIPAMRDPAKQLKNASGTLLWRIFDGIDWPENLNDYIKSLTSPIETLFKEIPSIKDIQGILNNQWNKYHKDKRYSNSQFKFNGNSLQEFLKNAEILFNPTIDGNSVKVDSLGDGLKSLFYITLVSTLLEIENKQEKDDKPLLNILAIEEPENHISQHLLGRIVRNLKEISKKDNAQVILSSHNSSIIGKVDPEYIRHLQIQNSESIVNNITLPEKNDDAHTYIKEAVKAYPDLYFSKLVILGEGDSEEIVLPKLLSADNIYLDDFNISVVPLGGRYVNHMWKLLNDLSIPHVTLLDLDRERGGGDWGRIKYVLKQLDENNRCSEQLRTVLLIPSNTYHTYSMEEIEDFHNRKSNRLNSLNTWIEKLEKEDVFFSYPLDLDFTMLMSFQEEYQNTMERGPQIPKDSNSTEYDEKLKKSIQATLKNEKAIAKTYSEDEKKLMIWYNSLFLGRGKPSTHIAALKDIDENEIIENAPKELLRLIQRVKEKVGLVGGSNIDE

SEQ ID NO: 63103 - protein, 641 aa, Staphylococcus aureus O11
MNNRILEDEWKPSDDVTLEDSALHAIRASSHVAIAAGPGAGKTELLAHKAGYLIETGMCPYPKKILAISFKTDAARNLQERVELRYGKGVEKRFESKTFDAFAKGILDQFIHALPKEYQPQKNYEIILNEKSLNDIINAYITEPYSYYSNWQYEYHINSVLRTMKETKLPIVSFEDDLYSWINERLWMALLNGKGNLKSSLTFSMISILVEYLLKENPLLVKALQATYSHVFLDEFQDTTHIQYNLLKTIFLKSNTVITAVGDNKQRIMGWAGALQNAFGIFKTDFNATQYTLLNNFRSAPNLVYIQNIFSKTLNDASIEVLPAGEWNKNEGVCEIWNFKNHNIEAILLASYISKWMKVENLKPRDFCIIVKQHEHIYAAEIMKELSKINIKSRIEKDYQDLLSEELVLLIIRFLKLSYEEKSPELWLNVIDEIIDMKYSDADSESINYLIIEKELVKMLDEVRKLYSNINDTNFNTQFAEILQEIVVFLGEDIIKATYPKYNQANYFNEVMQKMIDKLQYQNCISMRGLVQEFCGEYSIPIMTIHKSKGLEYHTVFFIGVEDDAFWSFSTQKEADKNAFFVALSRAKQKIIFTISEKRNILKFGEEKNILQETKNISELIQTLMDAGVPLIEKSGLDNIL

SEQ ID NO: 63104 - protein, 648 aa, Staphylococcus aureus O46
MIEIADLTALIGANSSGKTSLIMALLRLFGQKNTDRTLIKTDFHIPESADISKINEIDLMIEEKVIFPELKLESPANIKTVPEFIKHLIIEETDADPYLRIRLKGKWIQGSTPEGNIEQELVYVKIPYGREEKEEDLTRVPIHHQKLIQMMYIPAMRDPAKQLKNASGTLLWRIFDGIDWPENLNDYIKSLTSPIETLFKEIPSIKDIQGILNNQWNKYHKDKRYSNSQFKFNGNSLQEFLKNAEILFNPTIDGNSVKVDSLGDGLKSLFYITLVSTLLEIENKQEKDDKPLLNILAIEEPENHISQHLLGRIVRNLKEISKKDNAQVILSSHNSSIIGKVDPEYIRHLQIQNSESIVNNITLPEKNDDAHTYIKEAVKAYPDLYFSKLVILGEGDSEEIVLPKLLSADNIYLDDFNISVVPLGGRYVNHMWKLLNDLSIPHVTLLDLDRERGGGDWGRIKYVLKQLDENNRCSEQLRTVLLIPSNTYHTYSMEEIEDFHNRKSNRLNSLNTWIEKLEKEDVFFSYPLDLDFTMLMSFQEEYQNTMERGPQIPKDSNSTEYDEKLKKSIQATLKNEKAIAKTYSEDEKKLMIWYNSLFLGRGKPSTHIAALKDIDENEIIENAPKELLRLIQRVKEKVGLVGGSNIDE

SEQ ID NO: 63105 - protein, 373 aa, Staphylococcus aureus O46
MGWAGALQNAFGIFKTDFNATQYTLLNNFRSAPNLVYIQNIFSKTLNDASIEVLPAGEWNKNEGVCEIWNFKNHNIEAILLASYISKWMKVENLKPRDFCIIVKQHEHIYAAEIMKELSKINIKSRIEKDYQDLLSEELVLLIIRFLKLSYEEKSPELWLNVIDEIIDMKYSDADSESINYLIIEKELVKMLDEVRKLYSNINDTNFNTQFAEILQEIVVFLGEDIIKATYPKYNQANYFNEVMQKMIDKLQYQNCISMRWLVQEFCGEYSIPIMTIHKSKGLEYHTVFFIGVEDDAFWSFSTQKEADKNAFFVALSRAKQKIIFTISEKRNILKFGEEKNILQETKNISELIQTLMDAGVPLIEKSGLDNIL

SEQ ID NO: 63106 - protein, 729 aa, Staphylococcus pseudintermedius ED99; identical to SEQ ID NO: 62500

SEQ ID NO: 63107 - protein, 597 aa, Staphylococcus pseudintermedius ED99; identical to SEQ ID NO: 62501

SEQ ID NO: 63108 - protein, 769 aa, Pseudomonas sp. TJI-51
MPEAVVATPVAGSITLRLLELCQFRRLGKVQLDIDKKTTILVGANNSGKTSVLAALRHFLSDGSRFGAFDISLSQWPKLRALGKAWELLKENPSTVIGSEEQWIEQLGVIHSAMPTLDLWFDAEAGMFHYVAPFLSKFSWKGGAVGVRLRLEPAASVDELKQLAWAYHTARLPVKDMGADSLAWPIDLLDFWLREPQRLGQVRAYKLDADKNPLDGLETYAAQTLPADASPIERKNLQKLIHVDFVAAQRGLGGEEADSRSASGPHRVGMFSNQLLKFARQHLNIATTGHGHRADLIKAVAEAQQELDKKIHEAIAPSVEEVRELGYPGLHDPQEIRFRTRIQTADLLDHGTAVQYSMQKDSLEELLPEYSIGLGYQNLQSLSYQLVSFKAARLKPEKGAPVPVHLVLVEEPEAHLHVQVQRIFPDKAHKLISPNEKEASGLKSQLIISTHSSHLAHAESFDRLRYVRRIAKSAENPMPTTEVVNLGKIFGDDQKTRQFAERYFRVQHTDLLFANAAIFVEGVAERMLVPLFIERDFEVLNSRYLSFLDIGGSHAHRLKPLVEKLRIPTVIITDVDPVEEKAGKPTKDGEPTTTLVAVANTGQAGLQCGNPTLRGWHPKLQQLEDFKNPVEVQLVWSEVSECLVRFAWQLPVAEAGDHWPSTFEDSLILKNIPWFKGLMDEKVDGYGNKIKPPKGALGSVARRVADHENISDLVASLHKLMHGSFNKGDFAASIFEMIAAAEPIACPKYIADALEWLQKQLDPNPELVP

SEQ ID NO: 63109 - protein, 648 aa, Pseudomonas sp. TJI-51
MTAVPTLGNDRDAGVVDEICGYLTEEPPRSYFLFAGAGSGKTRTLVEVLRRLTGVIEHDKGNKLARRLRMYGRSIRVVTYTKNAVSVINGRLGDNDLVCVSTIHSFCWELISGFNDDIREALVAVKEAQLAKETAEAQAKPRGITPAKQRDLDEIKDDIEAFRATEVFIYHPDRNTYGPGALAHNYVLDATAWLLRNKLTLQTILKDRHPIILIDESQDTMKGMLDALMGLAEQEGSDLTLGLLGDHRQRIYAHGHADLSSLVPQNWATPELQMNHRSQRRIVTLINRVWEAELDGRTQPINGVEQHPRTEKAGGVVRIFVGDTSRSPENKVIGERWCSDRMHGATGDAAWYQGQYQLLALEHKLVATRGSFLDVYEAMVLLDPDAAAPSGSGDNKGPSAVQVLLNELAQLEACVDIDGAVNELKVTEVFRRYGRLDNLPEECVSRASRVEEMLNAITAFATACGNSNSTIAEVLAPVLSAHLFEVDHRLSEAYADKSPPLPAPGRGEEESKQARMRRGWCALFAAPWSQLRLYRTYLAGNSVLATHQVVKGSEFMHVMVVMDDALAGGFLISYDKIFGGVELSKRDKENAEQGKETTIDRTLRLFYVTCSRAQESLALVLWSSDPAAALDRIKESNWFTIDEVETIP

SEQ ID NO: 63110 - protein, 725 aa, Syntrophobotulus glycolicus DSM 8271
MYLSGLQLINFRNFESACFIFNEGPNTIIGENDSGKSNAITGLRFLLDDSFLYNTKRLKESDFSYALNNWKGHWIIISATFSNITSTEKESDICASLIVDDEENIASMSSLISTDNRDHGVVTLFIRPQRGIRKKLFDASGDEEIFNEIRNSIRLVDYEFCFTSKSKADFCNDNMYKSIVGDIDSFEATNPEDDDTSILGHRITVADVQNHISLVYIDALRDVLREMHIPRNPIRRIIETIEAGIDPAHITTVKDKIKDLNDAITNIGEIGVIGQGLNKKLLDILGVVYSPEISLSSELSDEINSLSKFIAMKPKNEDDLDLLGLGHLNMIYLALKIVEFETCRSRELLNIMVIEEPEAHIHAHIQKTLFNNLSVTNNYTQVLMTTHSVHLAEASEISRMNILKTLNQTSIAMQPIRQLDQYGKDNLNKKSLSLTNCIERYLDAKRNVLLFSKGVLLVEGDAEEILIPNMAKAAYGISLDEIGVGLVNVGSTAFEYVASLFDQLRIQRYCAILSDLDKQAVDPSSTYYKSNAEKKGQERKEKLNRLYSSNLWVDMFYADHTFEIEFVNCGDNFKYVSAAIKKIYTQKAVITSHQEEINNENSRNEEMLMLSEKEGKGWLATIVSGELNYNIRIPEYIVYALAFASQETMSLQIYAKMLNYTLALYDDEKAKHYLDLLRNSRDNVSLSEAINEILEDTYLEEDVVFEFIKFCEQFQQRIGLGDDDE

SEQ ID NO: 63111 - protein, 595 aa, Syntrophobotulus glycolicus DSM 8271
MTMNEDLELLLDKLNEQQKTIVMSNDNILVTACPGSGKTRVLTYKLAYTALSNPHSNRKIIAITYTNRAADEIKDRLELLDIDQSAIWAGTIHQFCLEYIIYPYAMSLPRLCKGFTIIDEYVHDQYIQQILDKFSINIPSYQKSKIITMLNNDMEIIETQFPQVVKGYHDLLIQNKEIDFDLILSLSYQILRNHPIASVNIAGIIRSVCVDEYQDTNELQYQIIGILTKTNNRIKVMFVGDTDQAIYTSLGGIAKSIKEIEEITALRFTRETLNGCYRSTQRVIDYYSYFQKESYKIISLATHAELKGIIYLNTSIHKDDIYDCIAELIRHKIDQNVLPEEICVIAPQWFLLYPLSRKLRELLPDISFDAPDISPIKADDMNVFYKLARLIFTEPGKKVPRRKRIATEIIKVLSEEYNILLNEHIDCFWILQKINSIHPNAGNGVDYYKHVIEELFSSCGINREDNSSLYSLYDNFIGKTEERIKRHSLSDDLSAFYKMFREKTGVVITTCHKIKGEEYNTVIAFGIFYGMIPHWDSIFSPVISEVNEAKKMLYVIASRAKESLYLFAEQGRTTSNGAVYALTDILKTYSYDYDT

SEQ ID NO: 63112 - protein, 713 aa, Pseudopedobacter saltans DSM 12145
MYISKVSLVNYRNFANASFQFNKGINTIIGENGSGKTNVFRAIRLLLEDASLQYAYKLTDGDFNRSLDKGKWRGHWIIISIEFDELNDEEAIQSLFIHGVGVAAEDYVKKATYNLFFRPKADIRQKLSELAEGDAAGLQKILNSITIQDNYETFFTGKSTADFNDPDVYKEIVGDFENVVFPSTIDASKFGSKIPHQLSVSKEISFTFIQALRDVVSDFHNNRTNPLLTLLKNKSGEIKEEDYQPISDLVEQLNESIEDLPDVQNIRSDIKSTIQDAVGLTYSPSSLSIKSSVPNEAEKLLQSLKLFIGEPGEEYEGGIHELSLGGANLIFLTLKLLEFKYRKSKDTFANFLIIEEPEAHIHNHIQKTLFDKLDYGDTQIIYSTHSTQISEVSNVDNINILAKKLNFAEVYQPSTGLTSESINQIQRYLDAVRTNLLFAKGVILVEGDAEEILIPIMVKKVFGVSLDELGISLINIRSTGFENVAQLFHDSRIRRKCAILTDLDDAICDTTINDDDSDRLKKYKRKVEASKQKGLERKAKLDVFEAENDWIKAFYADYTFEVDFITEGNEEEVIAIIDQVYTDQPTRVQAKTDIEDDGVAVYGKRVLTMAKQEGKGWFAIMLGKHISFKTEIPNYIVDAILFAKETYSNNIIADIIEYRMNKHFYDDDALDFSSCRESLTKYRAEEATLDDLAFDLDLVIPDDQLLTFIDKLK

SEQ ID NO: 63113 - protein, 606 aa, Pseudopedobacter saltans DSM 12145
MFVWEKGSLNDEQEVAILEKDSVLLIACPGSGKTRTLTYKIAYELSRLNSNKEFVIAITYTNNAADEIKERVELLGVDTTQLWIGTIHSFCMEWILKPYHLYSERLKNGFKVCNSFDTEKLLTELCKKYSNPKVTFYDFQYYATINGTYKFTSKNSNQNKHIKAILQEYFGILKENSQLDFEQILFYAYELLKSKPIICTILCKLFPFILIDEYQDTKEIQYHIISKILSANNGCSKTLIVGDPNQSIYHSLGGYPMPKDDLEKLLGFNLIQLSLDKNYRSSETIINYFDYYKTFATPIIAFGNEKDYNSLITYNLSVSLDNLIEEIAKLILFNVREAGISPNEICIAAPQWVQIASITRKVMIRLPDFSFDGPGMAPFSRDIENFWFKVARIVLTEPSPYMYVRRLRWSKEVLNELDAAGVDVSNLSNKEFLKICNSIEVNENDGLTYLRSFFERICESLKIQIPNFPLLEEHHTSFFASSKNRIQRLIDEGNPFIGEIENFRKVFRQRDGITVSTIHGVKGEEYDTVIGFALLNDYVPHFNDTNGYENSKKLLYVLASRARKNLHLISETSRGINYYNPEGKSPTPHLLEYNYEYSIVALDNSD

SEQ ID NO: 63114 - protein, 591 aa, Escherichia coli TW10509
MSILINSVRISGFRGIKEIEVELGRIAVLLGTNNAGKTSFLKSLQLALGDYQRYFSDEDLHIDSSGLKVNEVIVDLKIIPTDEHYNKTEEFDEKWIDVFGDNIAVDANGHEFVAIRTKVQPDEIKGGFNTQRYYLNEWGEFEGWKEIVVNERRKVRTKVDAIPYICIEAQRDIHHELKDKSSYIGKVLSYIKYEDEDVTALEEMISSINETAVSRSEPLQSLKNSLQGLNQSFLGSSHTEITPFPKKIRDLSKQFTVHFGDEENHSFSMEYHGTGTRSWASMLTVQSFLSFMHERHELENKALHPIVGAEEPEAHLHPNAQRTLFKQLSSSQGQIILSTHSPYLSAMAEIEDIRSFIKKGDGVTVNCLKKRIEHDEKNALKREIMLTRGELLFSRALILCEGVTEEQLIPSMFELYFGRTMFSVGVNCVSVSGKNYPPFIKLASNLGIPVCIISDNDGDTHGEINRQVARLVREDGLVLNPDCFSLEFLKETNDIEAELYNELNIREEIIESLVLSETKASPNERYREAKKREIEALQDSAIIEKMRDSKASYAGYLGVILAQNANGKRIEELLPESVIIAFNKVRGWLEL

SEQ ID NO: 63115 - protein, 632 aa, Escherichia coli TW10509
MIDNLSQSQIEVVRAPMGGAIQVLASAGSGKTRVLTERVRFILNNSARGSVVALTFTNKAADEMLERLDDGSENRDRIWIATIHSVAQRVLESYGYTIGLPKELHIFERDQDRMEVFLHSLREQGVNIDEYLDVEDVREKRNREKVISQYLNVFSIIKRELLTEDEVKIKFSSNPRIWNIYQDYQSALLESGGVDFDDILLYAHKILLNQESVARIYQKKYVALFVDEAQDLNRAQYEFIKVLCGDKIKDVMMVGDSDQMIYGFNGSSSDYFIKSFVKDFTPKTYCLNENYRSSKAVIELANKLKPNSQVGVNAALDGYKSFNALPDEESEAIWVCDSIQHILNLKRHPEIEGDIDCSKIVVIGRNRFVFKAMESELKKRNIPYFLKRSDRNESPVSLIGKIVDLAIRVKVNPKDWVDGKRLYKLIGLELNPESDVTYDISKVYADIKKSSNLDKDLISLVLAHIDHMSVDTPNILKFCLDIKSELVSLGANTKDSAKEDDIATGIKDIEQLQSMWTRFKRKGLGDNLSSFRNALALGQLNDDTLNNGIMLSTVHTMKGLEKDIVFLIGMCEGVFPDYRAKSKVELDEERNNAFVAITRSRRWIFVTYPEKRMMPWGDYKYHPASRFFLDMQ

SEQ ID NO: 63116 - protein, 696 aa, Anaerococcus hydrogenalis ACS-025-V-Sch4
MILKKMKVKNFRLLKNFELNFKDELSLVIGKNNCGKTSSIIVLDKMLNSSKLFWEDINLECQKDLYKKIIGFDITKLDEVQLLETINMQLFIEYNDNDSYENIQKFMMDLNPDNNIIVLEFISVIAAKKIIELKNIISEKNIEDFKSFSKFMSKNFANFFETKKYSRGFDVEANKTTQDRSEEIDNKDIQKVIKVAGIRADRAVSNDDRNHVLSGLTGKYFSSYKAAKDESESVFTRLEEKLEEADKELYKIYNGEKSEGEEPIDGIFSDVIDVIKTYGGAENGIDIAIESSISEKNLLSDNTNLSYRQGGDYSLPETYNGLGYLNLIGILFEIETNIQELFEQPADINLLYIEEPEAHTHPQLQYIFIRNIKSHIKAHRNKLLKEKNKQLQILITSHSSHIVSECNFDDIIYLKKNGNTVIAKSFNSLKEEYVGDEQKGFKFVKQYLTMNRSELFFADKAICIEGDTERILMPVMMHKIDNKEKPRADIIPLLSQNISIIEVGAHSHIFMPLFSFLGTKVLFVTDIDSVKAEKKIDKNGKERTVYTSCHPDEGTHTSNASIKEFFKDTGIDTSNNQFKELVGKNAEDKIKDNMRMAYQIPESYGEYQASSFEDAFIALNKDFILKNKEGFYQYGALKDFSNDEIENGDYYNFALNNVKKKSAFASSLLYFDNENGEEDEKWAVPHYIEEGLLWIR

SEQ ID NO: 63117 - protein, 634 aa, Anaerococcus hydrogenalis ACS-025-V-Sch4
MDTLTLEKEVLEALQCIKNGENFILEGGAGSGKTYSLISLINALTEELPDIKIVCITYTNNAVAEILSRIENENIWVSTIHEFIWSLIRKYQNEIKNILVELINDDNEKNFKKPKDFSEDLISKEYFENLYVDYDEYYSVTPNEENRVKISHNHILIVAEKMFEKYKKIADILKDIADCIFVDEYQDTSPLVADILLKHLEQSDKKNVIGFFGDSMQSIYDDGVGNLNQYNLTKIVKTQNRRNPRVVIEVANKFRDDDIEQRPSEDINAPNMENGTIREGSIKFLYGTEINDFISVKGKNIFESWDFSDGKQTKELRLTHKYNAEMTGFKDLYDLYNADLITKLISGIKKKIDKGNLECNKTLGEIALEVKPTYNKVELLDQINGNEIYQSIYSVLEDMSWEEAYEKCRITKESLMSYKLNGMSGRYEANSYRDRILRRLDILEEIIELYEANRFNDFLRITKFSIHNRNDKICLKQAIDYLVSEDNQTIENVLKFAEVKGLLKEDELFSDYISNKGFYLWERIKKITFNQYRKSVLYLKEFSPICTQHSVKGSEYDNVLLVLESDWNKYDFRTLFGKGSPNSNVQKRTKKLFYVCITRAKKNLIIYMPTDDSDILEKAKEYFGEENVIDLSSI

SEQ ID NO: 63118 - protein, 691 aa, Xanthomonas gardneri ATCC 19865
MRIKHVEIENFRLLRKVSVGLEERTTLIVGRNNSGKTSIAELFRRLLSERTLTFRLEDFSLGCHECFWMAFEAFRAGAVAPDVLGHLPSITITLDISYDVDSPDLGPLSDCIIDLNPDCAEARLVLTFGPRTIAADALFAGIVTAGEDLAADRSALFRALGSRLPAAYASSLEAVDPNDPTNRKALEPKTLTALVHGGFINAQRGLDDDTNRERDVLGKVVEVLFQSALTDPLDPEKRTTAEQLKTAVEQIQGDLHAGFNAKLTSLLPTFDLFGYPGLADPGLVTETSFDVDKLLNDHTKVRYLGVNGVTLPETYNGLGVRNLVYMLLQLLRFFREYQAKPSAAGVHLVFIEEPEAHLHPQMQEVFIRQLDQITSAFVAQLNENRPWPVQFVVTTHSPHMANEARFESMRYFLSVPDGEGLRRSVIKDLRLGMGDAPVPDREFLHQYLTLTRCDLFFADKAVLIEGTSERLLLPAMIRKTDAAAAGEPQLASQYLTVMEVGGAYAHRFFDLLTFLELRTLIITDIDAVISNENGKRVAVPVAEGEFTSNGCIKAWFENDVSPAALLAKTAVQKMVGLRRLAYQIPEADGGPCARSFEDAFILANPDRFPLGDGDAAKLAYEHAAEQKKSTFALEHAIEQTDWNVPRYISEGLRWLAHGNLVALEPPPAVAIEIVAEVAGVAVNVAEAGEHG

SEQ ID NO: 63119 - protein, 591 aa, Xanthomonas gardneri ATCC 19865
MSQRLASMADGAESPADAAGRVALERMFACLDEARSFRLEAGAGAGKTYSLDKALRRLIDHRGSELLRQRQQIGCITYTNVAKDEILSRIGAHPAVRSETVHGFCWSILQDFQTTLRALVPGLPGWAERLEPTGGIGARRVHYELGVPRVVDEQVTIRHEDVLALMIQVMAFPKFRAVLTARYPVLLIDEYQDTDAAFVDALKAWFLDHGEGPLIGLFGDHWQKIYGDGCGSVEHDALEVIDKNANFRSVAPIVQMLNRMRPDLPQMVSDPDAPGEARVFHTNDWPGVRRTGQGGGHWTGDTSADAARAYFGHIKRRLGGEGWDFSVGKTKILMLSHSVLAREQGYASIPPIYGQFNEPWLKKDDPHIKFLTDQLEPACAAFEARRYGEMFESFGAGMPRIRKHVDKVAWTDTMETLIALRLSGSIGEVIDFLAAQPHMRLPEAVEERERRLAEIGPEPVEGESRRVTQLRKLRAVSYSEVIALDQFIDGHTPFATKHGVKGAEFENVLVVVGRGWNKYDFAQMLAWSEAGPPADKLEFYENNRNLFYVACSRPKVRLALLFTQLLSPDAMSRLATWFGAENVIALPAQPD

SEQ ID NO: 63120 - protein, 599 aa, Paenibacillus vortex V453
MHISNIKIKGFRNFNEANVNLKQKSLIIGSNDIGKSNLIYALRLLLDKKISDSDLELKDSDFHVYDESNNEIFIQIKFESVVEDCVIGKVGKYVNSEGELFLAYEVKRGESGEKSYQFYIGQREDDLQPIESRYYLKVLNMDYIESSRELNSYIRKEKKNLLLESRKQRTKQIVQSDDKITKKIEKSINILNNRITKLSYINSATSSLNDELLSLSFHHIASTIDFDTGGIDVEDFINSVNLVSKVNGKSLSVGGDGRNNQIYLALRTAKNRILDDTPLEVTICCIEEPEAHLHPHQQRRLSKYLVESLRSQVLITSHSPQIASEFSPDSIIRLYNEADSSTQAANDGCSTGLEKSIIEFGYRLNIVPAEAFFSNVVLLVEGPSEVLFYKALAADIGIDLDKYNISILMVDGVGFEPFVNVLNSLNISWVVRTDNDIIKVPHKDYYYYSGISRCLKIVENHCSYEDTDPITQLISTKKNLLGNVNSRENLTKSEIELGQEFIVALGDVDLYLSNIDLENDILNSPLREVVENYYGEKDYESLLMKMQKSKATFMYDFLYKNQGGLKVLLENDLSLPLIRCKEIVEEMFNESDTRTKGDY

SEQ ID NO: 63121 - protein, 543 aa, Paenibacillus vortex V453
MNPTPEQKEIIDYTGHIVVIANPGSGKTFTISQKIISILGELEFYQGVIAISYTNKASRELEKRCLGNGADRKSSFFGTMDKFYITEIVFSFGRHIFGTPKKELEIIDVKNEFFKAFTGFEDLESENAEKDIDAWINNNFASLVKLYVEGYVLLESISKLALYIIDNCISCRKYLKARYKYVFIDEYQDSGSDQHDVFIKLKDLGIISVAVGDTNQSIFGFSKKSSEFLVRLAQNADFKLFHLTKNRRCHPSIINYASKLISKGFTDYISSNETRIFSKSINGGEKETAEWLNAVIPKVITHFGVESRNEIGILVRNSRTGKMLQKNLTLENKFFGSTPFDGNRSLWGSIFESILNFIYDDSLTKYELVGNYLDIELQAGKAREFMRLLSAVECYKDNILEMQKSSPIFIKIARIIYPQAENITAVTTLNIVLNSPELLEFFKPADKNQIQIMSLHKSKGLEFEVVFHLDLHRYVLPKEFNGEYPEAIQDLNLHYVGITRAKKCCVLCTSTVRVNGKGETKTGDPSIFLQLNRLYPLRSPFMY

SEQ ID NO: 63122 - protein, 561 aa, Burkholderia pseudomallei 1106b
MTHDKGRGSREILSSLIKVDFLHAQRHLSDSGGGARSEDLSRCLSRFYERNLEKHEEDYDAQRALYQSEALLNDHLERVFGPTLERLSHLGYPGLNNPKLLIKTALNPATILSSHDGARVHYAVGPEVGIDTQTTLPDRYNGLGFKNLIYMVVELLDAHARWLDIEENRPPLHLIFIEEPEAHLHAQLQQVFIRKVLDILDIPDEDAPHCTTQIVVSTHSPHVLFERGFQPIRYFRRVREAGVQRSEVLSMASFYETANDPNDPTDRTRDFLERYLRLTHCDLFFADAAILVEGNVERLLMPQMIAKVAPGLLSTYVSILEVGGAFGHRFKGLIEFLGLTTLIVTDIDSVMAPAAADPVAPDDEDDPDADPDLEEAAEDRAAVRGGRKACMANEPGALTSNQTLIQWLPGRSTIADLLNATVEQRIQVRTVASDALIRVSYQTSVNASWRGTTAAMVGRTLEEAFALENLAWCQDAARAEIRLRVRGCNKLSLEQIAQSLHRKIKSANFRKTDFALALLSQDPSAWTVPAYISEGLLWLEHEVVPHPPEIAAPPINAGAVA

SEQ ID NO: 63123 - protein, 631 aa, Burkholderia pseudomallei 1106b; identical to SEQ ID NO: 62563

SEQ ID NO: 63124 - protein, 566 aa, Escherichia coli WV_060327
MRIETVYIKGFRNYCDAVINFNETNLIIGANDVGKTNLLYAIRLLLDKSLSELDLEPKSNDFHVNSTGEQVENIEITIKFTDVSEDAVISKLGGYVSDEGETYIKYLASSLTMDYKILLSHEHNNFDEVPNRFYLKCLSLRYINSQRDLEKYIKIEKKHLLRLAQEVRSEKDTENDGAVFTELNKLLTEVNEKVKGISYVASATEELNEELRKLSYTHDRLTVQLDTGAIGIDQFIEKLELSANTNGKKLMLGGDGFNNQILLALWKAKSVREHDVESEVVIYCIEEPEAHLFPHQQRKLAAYLIDKLPGQAIVTSHSPQIAVNFKPDSIIKLYYDDGETLAASNGCSDCISSAWDGMGYRMSIIPAEAFFANVVFLVEGPSEVIFYTELAKALSIDLDYYNISILSVDGIQFEVYRKILTALNINWIVRTDNDASKVPHKNEWQYAGVNRALALCGENKEPNSSIPIDSKALHTKWGTISPIINPNGVYISFFDLEGDLANDFSKHVLDYASKDNLDDAADYLRGKKAIRMRELIKEKKAFLTELKSKDIARPLIHALKIARGEL

SEQ ID NO: 63125 - protein, 540 aa, Escherichia coli WV_060327
MKLTKEQLDAIDYEGNLVITACPGSGKTTILVHKIAACLSHSKDYQGVVALSYTNKSSEELKARCRKLGAELNSSFFGTIDKFFINEIILPFVRQVWGRNESALEVVKYIDLSQELKDKTNKYFDRVDFYSNTSFEGMGSLRDIYLKGMLILDFLPHLAFYIVRTSYSCQRYLMAKYIGFFVDEYQDTGYFTHQVFKFIPTLGMPLIIVGDLDQSIYLYSHRSSDSLKDFMNDSGFCHKEITVNHRCHPSIVNYANRIKDFECQLAPCDEIFVYRKCVDGNQIDIAKWIGEILDNVKNKFSISDNKEIAILVRSNACAELVSDNLVVSNRAYLDNDLTKAGGKVSGLVNDLLCYRYNLNKTAQSILEGVLGSSVKRSEATRIRKAIKQVRSVTDAFLIDVINKIVVTLLGTEIEQHHKSALSEILVTPRMQNNYLDVRSDEVQIMTLHKSKGLEFDFVFHLDLYDWILPKRVFIEGSYDVVFENEQQCINLHYVGITRARKGIMLMHSTKRYNGSGDLKNGAPSQFLLKPGLDGLYKKIN

SEQ ID NO: 63126 - protein, 610 aa, Burkholderia gladioli BSR3
MRVSRLQIENFRGIKKAELHFSGHTLLIGGNNVGKSTICEALDLVLGPDRLNRTPPVEEFDFRNAGYLNEDGETPAPIRIEVVLVDLTDDIKKLCAANLEFWHKADKRVLGEGEIGNADDPNVELCLRLITVAQYDIEEDQFFAKTIYGRSDDDDDADPRSIPTKVKRAIGFLYLRTIRTGSRALSLERGTLLDNILRMKEARKGMWESIRQRLAALDPPIDTDATELGPILDEIETRLAEYIAPGSDGRSTRLFVSQLTREHLRKTIAFFLTMGRGEEAVPFQQAGSGTLNTLLLALLTFIADLKKDNVIFAMEEPEIALPPHTQRRIANYLLEETSQCFVTSHSPYVIERFEPDGILKLNRDEHGTLSGTAIKLPAGMKAKNYRQNFRRAIAEAMLGQGVIVGEGITEQDALLVVAQKMEDSNPALFPLDVAGLSVINADGDGNLEKLGAFFKEIGTPAFAFFDRKKRTDAEIATLQGSYVVAKEIQQKGAEVLMAEETPLERQWQYLEALRAEDADGRFGIPVGRPADDELRKLTTSTLKGLKGEGGAAKLLQLCAVAELPKTITDFLADIYQRYPKPKRKEAPAAQVDAGAAAAGDNAAAGAPEGL

SEQ ID NO: 63127 - protein, 577 aa, Burkholderia gladioli BSR3
MALVICAQRQSILDENGAILVTGGPGSGKTTIALAKARLVIERGLSPGQSVLFLSFSRAAVARVAEASKTQLPTALQGKLSIQTFHSLFWRILQAYGYLLGAPRSLRLLMPHDEAAMRHEFESNGGDWNVERERLFRETGRVAFDLFAPKAHELLSRSARLRELFSSCYPLIVVDEAQDTAEDQWQCVRLLSAGTQMMCLADLDQQIYDFRPGVSSDRVTHIMAALQPLRVDLAGENHRSPNSEIVAFANDMLLNTPRGAAYRGVSRMNYRANREYRDRAIRQAIGIAIQRAKEAAQGDIESLAVLATWGRGVNVISRALTGDGTNLIPHRVMIDEASVLLSSRMVAFMLEPRRPVAEELLDLADGLDLAAMVFRARGGNTNLATAQRLAASAVQSRGGTSPRANGVASKLLAAVRLLRTHEFTGDPKRDWLDARSILRNAGANPFQAIAEDAEQLVAFQRGRRISAALTELWQTQGAYLNARGALDAAIAEDQLLSGGNDLRGIHVMTIHKSKGKEFDAAIIFDDPNSSPLLFTQEVAPHPRCRKLVRVGITRARHHVLMLCDMFTPTALLQGHQL

SEQ ID NO: 63128 - protein, 595 aa, Burkholderia gladioli BSR3
MHLSRLVIKNFRKLKYAELTFQAGLNVLIGGNNVGKTAVIDALRALLAGHDEPYPRLGEEDVHRPSDGTPSGDIVFEYVFSGLSLDDEADFLAALVPGAAGGLDAHIKIRYSEADKAGRLRAKRWCGEHEDVGLTADMMENLRGVYLPPLRDASQGLKPSRTSQLARLLQLLADDAGIDGINKALQELDGTLKAHLPIVNTHEAINSRHKTMLGPQLAQMLEVGLSASDFKSLKSRLSLLVDTFEIEQNGLGFNNLIYMAVVLSELAKNPDSCYRGLIVEEPEAHLHPQLQAVLLQYLQSIQAVEGEKPVQLFVTSHSPNFASIADLDSLVCLVDTGTAVETFLPRTIVFEKGKREKLERYLDVTRAELFFARRVIFVEGAAELMMVNALAKRIGCNLRQHGVSVISVEGLNFDSFLPLFGDKALKIPVAVLTDADPVPPESEPPVSAETTDDEDDDHEPVYPAPGDVITVSANTAKMKAREDAHVKVFHGLKTFEYDLALESDNRPAMLKALGELHPKIAKSLTAKINAEATEAAKAKALFCGMFERSKNNVQKGSFAQSLAQVIAEEKVAFTVPSYIQAAILHACSSAETPEP

SEQ ID NO: 63129 - protein, 608 aa, Burkholderia gladioli BSR3
MSDLTPEQKAVVDAPMVPLCVMACAGSGKTKTAVHRLVRVRCNLGEARGRVALLSFSNVAVDTFRKAYDDLASDLPSSAGRSRVDIDTLDGFITTNIIRPHGHRIMKSARAAFLVTGGESFLEGFRFPTSSFPQPITALQVGFEKGVEVFFHVYNDQIEQVDKSTACNLIAKLARTGAYTHDLGRYWAYRTLKEHPELLAAIARRYPHILIDEAQDIGTMHEAILELLIGAGSRVTLIGDPNQGIYDFAGANGKFLTEYHQRDGVKPLYLHRNFRSAPSIVDLANSLCGRSDVAERAVPMKPHGAFFTGYKRSQQQELITAFQGALPAAGADITRSAVLCRGRGLADTLRGEEAPAGQGQVKAFAAAAVLRDRRKDFLKAFKRVAVAVVALLDSPPNNLVSRITQTSTDPVDLELRKTIWAFTRDAATGLPSSSLVADTQWHSLLLARVKILMVSLESKFGFKQTDNIGRKLSKKALPNAPLASADDLADSDVTTLRVDTVHKAKGESLDAVLYITLKEHAHALLGGVATEVGRIGYVAATRARDLLWVAVPDSALKELGPKLLAKGFKEVGVATPPVTGAKAEVSTDVAIASVAATTPITPSTSETP

SEQ ID NO: 63130 - protein, 732 aa, Pseudomonas brassicacearum subsp. brassicacearum NFM421
MAGRLPINDFTLQHWIQIDNAAFDWERVPNGDPLVPVAWDRVLPFLDVWLNVPAHELHYVQKLLPTLDWNGSSIGVRLRFEPKDAQALQQEYLIAKLAAAAVMAKAEEVSVEVRATSAAEEAEVVVPLPSSTFALWPRSMMDFLARRMRSTFEVRAYLLDPAELRSPENGLARPQPLPEHSEPISGDPFSGLIRIDEIDAQRGFGHSGSTGTPHGDDSRDDFMEQRTGKKLSSQLRSYYTQHLDPFDKPEPKDLQALQALHVAKTAFGQRLEDSFADALKELEDIGYPGVTDPKLTITPCINPIDGLNHSSAVQYEVPTQLAQNTKMHRLPEDSNGLGYQNLVSMVFALMSFRDKWMKVGKAGKQTTADGLLIPPLHLVLIEEPEAHLHAQVQQVFIKQAYAVLRKHDQLRDCQDLRTQLVVSTHSSHLAHEADFASLRYFRRLPAPAEAGSVPLTSVVNLSEIFDGPDKSERFVKRYLKATHCDLFFADAAILVEGPAERILVPHFVRERETYAYLKRCYITWLEIGGSHAHRLRSLIQHLGLSTLIITDIDAKHGTTNASVVPARGAGQRARNETLKTWIPKEESLDLLLDKKSEEKVLTDSSGYALRVAYQQPISMAFKGQPPTEALANTFEDALVYENPGLFEKLEGHGLIAKFRDALASATDLEDLAKQAFKALENGKKAEFALDLIYSEEIKYLKVPVYIHEGLTWLATQLKRKEEDVLGKMRTKP

SEQ ID NO: 63131 - protein, 624 aa, Pseudomonas brassicacearum subsp. brassicacearum NFM421
MISLDAVVSNDDVDDAVDVEISRCLNLDDPQSFFLFAGAGSGKTRSLVTALKKVQIDFGSRLRFKGQRVGVITYTNAASEEIERRLAFDPTIEVSTIHSFAWSLIEGLNRDIREWLRLDLAADIEKLNKDEAKGRAGTKASATRLSKIASKTKRLANLDSVKRFVYSPTGENRGRDSLNHSEVIQLTSHFLSSKPAMQSILVGRFPLLLIDESQDTNKNLIDALFAVQSTHKARFALGLLGDMMQRIYSDGKEGLGQNLPGDWATPTKQMNHRCPRRVVSLINKVREATDKQQQKWRSDSAEGCIRLYILPSETSDKQAAEKAIGEHMAKVSADDNWNDLKTCKTLTLEHRMAARRMGFLEMFVPLYEVESWRPNFLDGSLPIVRFFSEEVLPLIQAKKREDRFGIARIAREHSPLLSVDALRAGDNSQSQLQLVASSIDQLMSLWVDGADPSLAEVLRNVAATKLFPIPELLQPNAYRDKALDAVEPAVDGVDADRQSERAAAIDAFLEAPFSQIEPFANYVSGKAHFDTHQGVKGLQFDRVMVIMDDEEARGFMFKYENLFGGKGVGDPSVESTRRLFYVTCSRAMQSLALVAYTSSPGRVSKFAINEGWFSADEIVTDIGL

SEQ ID NO: 63132 - protein, 531 aa, Oxalobacteraceae bacterium IMCC9480
MSILIDSIRVAGFRGIKNLEVFLTRITVLIGTNNAGKTSLIKALQLNLGDYSRCLTEEDFYIAPDEKRVSEIIVDVRIVPADVNGTRGKEFDVEWLTEFGDKIQSEANGNQFVAIRTRSQQNVTKGGFDTSRTILENWPSFDNWTTIKLKGTKLSGRLQCIPFISMEAQRDIHQDLRDRSSFIGKILASVEYEKKDILELEAQIKKVNDEAVNKSKELKSLKAHLEKLNQSIGGAGGAEVTPFPKKIRDLSKNFSVYFGENDANSFSMEYHGMGTRSWASMLTIKSFIEILSNRHTTESKSLFPILTAEEPEAHLHPNAQKTLYRQLSDTKGQLILSSHSPFLASMADLYEIRSLVKTKNGIVMHKISHTMTNEDKKVVAREVLAKRGELLFAKCIILCEGITEEQVLPAMLELYLGNSPWNMGVSCVSVGGKNYSPFVRLASSFGIPTCILSDNDGSTKTEVEAQIRRLNRELDIPLGDNLYGVNYLNAGNDFEAELVGHGLRDEIIDALVLYETKGSTIKRYKTAKYTN

SEQ ID NO: 63133 - protein, 631 aa, Oxalobacteraceae bacterium IMCC9480
MLNLSKSQEAVVHAEIGQPMQVLAAAGSGKTRVLTERVRYLIENTRKDGVIALTFTNKAAEEMQTRLADLDELDERCWVATIHAVAQRILDKYGHTIGLPSELHIYERDQDRKTVFLQSLRENNVDIDDFLNVGDEKTRKDRERIIQNYLEQFSVVKRELLTEEEIKEKYPSNESFLRIYQEYQGALVRSGGLDFDDILVYAHRILMEQPWCAQIYRAKYKHLCVDEAQDLNKAQYEFIKVLCGDKVKSVMMVGDPNQMIFGFNGSSSDYLCKFFPLDFSAKIFELKENYRSSKSVIRLANKLKPGSQIEADFVLDGQFEISSYKNEEEEAISISNKVNELLLQKTNTEIEGDISLSNMVVIARNRFVFLALEKILSEKGIPYSLKKGERQAEPSSIFGKVLDLAIRIRLNPKDWIDGKKLCTALKIEVPSLWGNDNILLEMANAARQSSMSFCDIYAELLDAIQALDIEQPNIPKLYDNFNKIIKDLNDAHLPKEDNELERSLQELDDFRKCWTTFKRKGLGESLASFRNAIALGQVADNYDPAGLTLSTVHTMKGLEKDIVFLMGMCEGIFPDYRANTKKELEEELNSAFVAITRAKRWIFVSYPLQRVMPWGSSKSQSVSRFVKMLQM

SEQ ID NO: 63134 - protein, 663 aa, Vibrio parahaemolyticus 10329
MKIKNVRIKNYRLLKDVSFSIDEKTTIIVGRNNTGKTSFAEAFRSFLNHAGPKVRYEDFNQSCLSGFEDALNAHQGGAEDDVVRPMLPTIELELLINYKENADEYGVLGDFIIDFNDQLFETIILISYQLKDGKIGDFFSGLDTIKRKQYFSDLRARIEHYYEATVYAVEPTNQSNKARLEFSSFKKLLLSGLINAQRGLDDETHNERDVLGKSLGNIFKSASSVGAPEAFKAQSAEIHNVVEGLQQVVDTDFQARVKALLPTLNIFGYPGLHDPNLSAATELNVKSLLESHTRVFYQRDDHFTLPETYNGLGMRNLIFILFRIYEYFREFQSHQTPPKGHVIFIEEPEAHLHPQMQEVFIRQLEQIVEQFQRELNNQQVWPVQFIVSTHSSHIANEADFSKVRYFLSKNGNETKVKDLGVAFQSAEAAGDKEFLHKYLTLTKCDLYFADRAILVEGATERILLPQMIKKVDAALGTNLRQKYLSVVEIGGAYAHHFYKFIDFLELKTLFITDLDAVDSKQHHAAVMVSQGDRSSNVGISKWFGEEGYSDLATIRAKDSDSKILGYRRLAFQVDEDVSGLCGRSFEDAFILVNSQLFQLNNLTGSALEAAVYDKAKDIGKKSKADFAIEYCISNTDWLVPKYIQEGCAWLDEDPTVAVEGVQS

SEQ ID NO: 63135 - protein, 583 aa, Vibrio parahaemolyticus 10329
MTALNPAAQASVETLESLRGCIDQGQCFRLEAGAGAGKTYSLIESLKHLISLRANEFVVSGKQVACITYTNVAKDEIKARTDNNPVIFADTIHAFSWSVLQNYQVQLRQLIPTLGAKWQERIAESVGIGNQTVKYDLGYASIKEHEISLHHDDVVALMARMLAFPKFQKLLKSKFPIIFIDEYQDTDSALAESIVQNLIDNDSGVVVGLFGDHWQKIYGSSACGLISSPAGKIIEIGKRANFRSDKNIVECLNRMRPELPQAESDPSSVGGIKVYHSNDWQGARQTGAHWKDDLPEEETRRFIQQTKSLMVEHGWDMSLSKTKILFLTNNLIATEQKFKNLADCFNYAEDYLKKNDKYIEFFVDTVELTALAFQQRKYGELLQIKKKNRSYLTSQADKTAWIENLEKLMRLRDTSTIGDVLDLLITTSMPRVPAKVADSEVRYQTLSARDKDSLEPDELSFVAKIRRLRAVSYSEVINLAEYINDKTPFSTKHGVKGAQFDNVLVVCGRGWNHYNWDQMLEWIENGVPKGKDGTFERNRNLFYVSCSRAKHNLTLLFTQYLSDKSLTALGKIFGNENIKGSPF

SEQ ID NO: 63136 - protein, 701 aa, Bacillus amyloliquefaciens TA208
MLLKGVTIQNYRKFKNEAFSMADDVTLLAGANNSGKTSMINLIGSIMQNGKTPFFISDIPVRLSKQWVDEVYETFILCFKEGDDQLSTVERIINKLFSTELFNLECDLIIPATSIRFRIDYSEEDDIRKFADFIMDLNPDNKSFYFEYSFQPTYVSFGQALEENYKKLYARYKKIHSSKDPTLKIRQFKEVILSIYEASIIEKCYFSDSDYTDKVEIDISTFRRLFNFRYINAGRPLDDQSNGNFKSLSKNMVELATHDEKLGALLENLPDQILSPIQDTEIIDKVRDTSVKGLSNAVKTIAKASGGNTGSMILDIDINEGTITSLLNQITNTKYQYEGYFLNEASQGLGYSNMIYILLQLETYKRKIDPLLVNLFVVEEPESHMHPQMQRIFGKYLKDYYLQKKIQGLITTHSGEMVRLTEMKNLRVSRPIDQLESKIYDFSMFKKGLSGDTTLDTFYDWFYEIGFSEIVFADRVILYEGDTERLLIRKLLTLDIYEELNQKYIAYVQVGGAYAHKYSKVINFLKIKTLVLTDLDYKKDATTVEAVKESKTTNATINTYYDLSKEIKSPTILDLYEWKDKGENKILGGLVLINYQGKSEQYARTLEEAMLSKFYNLNVLEKKDRSFWIEKRNSDNLKYTIPNPDKSKKDDLDKDEKYSIRDIVRHSENNKTDFMYSVILNGLIEKMLPNYIKEGLDWLQN

SEQ ID NO: 63137 - protein, 459 aa, Bacillus amyloliquefaciens TA208
MFYKAGLNTSSKLYFLGDKMQQIYKNYDGSFEKELKTLNNEIKLDTNHRSIPDIVSILNNIYNDKEFKQISSDKNRANKPDHPPRVVLCDNIQKRIKREQLIYPNALLLFLLNQQRFDSIGAGEFYRQFNRLDRYSQVNQLNASDVLSDNTNENKDPLLKLLFIVDKILSYYEDFNLGSIIQTLKRNQKIFDTRIGTITSHQDKVNLNNLLKQIYDFYQKDSSIYEFLTLLRGSRVIKEEYIDNISNEYIGVLAVTLNEFKALSNYLKDPKVSTQHGVKGESHNTVFFIADDSFRTPLVHMYKFLKLWTITELSLDSLESFYYDYKKWIEDTIDHLACKISDLNKEKYEAHATYLKTRVEELCKYFENNWIFKDLCEDFYNAYLLKPNVTNFKKCFKESTVYGVLSAYRLFYVGCSRAKSNLTIFIDKYKVKDFSEDLIFKLKRTGFSVEIEAKELQKL

SEQ ID NO: 63138 - protein, 650 aa, Methanosarcina barkeri str. Fusaro
MASFNKYLKYVLCFGNYKGKIHKRDLTMYLKKIHVKNFRCINDINLELNSGLNVIIGANNSGKTSLLDSLRLALSIGNYSRSIYVSSEDFFVDEFGKKSQTIEIDLTFSELTPEDMGVFIEMLKVNDDGNHELELHVRYKRERKNGIEKIRVRYWGGEKEANTIPIEVMELFYIVYLEALRDSENYLKPNRGNKLGQLFLKLVPDETAQEKHAQQIYESITSNEDWNELITDARKKINEHLENTTLEHDTLRIDIDFAPVDFTKIAERLKIYIPILKKIKRELIENIFEEEGWEKYFEYPHSDKLILKTDIKELLKNEVNSELKFKISKLEKFIQKFEIYQNGLGYNNLIYIATIIGDLIERVNRKSENYIALLIEEPEAHLHPQLQNILFNYFKNIESKNIQIFLTSHSPTITAKTDIDTVILMENSFKVDILPLKDIEFEDETDKKYLQRFLDVTKSQLFFANGVIFVEGISEAMLLHIFSKILGIDLEKNGIEVVNIGGVAFKPFAKLFNSEHMDKKIKVRAAILSDDDESDGKISRRASNLNKLNSENLKVFLGTKTFEYELFLLNGDLLTNLYKKLHPNFPQSNPQENTEKNADYLVKRLKSNKDKGEFSQLLMMELIENEDTRNKFKVPRYIEKCVKWVVGAED

SEQ ID NO: 63139 - protein, 260 aa, Methanosarcina barkeri str. Fusaro
MGLRIEDFSGDKIHILEKDGVFVVKACAGSGKTCVVAAKISSLLRKWESNNRGIAAISFTNVAWQEIEDKLKKDFGVDSGLDYPHFIGTIDSFIDTYLLLPFGHLVLNCENRPEIIMNWEPEIRGKFECKKSGCKLSNLSYDINGNLISYSDSSHFSNCSLSHRYCKASKIQLRQSGYLTQADANFFVMKLLEKYPDIAKAIVYRFPVFLIDEAQDTSDVQMKIFDLLLENGLERLMLIGDPNQAIYEWRTANPEVFIRK

SEQ ID NO: 63140 - protein, 598 aa, Cupriavidus metallidurans CH34
MKLKRIYISNFRNFEQIDVALDGSVVVVGENRVGKSNLLFALRLILDPSLPDSARQLGQGDFWDGLGEPLEDERITVFVELIEFANDMDLLAVLTDYRLDDDPDTVRLTYEFRPIAGLAGFPQADEDYEFICFGGESENKRFGHDVRRRVAMDLLPALRDAEGDLAVWRRSPLRPLLERAFAEVPSQDLGQVRDVVQQATQQLAEFPTVQALQQRLRDLFVSMSGPKQDIQPALGFGTTDVTRLIRNLKLLIDGGLRTIGDASLGSANVAFLTLKALELQQLMSENRRDHTVLAIEEPEAHLHPHLQRSVYRHLFEDLAGAQGEQLSLMLTTHSPHIASVAPLRSLVLLRESPQNGTVGTSSAEISLTEDEEDDLARYLDVTRAEMLFARGIILVEGDAEKFLLPVMAASMGHDLDHLGITICSVSGTNFTPYAKFLTALGIPFSIITDWDPRVGKKPLGFNRSWRLVESIEQTLTGVAQPKLVQELVAIADYDDFCLRCEDFGIFSNFVTLEVDLFDDQDFTGEIIATLRESNWSEERRAWIDAWEDDPDKLNAENYLKLIDGVGKGRFAQRLASKIVGAIPPEYISKAISYVVNRV

SEQ ID NO: 63141 - protein, 591 aa, Cupriavidus metallidurans CH34
MSNRAAYLQAAEELRDNPGQWAAYESRGHCVVLAGPGSGKTKTLTTKMARLLAEDVAEPRGVACITYNNECARELEARLSSLGVEPGGRVFVGTVHSFSLTQVILPYAKVAGLGLPDDFRVATNAEALAALDDAAQVAMGAVPNLQTIRSQMGSYRRSILNRDSDLWRDTNPRLARLAEAYEAELRVRGLIDFDDMPLLAVRALRENPWLQTALLAKYPVLVVDEYQDLGAALHRMVMGLCFSAGMRLFAVGDVDQSIYGFIGAQPQMLQRLAEREDVEIIRLQLNYRSGHRIVAASGAVLGVDRGYAAVDGAPQGEIFFHSLGGSYEVQARRLMTDLLPAAMAREPGVRYDEIAVLYPAAWIGNAVAEAARHAGVPFIRTDGNALYPRSSRLMQWLELSAQWCCGGWRTGSPRFSQLVSEGRRLFGDAIRAELDAAAFHRALVACLWEMRRPDMVLYDWLQRFKRTVLDQHAQLSPNLRDELNILGSFLERVSPDADYAEMTVAEFAGEHTFDRLMLSTLHSAKGREFRFVFLFGIDHGRLPRNGARPDEINESRRLFYVGISRARTEVHIAYTHGNSSIFVDELQARLN

SEQ ID NO: 63142 - protein, 746 aa, Streptococcus agalactiae NEM316
MYLKSLSIKNYRKYGEEVQTINFAHSKWSEMSGAEDESEKINRTEEYISKSSSLIVGKNNSGKSTIVKLLNTLQNTKSGSRNIFKYTDFNLKMLSDWYRFNIDNKSKEDIESIDKSDFPKLEFQLILGIDDENDLISSFEDILILGGIETVGTHENQEVAEVTIDVKYEVADVQSFLEELVKIKSSPREKIEQYDQGYQKELRYRKFLSLFSSNYFVLNFYPIRRDEPAKEFSLSSLLKVATIEANTVKNDKTLSQAYNKIVSTYIKNNDIVEIDSLVGDINYQVKDMVDTNIKDILQSAVSSIESTKNLKMNLHPDVTLEKIFANSIIYEYQEGNNNIPESQFGMGYTNLMVIIAKIVDYIELYSEKDINGSVNILCIEEPESFMHPQMQELFIKNISKAIATLLGKKQQLDTFQIIITTHSTHILNSKIQSGNTLNNISYLGQVGVNNIIKNVSDDKIASGRDIDKKAYEYIKKYLRLEITDIFFADAVVLVEGVSEETYLRYEIDRHSILKNHHVKVYRIDGAYAHQFISLLDLLGVRTVIFTDLDLKRSESEKKVDIKDNAEPDVIPSNIPDLEEKYGGVASSLTTNGTIQYFVKKLLNDDKAKYDKINSKIIEILTDKEELVVEYNNISMYSQGKINKYYATSFEEAIVLTNAGNEDENKYKKSLIKALQYVHPNMRYFGDIDETSEIADKSYMYQVKLSDGKSKFSTGIVYLSITDKEFSLKRPQYVESGLNLLCGYFEE

SEQ ID NO: 63143 - protein, 672 aa, Streptococcus agalactiae NEM316
MTYTISTENKQLELDIQKDINECLDNFESFCFDAGAGAGKTYALQKSIEHILKTEGENLKLRNQKILCITYTNAAKDEILSRIGKNSAILASTIHEFLWGFISIQQELLTIEHEKKIKEELNGIEQKIIDNPLFGSVNLVDFHNAISDEEFLKVFYSTPISPAGDFKSMIKGYSEYFSPYLSNVNKFSSLVKNVDKKYKLEETLKEIKNKKSKKIIYNPIRNRDKLENYVISHDTLLLYCRNIITSQNLLKRLFSDRYPYVLVDEYQDTDEKVVDIIDSIRKFTICKKNFVVGFFGDTLQNIYSSGVGKLPNKEEYKSITKIFNRRSSNQIVELIEKIRNDNFGQQSIYTDFDNGSYNFYIADDDFDLDIFLQEKNLVSNTACLLMKNDDIARVRGFDVLLAIIKKFPRFGGNNFDNVNNEFLQKNLQHMGWFLREILTFIDFIQKSSDYNSTVKEIVQFIGPSKSTITFGEMKQFISSLRGINLSTLTIDECINKIANIQERISGEDILRKIFSIDDTTENILLNIKNRAYDYFYYLQDSEEYSEREMIVIDNFFRLDVTQFIKWYKYIFDDLKNEEISYYTLHGSKGLEFDNVVVVLQDNFAGKRNYCKYFFENYNNLTDSDLQFQEVRNLLYVACSRAKIKLCVIYISDTLEDALKNIESIFGEIQYLA

SEQ ID NO: 63144 - protein, 665 aa, Photobacterium profundum SS9
MYIMKLSKVRISNFQCFDQSQTEIDFEEQLTALIGLNGSGKTSTLQALSRMFGVSESARKIKVDDFHSPSVTVQRADELSIEAWFTFPEVESEADMIAVAGTFNQLCFKSSGNEMMLRLKLEAKLTVDDISPDGVVDETVYYVLSDSDTYASDKCRELRRSDRNNIQVHYIPASRNPFKEISSSTKMLLGRLLNAIQWDQSADGELQKALELTEQASEEISKNSAIKLIEKQLQNSWQEMYSGDYLSKAKVNFLPLQTDELLKTITLSFESDTNNRKATMDRLSDGQRSLLHIAIIQAVHELESKTLREQSNRVHFDSKKLNTPIFTLLALEEPENHLAPHFLGRIVKSMSSLAKSTNAQVLVTTHSPSLVGRIEPTQIRYFRLDSTSRSTVVSKIQLPDQQDELYKFVAGAVKAYPEIYFARLVILGEGQSEQIVIPKLLSKVGIDIDDSFVSVAPLGGRHVNHFWKLLNGLGIPYVTLLDMDYGRNGGGWGRIKYVVDQMVMLGKSEIITGIPNWDVSDSNPMTDTLSNSKNTAEGLLNQHGVFFSTPLDLDYSMQLSYPKNYNEKLTGENGPQDKDWESLKSAVLKTKYSKGIADYYYDEMQDEDAFLWYNYRFLGSKGKPVSHINALEKIDFNLAENISRIPTGIQEMIKHIENEISNLSE

SEQ ID NO: 63145 - protein, 572 aa, Photobacterium profundum SS9
MIDASVWEPKDGLKFDDKSLGIIKCDNNISIMAGPGAGKTEILAQKACFILETELCAWPYNVLSISRKRESASNIKNRVSLRCGNVLSERFHSFTIEAFTKSIVDRFMHILPKHEQPNEDYKLVFNSRDSNFRDKLTFDQLTITALKIVNSSSTLMSSIRATYKYVFIDEFQDLNGHQYDFVKSIFCGSQSVVTVVGDTKQAVMKFANALPDGFIKFKQDFKADLKIIYTNFRAAPELKQFIDCIGNEWWPINTESVESNIDSVALDKGDYSLLNFNDEEHEVKQLSLKIKKWISEDGIKPKEIAILFRINTNNNYSKNLNIALLDLGVLSINESNIQDYLSEPLGKVLVSLLCLLTRPRDIKAWECLRDSYLYCSSSNSLHNDFELTRILKLIGDTPFYGDGDAKTFDSILDVTIEIMNEFFYENLKKTWTQYRQGTLMDETFHGVLEELKEARNISSSWSGAVDLISGVGAVRMMTIHKSKGLEFEAVVLLGLEDYSYFRYGMTQKKLDEERSTVFVALSRAKSKLLISSAMSRKHTGPSKFMHVNSIINDLTKFGMNRSRVDKLDTLKI

SEQ ID NO: 63146 - protein, 482 aa, Mobiluncus curtisii ATCC 43063
MQQLYYSISNSDFRDAEQPLFIEAKLTNLNSDELSFFPDEVDVQDNSLTIRLEANLNGEDLTISRFFPYGVGNAPLSSAQLKITGWNMVPSDFSTKTLAPGRRNIVDDYLKEIDASGDQVKLGEAIDALGSAINDSNAFTGALSSLASKLNPALEGGVTTENLRFVPGAAIEGNLLSDVRLEMKDKSGSMREVTEQSDGTKALISFAIFGLINSNGIIAIDEPETHLHPSAQRNLMQVLQSSDRQLIIATHSGVVASEFSPDNIAAMRESMPPAQPKSGFLEGQEDQKMLARWWISSRIELLTARNIIAVEGQSDRMVVERVAELVGNHLKRDGIEILEAGSCNEMPYVMDIFGANGFGKQVSILIDEDAENKTASALSIALKDLASKSVFVSRVDLEDEYVAAIGSSSLWEALGKSNLFPPNRLKCCRIARGASLPSATELATFCRRKRNKIACAIVACSLMDGTSASRLSSVVEMLNNAV

SEQ ID NO: 63147 - protein, 568 aa, Mobiluncus curtisii ATCC 43063
MPSSTNPATQEQQEIYDYEAFDMVITSPAGCGKTEALAYRAKGLLERFDFSGNGRKLLIVAFTNQARDNITERLAKYISVQALKRHVTVCNFHGLASRIIKAHGNVVGIDDTWEVASFDWTRKVVQKLNCDKETRTQVENALRTAKLTCLSDDGVMEALQAESGQIGRLATSIEYSRRERKIVTYDDQIRTALWILQDERVARLYENHFFAALVDEFQDLTPQQLKLVKALCGNNISYAGDLAQSIFSFAGADASFTYREISKSCGKQVKLIKSFRSAPAVLDAVNSLSTLTDSENLSTAMPFHWGDGGLSGYSCFRSEEDEARWVVAMSQAILWHCPNQRVGIVTRTGFRSNAIKHILASEKIGYTDWGNGLFRPEVAKTLRNICDDMEGKSFDGTLEIYRYIMEQAAQAQGGLPEELEEASAWLFDQILQHKNGLSVIPEIRRCIAERKGNETMATRVGIHCLTGHAGKGQQFDWVFIVGLEQGSIPFYKAGTKEELKEEARILSVMISRARIGFVATSTLISPYNYSREPSKFLPYLQKNPSFLNNKDRIEEWCAAADWATIAQM

SEQ ID NO: 63148 - protein, 711 aa, Erwinia billingiae Eb661
MYLKSLVIHNFRKFSNSNNKVCFVKAGKTSPEQSPVAASTTVVIGKNNSGKTTITNSLALLCSDTDKLNGNDFNHNYLRRILSAFLASDFSIYPEIKFEMEFILDDINNDSTSNFSPFIDVSSLSSIPRDDTKDTTAYIMIIFKIYDEEIFRDAVDDLIKEKKDSGYNDNEFFRRFLDLISETEFKRVIKNIDNKLIDKAKVKNLIDLRIIKVANNIHDQRLLAKSFNRIIKFMYEKNKDELKSILHLVDGNNHSLTEKIKVSHQDNVESVLNTIILDESLGIELRANLTFDRLMGDLITYEHRDGENLIPEGQFGLGYANLINIISEIIDYSNRSLHEEKQLKIQLLCIEEPEVFMHPQMQVNFIRHIEEALIKILGLNSKDISSIKSQIVVTTHSSHILNSIIHGSGTFNEINYINSSKGNSESIILNDNDLCEGGKEFDYFKFIKKHVKHQVPELFFSDAIILVEGITEERVINYYIDRNTFLSKGNISVFRIDGAHRKVYSNLLKRINIPTLIITDIDFKRDNSLFKQVIIQDDGSEITTEHFPQMELLDDSIETTNSTLTHFLGSKKVINFPEHHISDNIYLAYQLEKISLDIPDGNKASYYATSFEEALILKNYRNDLLRGVLLKVVGKDYLDIISDEKEKHHILAMNSFKIQKKLSDSKSAFANAIIYELLTSEDVKPELPSYIINGLSWLGSQKRKVRGGDYV

SEQ ID NO: 63149 - protein, 300 aa, Erwinia billingiae Eb661
MYELDAEKEKTEHEIIESIYHSINEEKSFYFQSGAGAGKTYALVKAIKYAGQLCAIKKNNSSRKILCITYTNNATNEIAERLPSSEHYYVSTIHYFIWDLLKNYNKELIETHVSFLGDEIKRLEYIVFHDPDLHKSYKNFRSLSIEELDFLIEKIREDKINYYEVAFGPAVPYWSYLESVIGIDLLRAIKSNKQDVYDAIKILLTIKNYKNCLDSIKTGDPKYKDITYKANQNIEILHLSVIGHDTLLKYAKILLLKNIGLSRVVIDAYPYVFIDECQDTNPDIIDFFSEIYTYSKGSSD

SEQ ID NO: 63150 - protein, 459 aa, Bacillus amyloliquefaciens DSM 7
MSIYEASIIEKCYFSDSDYTDKVEIDISTFRRLFNFRYINAGRPLDDQSNGNFKSLSKNMVELATHDEKLGALLENLPDQILSPIQDTEIIDKVRDTSVKGLSNAVKTIAKASGGNTGSMILDIDINEGTITSLLNQITNTKYQYEGYFLNEASQGLGYSNMIYILLQLETYKRKIDPLLVNLFVVEEPESHMHPQMQRIFGKYLKDYYLQKKIQGLITTHSGEMVRLTEMKNLRVSRPIDQLESKIYDFSMFKKGLSGDTTLDTFYDWFYEIGFSEIVFADRVILYEGDTERLLIRKLLTLDIYEELNQKYIAYVQVGGAYAHKYSKVINFLKIKTLVLTDLDYKKDATTVEAVKESKTTNATINTYYDLSKEIKSPTILDLYEWKDKGENKILGGLVLINYQGKSEQYARTLEEAMLSKFYNLNVLEKKMEVSGLRKEIAIILNILFQTLINLKKMI

SEQ ID NO: 63151 - protein, 517 aa, Bacillus amyloliquefaciens DSM 7
MAAKLVDNIFLINAPAGSGKTTKIKSMIVNHKIKHPLDNILCITYTKRAAEELKKGLDEEGIHISTIHSFLHKFLRIYFCKNEMIDLYMELFGDLIRGNIENKEEKEHVLARNKKYIDKFGCLTLEVIKTNISSIYYNETSNNHLYKGGLSHDSLLIFAEKVFEKFPKIKKRLTQKYQLIFIDEYQDSAPSVLKMFYKAGLNTSSKLYFLGDKMQQIYKNYDGSFEKELKTLNNEIKLDTNHRSIPDIVSILNNIYNDKEFKQISSDKNRANKPDHPPRVVLCDNIQKRIKREQLIYPNALLLFLLNQQRFDSIGAGEFYRQFNRLDRYSQVNQLNASDVLSDNTNENKDPLLKLLFIVDKILSYYEDFNLGSIIQTLKRNQKIFDTRIGTITSHQDKVNLNNLLKQIYDFYQKDSSIYEFLTLLRGSRVIKEEYIDNISNEYIGVLAVTLNEFKALSNYLKDPKVSTQHGVKGESHNTVFFIADDSFRTPLVHMYKFLKLWTITELSLDSSRILLL

SEQ ID NO: 63152 - protein, 656 aa, Streptococcus gallolyticus subsp. gallolyticus ATCC BAA-2069
MDSLYISRVVIKNYRNFKDLDVNLQHKSVIVGENNVGKTNFIKALQLILDPSLSDEDRMLSESDFNDSLKNPMENNQEILIQIYISNYRRNVAIMTMLSDATVLDAEGNEVLLLSYKFFPHIDEFGKKEYQYEVYMRDDMSRKFGSRERKYLNIKVIKALRDVEADLRNSKKSPVKKMLDDYKISKEVLENIASEYKECGDRVLDLDEINDMTMHINERFSEILGNHDYDISLQAMEVDPTRVLGSLKMLMANRSVSDSSLGLDNILYISLVLQMLKDKTVPTFVSGSEYSELLTKENSEIIDECYISNAGENYVLRTDLNEENYASLYTFMADNGHGNNAVTLLAIEEPEAHLHPVYQRLIYKDVINRNGFPILLTTHSTHITSVVPIKSLVHLHQEAGNTVAHSTASMPMLEGEFLDVERYLDVKRGEIFLGKGVILVEGIAEEYIIPKLAELLGKPLDEKGIVVCNINCTNFKPYMKMLNSLSIPYAVITDGDFYIENVDDRDDSNRNYHVMEKDVKDNDTCGSLGRENAIKTFEALDDSVPENVDLALYFSERGYFIGKYTFEVDMMECTSTEAGERAFTDTFDQLVESSRKQNNFKNRLENQDYEFCLRRIEDQSVGKGRFAQIFSGKCVTDNCPDYVKNAIEYIYAKVDE

SEQ ID NO: 63153 - protein, 609 aa, Streptococcus gallolyticus subsp. gallolyticus ATCC BAA-2069
MSTTTYIEKLSRIEKDEYQKAAFDSQSNTVVLAGPGSGKTTVLTLKAMHLLNGVIAEPRGLACLTYSREAAREFTERLKELGLVRGNNIFLGTVHSFCLTEILGKFCDVYSLNIPTPIKIASEKQRAKLFEIAKKNVGCNDKYFKIERMNCTRMLSISGVSNICVDRDETAEIIANEYEKLLNQAGVIDYETIIIESTKLLQEKPYVRECISAKYPWLLIDEYQDLGRPLHEMVLTLIDNTKIKFFAVGDPDQSIYGFQGAVPDYLIELADRPDVQKITLLNNYRSNQDIIDGSELVLNQQRGYVAKTRENEDAVYKFIEVNEELDDQIEYFVKRIVPGLVKNGIPYEEIAVLVGNNSECNSIALRCQKENIPYYIVKHQFNRSDFVKWVENCASWIEGDKDIVFSDIGDFWISLITVNGAMYLTDEEKLIIRERLYKVLVESKDYEKSLTKWFEYVRKELCFDKYLEQNTYFQDEKDNIDNLMKEMSGSEYKEYGIDKFSKIGKPENQIVISTRHSSKGLEFEAIVMMGMEEDHFPSYYVKNDARLLAEANRLCFVCVSRAKRVCILMKSSYYTIKTKNGPWRKEFKPSMYWNILYSKYGNINTKKLH

SEQ ID NO: 63154 - protein, 744 aa, Paracoccus denitrificans PD1222
MKLRRIEVFNFRKLRRARLDMSDKQTLLVGANNSGKTSAMKALRKFLKDRGGIDTRDVTASNWAAIEQIAGAWTQEVEVDLSPLLAQLPFIDVWLHADTSELHHVAHLIPTLTWTGGLLGVRLRLEPKRGADIKAQYLAAREAAQTLQPGGATAKGFALWPRDFREFLDKRLRDLFELNAHILDPMSFTTTGPVEPQALPALSEGIGSNPFAGLIHIREINAQRGFADAGDSNGDDDEPTNATSRKIASQIQPYFRKHIDPEKDPTPNDVKALEAIHDAETTFNARLKDGFADAIKELESLGYPGGLNNPKLFIATQIKPVDGLDHPAAVQYDISGDTSGVKLPESYNGLGFQNLISMVFQLMRFRDDWMQVGKFKSQLVTPDDKGIEPLQLVLIEEPEAHLHVQVQQVFMARAHKVLRNHKDLEKEGSAFTTQLVVSTHSGHIAHAAAFEELRYFKRELPSQGVVPTASVANMTGLFGADNETHRFVTRYLLSTHFDLFFADAIIVIEGAAERILLPHLIQHHYPDLAAAYLSFLELGGSHAHRLRPLIEALEVPTLIITDLDAVAEVDKGGKIVKESVQPCCGAAQTTANHVLKTWLPKLAEIDELVGSPPTALCHTAPDRPIAVSYQTPQKVTLGSVSTSVTPSTFEDALVLTNPKAVTDAAGTGFSCLMTRAFAKSIAEAQAPEDLAKALFERLAKKPEKAAFALDLLYIKDIKVLRAPPYINTGLTWLAGQLKGVEGAA

SEQ ID NO: 63155 - protein, 650 aa, Paracoccus denitrificans PD1222
MTDVTDATRDAGADATIRACLSLDQPRSFFLFAGAGSGKTRSLKEALEGLDTQTLTTLRKHSRKIAVITYTNAAADEITRRVKADPVFQVQTIHSFAWSLIEGRTADIRGWLESNLRTEIAEIQAAHAKGRAGTDAHDKREKKMASKTKRLERLAEIRAFTYAPEGDNFGRDALQHTEVIALAAHFLTESETFQNIVLARYPFILIDESQDTMKPLMEALLTFEARHRGRIALGLLGDTMQRIYTDGLRDLDQRVGDFSQPAKQMNHRSRKRIVDLANSIRRDDDGRQQRAREDKPGGTVRVFIAPSDGTDRAVFEASARAEMARITGDSAWQNAEAIKTLTIERHMAAARLGFSELFEPLSKPDKLKDGFRDGTLPAMRLFTHRVLPLVTAQRNGDAFAAMAVLRDGSPLVDKRGIREGGGGQATGLDAARAGVAALMTLFNDEPDPSCADVLAVVAEHRLFPIHDQLRACLPDDNLVAQDMADILAELDPLFDELDLTTPEGTPPAETTITEAWTQALEARFSQVARYLAYVEDRSPYGTHQGVKGLEFPRVMVIADDAHTRFKGLASYETLFGVKPLGPAAQKKADNGEETTIERTRRLLYVTCTRAEESLALVLYSEAPDTIRRFLISNGWMAEDEIVIAATDGTH

SEQ ID NO: 63156 - protein, 689 aa, Burkholderia cenocepacia HI2424
MKLRHVQIKNFRLLSDVDLALEDLTTVVVGRNNSGKTSLSEVIRRLLADGSAQFQLEDFSSACYEGFRLAWEARSNDEHDDIVRALIPYIELRLTFQYDPNQPQLGPLSPFVIDLDPDCTEALVVVRYELKDGQLSQLFDGLPPTPLSAEARLTFFRTLRDRIPGNYATRIWAEDPNDAGNQRQLLPNAVKGLVKTGFINAQRGLDDVTSRESDVLAKTVELLFATASSASADAADKQIADSLTDAVQGIQSQIDTNFGGQLKGLIPALKSFGYPGLGNQELHTETLLDVRKLLSNFTKVRYAGYSGVALPESYNGLGARNLIFILLQLAGFYKAYRAEATAPGIHLIFIEEPEAHLHPQMQEVFIRQLAKTAQLLVDSTEDKTPWPVQFVVSTHSSHVANEAGFESIRYFLGRDVSGAQPGVRQTMIKDLRRGLDGVSEPDKKFLHQYMTLTRCDLFFADKAILVEGLSERLLLPVLVGKLEEAEPNSPKLSSQYVTTIEVGGAYAHLFFKLLHFLELRSLIITDLDAVEKAGGSACEVHKGTYSSNACLKAWFSDDDPFTLAGLLAKGEAEKIKEGNRIAYQCAEAEGGPCGRTFEDAFILSNRALFGLTGNTREELEVAARSKAGEFKKSDFALRYAIEEKGWSAPKYLVDGVRWLAAGIEPDQSDPALALAADVIVAKAEAAPHG

SEQ ID NO: 63157 - protein, 578 aa, Burkholderia cenocepacia HI2424
MADIQSPAELASQCALDAMFQCLDEGRSFRLEAGAGAGKTYSLIKALQYLIERNRHGFPKKNQQIACITFTNVARDEIAARTDKSPLVFCETNHAFCWSLIRGFQKQLRSLVEAMPHWQERLAEVGGTLGARMVEYSLGHRSIREDRVSIHHDDVLPLTISLMEHLKFRRMVADRFPIILVDEYQDTDRDWVEAIKRLFLSNPDGPLFGFFGDHWQKIYGDGCGRLEHESVTEIGKEANFRSVKTIVDCLNRMRPELRQEVRDPDSVGHVSVFHTNDWVGQRRAGGHWAGDLPADVGHQALEHVKELLAQQGWDLAPGSTKILMLTHRLLATEQGYTSLPTVFRYNDAFTKKEHPHIAYLVDELEPACDAFAANRFGVMFEALGGTTPLLRSHADKAAWHNAMTRVLELRATGTVGDVIDHLLDQRKPRLPDAIEKRERELRDFDRTAGEEMPERLAEVERLRAVPYAEISALRAYLDGHSPFETKHGVKGAEFDNVLVVIGRGWNQYNFGEMLGLAAGQAIPAAREESFERNRNLFYVACSRPKRRLALLFTQLLSPVAMGTLEQWFSPESVHAVVL

SEQ ID NO: 63158 - protein, 747 aa, Leisingera sp. ANG1
MKLTRIEIFNFRKLRNARLDMSDKQTLFVGANNSGKTSAMKALRKFLKDRGGIDTRDVTASNWAAIEQTASAWTQEAEADLSPLLAQLPFLDVWLHADTSELHHVAHLIPTLTWTGGLLGVRLRMEPKKGADIKAQYLAAREAAQALQPDGATADGFALWPRDFREFLDKRLKDLFELNAHLLDPASFTTTEPVEPHPLPPLSEGIGANPFAGLIHIREINAQRGFEDAGDSKGGDDEPTNRTSRKIASQIQPYFRKHIDPETDPTPNDIKALKAIHDAETTFNARLKDGFADAIKELENLGYPGGLNNPKLFIATQIKPVDGLDHPAAVQYDISGDASGVKLPESYNGLGFQNLISMVFQLMRFRDDWMQVGKFKSQVVSADDRGIEPLQLVLIEEPEAHLHVQVQQVFMARAYKVLRDHDDLREKGSAFTTQLVVSTHSGHIAHAASFEELRYFKRELPSPGVVPTATVANMTGLFGEDTETRRFVTRYLLSTHFDLFFADAIIVIEGAAERILLPHLIQHHYPNLAAAYLSFLELGGSHAHRMKPLIEALELPTLIITDLDAVVEVNKGGKVVKQSAQPCYGAAQTTSNHVLKTWLPGLAEIDTLLAPPLKALCHTASDRPIAVSYQTLQSVTLGSVSKNITPSTFEDALALTNPKLVKDAAKAELSCRMTRDFAKFIAAESTPEDLATALFDRLAKKPEKAAFALDLLYIEDIKALRAPPYIDTGLTWLARQLKDGGGAIWWA

SEQ ID NO: 63159 - protein, 649 aa, Leisingera sp. ANG1
MVGVTDDTRDAGADATIRACLSLDQPRSFFLFAGAGSGKTRSLKDALEGLDTQTLTTLRKHCRKIAVITYTNAAADEITRRVKADPVFQVQTIHSFAWSLIEGRTADIRGWLESRLQTEIAEIQAAHAKGRAGTDAHDKRVKKMASKTKRLEHLAEIRAFTYAPVGDNFGRDALQHTEVIALAAHFLTESETFQNIVLARYPFILIDESQDTMKPLMEALLTFEARHRGRIALGLLGDTMQRIYTDGLRDLDQRVGDFAQPAKQMNHRSRARVVDLANAIRRDDDGRQQRAREDKPGGTVRVFLAPSEGTDRAAFEAWTRAEMTRITEDRAWQDAEAIKTLTIERHMAAARLGFSELFEPLSKPDKLKDGFRDGTLPAMRLFTHRVLPLVTAQRNGDAFAAMAVLRDGSPLVDKRGIRAGHADQASGLDAARAGVAALMTLFMDERDPSCAEVLAVVAEHRLFPIPDQFRPCLPDNSPVAQDMADILAELGPTFDEQGLTTPEDTPPIATTITEAWTQALAAPFSQVARYLAYVEDRSPYGTHQGVKGLEFPRVMVVADDAHTRFKGLASYETLFEVKPLGPTAQKQADKGEETTIERTRRLLYVTCTRAEESLALVLYSEAPDTIRHFLISNGWMSEDEVVMAAPGGT

SEQ ID NO: 63160 - protein, 723 aa, Bacillus amyloliquefaciens LL3
MGSLIISEWGFIKSEIHLGVLKLLLKGVTIQNYRKFKNEAFSMADDVTLLAGANNSGKTSMINLIGSIMQNGKTPFFISDIPVRLSKQWVDEVYETFILCFKEGDDQLSTVERIINKLFSTELFNLECDLIIPATSIRFRIDYSEEDDIRKFADFIMDLNPDNKSFYFEYSFQPTYVSFGQALEENYKKLYARYKKIHSSKDPTLKIRQFKEVILSIYEASIIEKCYFSDSDYTDKVEIDISTFRRLFNFRYINAGRPLDDQSNGNFKSLSKNMVELATHDEKLGALLENLPDQILSPIQDTEIIDKVRDTSVKGLSNAVKTIAKASGGNTGSMILDIDINEGTITSLLNQITNTKYQYEGYFLNEASQGLGYSNMIYILLQLETYKRKIDPLLVNLFVVEEPESHMHPQMQRIFGKYLKDYYLQKKIQGLITTHSGEMVRLTEMKNLRVSRPIDQLESKIYDFSMFKKGLSGDTTLDTFYDWFYEIGFSEIVFADRVILYEGDTERLLIRKLLTLDIYEELNQKYIAYVQVGGAYAHKYSKVINFLKIKTLVLTDLDYKKDATTVEAVKESKTTNATINTYYDLSKEIKSPTILDLYEWKDKGENKILGGLVLINYQGKSEQYARTLEEAMLSKFYNLNVLEKKDRSFWIEKRNSDNLKYTIPNPDKSKKDDLDKDEKYSIRDIVRHSENNKTDFMYSVILNGLIEKMLPNYIKEGLDWLQN

SEQ ID NO: 63161 - protein, 279 aa, Bacillus amyloliquefaciens LL3
MAAKLVDNIFLINAPAGSGKTTKIKSMIVNHKIKHPLDNILCITYTKRAAEELKKGLDEEGIHISTIHSFLHKFLRIYFCKNEMIDLYMELFGDLIRGNIENKEEKEHVLARNKKYIDKFGCLTLEVIKTNISSIYYNETSNNHLYKGGLSHDSLLIFAEKVFEKFPKIKKRLTQKYQLIFIDEYQDSAPSVLKMFYKAGLNTSSKLYFLGDKMQQIYKNYDGSFEKELKTLNNEIKLDTNHRSIPDIVSILNNIYNDKEFKQISSDKNRANKPDHHQE

SEQ ID NO: 63162 - protein, 613 aa, Methanosaeta concilii GP6
MYLSKISVHNFRNLESLEANLSPGLNVIVGENNVGKTNLLDALRVALGSAWNNSEPIHLSKEDLHRSSDGNMIDKSIIVDLIFSELSEEEQAQFLEILNYNPKFPEKSTASIHFEWSWNETNDRGYYRRWGGERSNSETSISEDILQMLSITLLGALRDASSGLAPGRQNRLGRLLRVSANAHDKAQLEEVISKANNDLEQNPFVRSAEEKISMALEGASGPEFKQEAIIRSSEPEFDRIANNLRLVLKISDLDLATGKPITRELRSNGLGYNNLIYIATVLSELETVAQAALPLLLVEEPEAHLHPQLQILLINFLLKRGAGSSETHGVQVIVTAHSPTIASYVPIEILRVLHRDPSGKLRCMCLRECGLTKKEAYQLRRMFDVTRATLLFARGIILVEGVTEAILIPALSRRLDIKLEEKGISVIPICGVQFSTIAKLFGENKLKIPLSIITDGDPSIQYENDGEKNWTNEIPKKDDEGNIEVCDRVIKLLAEFIDNPVASVFPSKVTLEYDLADAGEKNPEMICRAWESCSNRPRTFNLDRLKACGNDHEKRVLAVWRGICRANPSSGKGDLAQELAEMLESNDEYFIVPDYIKRAIYHATGCPHEDLCR

SEQ ID NO: 63163 - protein, 598 aa, Methanosaeta concilii GP6
MKTCADNFPTPEQKAVIDSNSRITVVRACPGSGKTRVFVESLKMRIDSWTKKNAGIASISFTNVAQEQIAEGIGKHLPYPHFIGTLDAFALRYVVRPFGHLVGLPKEGHRLIPSPLDEAIEYPEVEIDSSGQKISLFSIRFADGPLHKPNMKAKTFRGQIDIEPDYTSNILKKKKAEWRKRGRITHSDCQYISSLILCHPEFGKKVSELVTRRFPMILVDEFQDTNWFLGLALIELLRSPFLESGLVVGDPDQAIFEFGGANPDLFKDIENLPGAKSLPLNQTHRCPKKIAAIATALSDTGKQVLPRDNADQGSAIILVHDMEKIDRNKKVIANISKFCEEEDQLAIISRRELTLRTFLGESISSFRGVSHSGKNIENAVQMLRSDQSKVASHIVERELAWILFKNDSPSMNDLRDLDVDLIKWRRIIYQILKEASIDKKDETWNEWLLRIRKLILDSALDLNCEFDKRRISDNLKQNLKGNVLRKMAEHLESSDSLIERATIKTIHQVKGDEFECVVILVPKPSPNNSPCPSVEWWPDGPSEERRVAFVAASRAKKTLILCIHRDTYNALRTLRSDFVDNFEQIFLFERQHSLMEFL

SEQ ID NO: 63164 - protein, 684 aa, Paenibacillus sp. HGF5
MKLSKVKIKNFRSFGQEEVIQIDELVALIGSNSCGKTTFLNAMLKIFGETSKEREVIRSDFHVPPSVNPDTLQNSEFYIETIFEFNEVFTQNGIEKYTVPSFFQNFIIEPDNKAPYIRIRLEASWQRSNQPEGIVDTNVYFITSPDNTPIKTQDKRPISQSQLSQIKIIYVPALRDPSAQLRMVTGTLLWRLIQRINFDNSFKVEISQKMQAVKDILSQHPGIAKVKDVIKEQWNNYHADVRYSDVDLHFNTQDIESILKKIDPNFSPTETEKNYNVDSLGDGLRSLFYLSLVGALLKTEEIALHDIMSNPDKPIDERLFSVIPPCLTIVAVEEPENHVAPHLLGKIIHNLLNISSNSNSQVILSSHSPAIIKRLEPTQIRHFRSCKTNKSTLVRNILLPAKDEDAFKYVKEAVKAYPEIYFSSLVILGEGDSEEIILPKVMDLIDVNINVNEISVVPLGGRHVNHFWKLLYQLDIPFITLLDLDLERGGGGWGRVKYCIDQLIKNGIEKSKLVSSDEQLKQMLTWDHGSTHLQSWIDMLESYNIYFSAPLDIDFLMLERFINEYISGLSQNEGPEIIVQGETKKIASLVESDLSTQEYNDRLAADIACTLKDVSKKGVLYSEEQKKLMIWYRYLFLYRGKPSTHMRVLSETDDDVIKARLPEIFIKMANKIKEELNIKEQSNV

SEQ ID NO: 63165 - protein, 628 aa, Paenibacillus sp. HGF5
MYRYMTSDDWTPADNMSFDSTSIRIIKSEVNTLISAGPGAGKTELLAQKASFLLTTNKLIFPRQLLALSYKVDAAKNLEERVHVRCGETLSKRFISRTYDAFAKLIVDQFCNLLPPELKPSIDYEIGTSEDVKQAYIAAGHRSILRDSYRFYINTYLVQYKLPFVDTEYGDIARKVLPILLKGNDNLQPKLTFPIIARLAEYIVRNNPSVRSSLQLTFGHVFLDEFQDTPEHHYDLIKSAFRDQGNILTAVGDKKQRVMVWAGAADNIFERFTSEFNAVNETLLVNHRSAPKLVSIQQPIIKSMTGQDIIITPNDRWSAEDGISEVWGFENEKEESLVVSQKIKELIEYESLSPNDICILTRKLPAIYTKEIMDMLERNHIHARVEEKYQTLLKEDVIQIIQSIILLALPIKAPDEWAFIIKVLRQLHGYNSRTSNIVQQTLESNFISYLKTLELKMASITNEGELYLLVLDILNYLDRERLRGLYRQYNNAYLDTLIKNYVNLLWIEYETCTDWVYSIERFKGMHSIPVMSIHKSKGLEYKVVFLIGLEDDAFFGDNIDEELCTFFVAISRAIEQLFITKCDKRGVEKKTTNKVKPFFILWNSSGIGQFVSFKNEFNKKFNEYFGIQ

SEQ ID NO: 63166 - protein, 650 aa, Streptomyces griseoaurantiacus M045
MYLRQLGIKNFRSCYDIEVEFRSGITLLVGENNSGKSNVIEALRLATTPLNRRSTRWFDESDLSHGREGQEAQFRATYDGLSAAQRAHYIAALDVETNEAAYTTTYKRDESRQQMRPTVTAGPVDGPDAEPDKRDQIAHVYLAPLRDAQRELDSSDGNRLLRIIRYLTEEDEQEEFRAQANDSFTKLKEHPVLTATTKEIQGHLGELTDSVRGQTVEVTFAEYELHRLARSLRVKMAEAGIPPADLTESGLGYANLLFIATVILELRNAQHMELTLFLVEEPEAHLHPQLQAVLLDYLQEQAGASLKDDTHGPAGRIQVVASTHSPNLASSVGIENVVALRTRVDKEAVQDDQGKQKEVRRRKTQALPLAKIALSEAERRKINQYLDATRAGLLFARRVILVEGIAEAVLLPVIARHCVFGGDDQAKQRRDFHGVTIINVGSVDFAPYITLLLSEVNGCRLLDKLTVITDRDPDVPKEKKAEEGESEGGQGETQEPAVVPAEGDSAEEGVDPEEDEPEDDDDDTAVNNRKDRLTAHAESIGAKDHLYVAEAPHTLEADLLTPKANEPVLKAAFLKQKTRSKKKWQAILDNERGPAWGFYLKLRKHKRFIGKGEFAHDVALAIESGETFAAPDYLTDAIQGVLADTSGEAR

SEQ ID NO: 63167 - protein, 590 aa, Streptomyces griseoaurantiacus M045
MNELKLTEDQQALVDAEDSLFAAACPGAGKTRAMVARYLKRTAEERRRGIALISFTNAAVDEVRRRCGTQAEALRVPHFVGTFDTFIHRFIVTPLYVKAYGRKPNYLQSWTDVSATSFRLVPDLGRATDLEFRWFDFEPDGRAHLDLNRVPNTFGDVAVHRLLARRKHEAETKASHIFGRLLEAGTISCEAARLLAAFWLNSPKERVLLKALLRARFAEIIVDETQDCGREELDILRFLRDCKVRVVMVGDLDQSIYEFRNATPTAVQEFAADLPVQLQLEDNWRSSPAICAFNSGLRSGQLVERARGEHSIVQTPVHLIEFSALDQIVPAALDVAEQYKLAADDLVLLSHAEAHGMKAAGVGSQENAGSNRVLAIAHAGFKIKSQETDPKTRKKAIDQVQRAILKTLTVGRDIEHHGFAGICEEIEVDPRWLDSFAVRMILSLDAKGKSRADFAAEVRNFLKTADWGGGPAPTASDLGKLFKAPSEAAWASVASFGNSPSIRYSTVHGVKGMEFPGVVLVLPERLRVDKATERTVLDDWEGDFNTEARRVLYVAGSRAQELLVCAVHRKHTDRVAALLDAKGVPYVRRP

SEQ ID NO: 63168 - protein, 674 aa, Alicycliphilus denitrificans K601
MKLCEIGIKNFRLLQDARMRLDTTGITTILVGPNNSGKTSTIEAMLAFLQRPIKQLSINDFSLGCRDAFKKFETHVLTPPAAAAAGAPATEPPPLPALPVLSLQLKFDYDDTGPDLALAGELLMDLEDASTTVTVEIRFGPANPQQLAEAYMKDRDDDQSFADYLAVTLHDHYKLDQFKLSPDGTQAERLPDRGILQRLIRIDVVSAQRHIDDREEGSKATRLSTLLHAHYERRYKVDAPSDFKALEKTLREQSTALGPQYVKAFDGLMKGLAKFGHPESPKLTVRAELSADGLFKDTTRVYYAAIAAAGLPADGAAAAIDQAFELPERYNGLGFKNLIYIVLCLKSFREDVESDPEHRPRVHLVVVEEPEVHMHPQMQAVFVQKVSEFLAPAAGETGVQLLLTTHSSHMAANCGFAPIRYFRRNKGTVEIKDLLSFEASAKTDPEKTAMEFLRKYLTTTRCDMFFADKLVFIEGQVERMLLPRLIAALEAALRDKLTSTYVCTVEVGGAYAHLFRKLIEFLQLPALVITDLDSIDGTTKKKTPVASGHASSNATLSKWLPGSADLPKLMAAGEAEKTSGRVRVAYQVAEAAGQPCARSFEEAFVYANSAWLLANKAKLLATGDTFTHADAAALTADAYAISLPKVDFALDLLANSGWATPKYIREGLEWLAKQ

SEQ ID NO: 63169 - protein, 585 aa, Alicycliphilus denitrificans K601
MVGEAVTAAQPEKTADERIADCLTNGRSFVLDAGAGAGKTYSLVEGLKKLCAPPIADRLKRDGQQIACITYTNVAKDQVIERIQGNSLVRVSTIHDFLWSTLQPHQQALRQALLDFNGALPPASARRVDQAELRAKVDGRLEVKYSDRGSKFLDGRIFHDDLLSIACIAYARYDKLVRIVASRYPYIFVDEYQDTSAAVVDILLRRILPLVGGKVVLGFFGDKMQNIYHHGEHKGIGTLPADLAAPLEVIVKRENRRCSLSVINVLNKIRTDITQIPGNMNVQGDAAYIRVGGAADEAGLQRARELLTGTLAWNLVGHGKRELYLTHRLIARKAGFADLLQAFADRGGFAKDALTDGSDRRIAFFLEKVEPLAQAWEKGQIGETLGRLHGAGHRLASRAAKSGVRDALNTLIDKRGAGTVREVLETIRDRQLFPLTDDLSIRLENNQPILTAEMDEAAQEREQADAKLYAALLALPYAQVAAFARFFMTNTPFATKHGVKGDEFETVLVVLDDSGAAWNFYSFDKYLSGADDAANPERANRSRNVFYVCCSRARQRLAVIDMGKASAAKTARMQALFGADRCFEV

SEQ ID NO: 63170 - protein, 729 aa, Staphylococcus aureus subsp. aureus T0131; identical to SEQ ID NO: 62500

SEQ ID NO: 63171 - protein, 597 aa, Staphylococcus aureus subsp. aureus T0131; identical to SEQ ID NO: 62501

SEQ ID NO: 63172 - protein, 661 aa, gamma proteobacterium IMCC1989
MKIKSARIKNYRLLKDVCLSLDDRTTLIVGRNNTGKTSLAEIFRSFLSSTGPKIRYEDFNQSCLAEFEKALNAFKDDQEGEAIRLLMPTIELELLIDYKDDESDFGALGYFIIDLDDTLFETCILVSYQLKDGKIKDFFQALDAANRKKYFSDLKCLISQFYEPVIYAIEPTNLNNKVRLEFSSFQRLILSGLINAQRGLDDETHSERDVLGKSLGNIFKSASSAGAPEAFKAKSDEVNAVVEKLQEKVDTDFQDKVKSLLPTLNIFGYPGLQDPKLSAATELNVKSLLESNTRVFYEGDDHFTLPETYNGLGIRNLIFILFRIYEYFREFQSQPISPKGHLIFIEEPEAHLHPQMQEVFIRQLEEIVGEFQKQLNDGNVWPVQFVVSTHSSHIANEADFSKVRYFLSKNGKETKVKDIGEAFGSDEVKADKEFLHKYLTLTKCDLYFADRAILIEGATERILLPEMIKKVDEEKKCGLRRKYMSVVEVGGAYAHHFYKFIDFLELKTLFITDLDSVNSESNNSSVIVSKGNRSSNVGISKWFGKDGYSVLSDVRSKDENAKTSGCRRLAFQVNEGGLCGRSFEDAFILANTSLFDLTDLTGLELENAVFEKSKKIGKDGKANFAIEYAIEITDWVVPKYICEGLEWLDKDVAVMAEEAQP

SEQ ID NO: 63173 - protein, 586 aa, gamma proteobacterium IMCC1989
MTNINPAERASSEALEQLRSCIDKGLCFRLEAGAGAGKTYSLIESIRYLISNRADELLGNRQQIACITYTNVAKNEIKNRTDHHPVIFADTIHSFCWSILQHYQVKLREHLPELGEKWKNRIDDSLGVTNQKVKYELGFPAVNEREITLHHDDVVALMARMLSYPKFQKLLKSKFPIVLIDEYQDTDSNLADSIVANLIDNNSGVMVGLFGDHWQKIYGSSACGLISSKKGKIIEIGKKANFRSDRNIVQCLNRMRPDLPQAESDPSSDGTIKVFHSNNWSGVRRDGKSGGHWKDDLPESNVKEYIEKTKGLMCVDGWDMSPEKTKILFLTNNLIANEQNFKNLADCFRYTDDYLKKNDKYVQFFLEVIEPTAFSYEQYQYGELLQIKKRNHPQLKCQADKTEWLNILDRVMHARANSTIGDMLNLLMETKIPRMSSKIEESEKRYNQLVSKPIDEQEEDEAKFVKKLSRLRFVEYLELVNLGEYIDEKTPFSTKHGVKGAQFDNVLVVCGRGWNQYNWNQMLEWMDGSYPKDKQDTFERNRNLFYVSCSRAKHNLTLLFTQELSAKSITVLNRMFDKENILGNPF

SEQ ID NO: 63174 - protein, 635 aa, Pusillimonas sp. T7-7
MQLTSIKIKDFRCIEDLHISVNGNAVIIGENNAGKSAVLDAIKIALGRKWGRQGNTGFNEYDFRLGALDEHGQPTPIQVSLGFSEKKPNEWSENISAALLEIKKVHPVTEISSIEMRVKCEFQSITKSVDPEWQFLNPEGKPYSGRGARNQNLSEFFRYVPCFSMAAMRDASVEFGGKSRFWGSLLKSINIPADKTAELESGFASLNDELLKADPKLENIKNTLRSIQKVIAIGAVGNVDVRAVPINLWDIISRSELLIQGKDTDPWLPIYRHGNGVQSLAVIFLFRAYVDNILADSYTADSTPILTLEEPEAHLHPQACRALWDAISTLPGQKIITTHSPYFVQNVPLKDLIILRRGDNGPTGHRIEQEFSAEIPESDALSRVVAKYPDILNYDAIFKTLTCKGYLDTGIYRELLRCFTENGANETHLKLKHLKGQSIRYISDSDISKLESWAKRIRGEIFFARKWILCEGQAEYAVLGAIAEKLGKPLDSYGIAVIDYQNNGSPGAFASLARSLGFEWAMICDGDDGGDSHIAQLRNRNFEEAEISQRLVQLPRGLDLEKLIASSPLRPFMLAAAHELDDSIQDDDALLLPFAEEHKEELAVRLSRQIRINAPSESIPVEFRQLFINLGELNE

SEQ ID NO: 63175 - protein, 639 aa, Pusillimonas sp. T7-7
MSESGNRLNNLIESLTPIQRQASAWNDGAFLLLAGPGSGKTRVLTARIARLLVESLDDRWRILALTFTNRAADEMRSRIIDIVPEAEDRLFIGTFHSFAGEILRQNGTLLGIKTDFRIYSTTADRIELLERAMMEAGVERSFSPEKVLAVLDRLRDRLVGPDECERLFENPERAASVSKIYAAYENFLLNENAVDFPALIFKAHLLFNKFPAIARKYSTGYKYICLDEFQDTNSSQYRLLRALTDSSDKNVFAVADDDQIIYQWNGASHKRLEQFRNDYEPSSLQMPTNFRCPAEVVALANRLVSHNILRSPGKSPLEAGKNQLNINDRVRLLHFSGQATEAAGIAQDIADRHGSAISKVAVIARTKALLEGVQRAMNDRGIQAQIAQRRDSFASPPYVWLHSALNLANRRTDQRIFLVFVESSAKLMGVNLDFQNLVSLAATTHGDLLRTWVSEARKTEDLGEPIQRLLDITASQLAERLDYGSFVKQTVSFFKSQQEGLEAEFPQFDEDTRAWAELAREITSSIGASAGLETFLQELDLRSKEPPLGPNVLPLLTVHGSKGNEFDHVYVVGLAEDVMPSFQSKSKGDNSPEMEEERRNCFVAITRCMESLTLSYSDEYRNWAKAPSRFLIEMGLLDS

SEQ ID NO: 63176 - protein, 677 aa, Bacillus subtilis subsp. natto BEST195
MKITKLIINNFRSFGPTNTEIGLEELSVLVGANSSGKTSAIQALLKLFSPYQRDRLIEKSDFHIPANENPLDYDKSSLSIEAVIDFNELENDAEKASTAIPPHFNHMVAGEVDGSPYVRIRLEAELSEGNTLEGIIEQAVYYVLSPLGTKAEDEDLQPVKASERSQIQMIYIPATRDPAIQLKNASGTILGRILKGINWPKEINSDIQEKMKQVDGIFDEVNGVKGLREILNSQWRKYHNDFRYSSTMVAFNHADLDSILKKVEVYFEPTETGSKYKVDQLGDGLRSIFYLSLVNSFLEIENEALQDEAEEDKKVYKLQPPVLTLLAVEEPENHISPHLLGRIMKALTDVSKNDNAQVLVATHAPSMIKRVDPKSILHFRINQKEIRTVVNPIILPDKDKEEEYKYIKAAIMAYPELYFSQLVILGEGDSEEIIIPKIINLLDTDLDQSNISIVPLGGRHVNHFWKLLHQLNIPYLTLLDLDLERNGGGWGRIKYALKQLIQIGYEKNELLSVQNGVLSDEDFSSMHTWSIEEIDERENLYSWVEFLENYGVYFSAPLDIDLMMIESFLDAYKKTVPKHGGPKGVDKEKDSIEYMDRLEKGIRATLKTEGGSGITYSEKQKELMIWYDYFFLGRGKPSTHIIALENIDPKMLSEQLPMPLKKLMKGIKSIIDGDLSE

SEQ ID NO: 63177 - protein, 626 aa, Bacillus subtilis subsp. natto BEST195
MIFLNNYVKKDNWIPKDSVILESAAEDVIKYEKNAYVLAGPGAGKTELLAQKACYLLETNISTYPARILAISFKKDAAKNLKERVEKRSGKEFANRFVSLTYDSFAKQLMDRFHLAIPDFYRPTLEYEIVNFNRRDVTKLREEAEEPIGKIGWNYYFDYDLFAKTYANDKLPLITEKIDSIESWYKYQLWKSYINDKESSMLTFPMISRIVEYLFRSNPKILRAIRATYSHVFLDEFQDTTLIQYDLVRTIFMDSNVSVTAVGDLKQKIMGWAGAMEGVFNQFKEDFKAKDFELVLNHRSAPNLVRIQTSIINDMMGGSTVISPSDKWKNEEVGICEVWNFTNASEEAKTLALEIKTWIDQEKLQRRDIGILVRQRADMYCDMLINELSNLGIHSRIEDQWQDLLAENFMKYVIDVFSLATTDRDPNAWSSLISNVLNLRGENETKSYQIETEINSFIVEFKKTLKDETLKVTEKVVEQWLFKILTLVGLELIKGSYPEYRKGDYLERKVKQTAEFLFYSFEKHKVWNKAVDDFLGIFSIPIMSIHKSKGLEFETVILLGLEDGAFWNFENSPDDETFTFFVALSRAKTRMIFTFCKNRFYGQDKSKINVIYQMLENADVKQFEWT

SEQ ID NO: 63178 - protein, 615 aa, butyrate-producing bacterium SS3/4
MQLSKIRIKNYRLLIDAELEVEPKTTLIVGRNNTAKTSCFECIGNVLDGAPFSFNDYPLQKRENLYTKIALFMEKKITFEELAKQLEPISIEFLVDYSLDDPEDNLGALSPFIIDVDVDTTTALIRVEFRLKADEKALWKLLEESYYKDGVFTLDDDTHNAIVANFYKLFELTVYAVNPKNPEEKQVKKHKELKELFPFHIIPAERLLGEDGTQNSSLSALISDFFDMSEDELDPSITKKVKELRSIVENANKSVQQQSNEILSTLVSSSVGFGYPNSEELQLGVTTQLSIDEQIKNQTQLSYTAGASKESLPSKYNGLGYKNLIKMEFLLAAFAKKVEKCGTACIPLLFIEEPESHMHPQMQHAFAEYLEAFLGKITSVGIQTFLTSHSAHVANTMVFSKIRYTQKTKDGVTYKNLSTFAQENPTNIDFIRKYLTLTKCDLFFADKAIFVEGASERLLLPDMIEKCAKAGDFDSQAYKLPAQYYTLIEIGGAYAYKFIPFIEFLGIPCLILTDLDSVLGTEGKNGRTYYKSVPVYLGETTSNETIKWWWRKSKGLSEDDKGKIPLTEITLMTADEKTKANVTLNFKLRNKDYAATPWKKLSGMSIVRIMNWRTL

SEQ ID NO: 63179 - protein, 119 aa, butyrate-producing bacterium SS3/4
MIENLHGRNYELAKAEADKVDEQIIEVLQAGHSFRVEAGAGSGKTYSLNKVIEWIQSNKWAEYSRKKQNVICITYTNAAVNVIAERLSKDSFILPSTIHSFAWNAIKQYQSFSNQYCYQ

SEQ ID NO: 63180 - protein, 699 aa, Roseburia intestinalis M50/1
MFLKRLKLTNYRKFSSEKNIVEFISSKIVLNQDNDDINDNFEENSVQNDCDEIDVASDTTLIIGKNNAGKTTIITALDNLINHNNAFGANDFNYRYLQEYLDCYDACNPPLGAPYIEIVLTIGLEEDSNDRISNLIPFMLVEDIEDSELDICIRYEVEDFVYFQLEMKELFSEGKDENAFSKFLNLLHNTDYVLKYYDKNMSKIDVDFKLSNLMELQCIKANHLKNDHCLTDAFNKIINYRYDNIFQKEKKEVTKELEKINHDLTENITKNHTDVIRNVLKELISMERMGVDLSADITFDKLMRDLIKYEYIEDDANIPENQFGLGYTNLVMIIAAIMDYMERYPDSSFNSKINLISIEEPETFMHPQMQELFIKNINEAIRVLLSSKNKDVNSQIIITTHSSHILNSKIHSNNTFNNICYLYEDKRNAAVANLNNKIVMPNEHEDEESEAFKFLKKHIKYKVSELFFSDAAIFVEGFAEDMIIPYYIEKMEGLRKHYISIFNINGAHGFLYKRLIEALGIPVLIITDLDIKRNEESDEADKQEGKKAKTYEQISCLADKETTNATIIDIYGKAEISAIPVHIEKENLYLAYQGEVNGYYATSFEEAFILTNYDNAITNELLKELKPNIYRSIVGEESEYEKNKENSYKWQMKLEKCKGEFASKLLYKVVNEELEERIPRLPKYISDGLDWIEKKLGGR

SEQ ID NO: 63181 - protein, 689 aa, Roseburia intestinalis M50/1
MGLSQINDIDLMNEKKSLNKLFECSDSFTSVVFNSGAGSGKTYALIQCLKYIISIHHDDLKNHNQKIGCITYTNVAAEHIKHQLGVSDVVEISTIHERIWSIICSQKSALLGLHIEKLNSEVELLNSQLLSNSEYEKYRALDASAQERFFQLMLENKKKYNMAYNLKATEFKAAMPEEIRLQYAELISNVSKFKGLVDKLFKRKRYLDCLCKIESGEKDYRVVNYDAMYNRDRLDKMRISHDTLLEYGYELIERYPRMRQLIIDKYPYILIDEYQDTADIVVKIMSLIEQYAKQIKHDVFIAYFGDSVQNIYDAGVGERLTRLHPELDFVLKEYNRRSYIEVIDVANRVRNDEVVQKSIYSDCSGGDVKLYYGSGENVSEFIEKCAEKWSVQIENPLHCMFATNQMVAEYSGFPNVYEAFKRAEIYRGIGYKQLNSELLSHDIIHLGRVQAILYRLIKIYTEVREEKQPLRDILPSDKYRNMSFLDLKLLIASLRAIDGNTLDELLGKIFNEYSMSNHQMYKLVMEKIFDVDEDLSYDKVLAIFVTSLYKSWDETLESKEIIHDLLDIKLEELLNWFHYIHRDEKKKICYHTFHSTKGLEYENVAIILGKDFGQDKDLFKYYFMNYEGNEEQDSDKYEKGRNILYVAITRAIKNLRVLYIDDFEEIKDGIEKVFEKAYAFTNEISIDDF

SEQ ID NO: 63182 - protein, 593 aa, Bacteroides xylanisolvens XB1A; identical to SEQ ID NO: 62880

SEQ ID NO: 63183 - protein, 546 aa, Bacteroides xylanisolvens XB1A
MDIQLSAQQQAVVGCNEPRIVVKACPGSGKTFSVAARMAKLLRENNLSRHRGIAAISFTNTACEVIQKELKETFGCRNIGYPSFIGTIDSFINTYIFLPYAHLVMGCDCRPEIVGTAFNKWFDYDPTQTRYIRGKHGERIITSRDTNYYFDLISFGLNDQLLRLAPYQSYHFGKADWDNPNKKDGSPKKIISELKEMKWKHFNAGKFNQADAIYFTFRILDKYPSITQNLVRRFPILIIDEAQDTTELQMAIIDKLSQYGAESIMLIGDPDQAIFEWNTASPHLFMEKYNNPDWHSLDLSENRRSSEKICQLANRFSGNEMCSIASDKDYTDEPCIKGHLDTPESVNQITNHFIEKCNEMGLDESEYAVVFRGQKFGETNFGLVNNDSSSRQNSPWINGHYGVRDIVYGKYLIDHGKYTDGLSLIEKGCYKITKRVRYVPASTIRKEIGEVGFRRHRAEMVEFIQKLPSTNNTLSNWITELQQTGINLTVDLGKANVRIESLFRTVNHLFRQERPYLKTIHSVKGMTLEAILVFLSKKAVSTGSVK

SEQ ID NO: 63184 - protein, 572 aa, Bacteroides fragilis 638R
MRIKDISVENYRNLNSATITFDESCNFIVGENNLGKSNILNLLNIIFTRRGFVYDDFNDANLPITVNIRIKLTNDEIGHFEDLFDIDDYTYINIICKQVSPDDNMEFYHLETETYISPTLIKCLNFIYYDSLRNPISEINFDSSKGVGRFLSRMIKDYVSNTDINTNNLVDIEFTNDLLTNVNTKLEKIKSFKDHAIKAVLEGDVSLLFPKLISLQDARGGALSKCGYGIQFLLLVTLSILNKLQTISDQRGETGVFVNEDTGERSISVVLGLDEPEIHLHPYMQRSLIKYLNKVINNEDSDLKLLIKELFGIDKLDGQIIIATHSPSIILNDFKQIIRLYKEGTSTKIVSGTNLSLGEQLEKHLLLHFPFIKEAFFARCAIFVEGDSEYGSFPLFAKKCDIDLDDCGICVIQAGGDSVLQLIQLAEKFGIPCIGIRDSDGDNTPTSIPNLWKTTERDFEAELMKLIDIGREEVLCDILCEYDSEKQERILNAQALNKRAYKKYGYLTAPISTDLKLSDIDKTNITNLKAYYSTWFGINKSQPLGLLIGMKLSKSEIPQIYVNLIEQAKSLC

SEQ ID NO: 63185 - protein, 594 aa, Bacteroides fragilis 638R
MYQNEIEIIKSRIENKHQGDEKQLEIIFSPNKRLLVEAPAGYGKTHTMVSRIAYLISIGKLPVPKKLLALTFSVNAAYKIKKDVSKNIPELLQDLGKQINIKEKIYVSNYHGFCRSILKKYGHRLHPALSNLDTLQSVDDSRSDSIMRVFNNISIDEANVLSEFNAGVKNIKGKYLKENIDKYNSIVISKLLIKNAIPYNAIITLTIKLFKEQIGILEFYRNYYTSILVDEFQDTNLLSYWLLNFLITDKTNILLLGDSLQRIYGFIGAVPNLLSHAQNTFNLQLISLEKNYRFASNENMLQLDKIIRQNAITPFDNPNNLKSKVEFNIYDNQEEEALQVVIKSQKILQNDSFAKVAILAKQRGPNIEHIIKTFNHNKIPFFYGLFTDEDSEYITFNRKCLYEFIELLKSNSKITKKIGKKHIDKIREIYINNDSVLVKALLELLEIFWVQLFVDYSFLSNEDKINLIKDTFEHNGIKQYMEFLNTSIIISTVHAAKGLEWDYVILPDMEKDSFPNWYGLCGRCKNGNDCNFVMTKDIEKSFFEELSVFYVAVTRAKKQVFFTASHKQLTNRGIFEKNYSCFMKLPGIEYIQTV

SEQ ID NO: 63186 - protein, 618 aa, Enterococcus faecalis 62
MDINIKELRIRNYKCYESIDLDLKDSNLLLGVNNVGKTSLLEALELCFTPYKRISEEIVFVKKNEILSKDKSIILDILIESKEREFTDDWFDLFGVLIFDEDEKQYVGIRTTIKYNPVNGEYQIERKGMNSWPSSDEVETFDNFATDRITKSIIEAFPVFYLDAKRDIASEMNDKYSYFGRLVKDIKLSEENLTEMERHLNEINDNIVENSEVLKHLSVSLNEISQVLDSGESSIQINPVSRKIKDLNQGMEIRFMDKKSESFSINNQGMGTRSWATFLTLSAYIKWKTKEMADKESAFHPILLLEEPEAHLHPQAQRKIYSQMNKLDGQKVISTHSPIIASQANIEEIIHVYKKDDQSKTNNILFQELKRDEIRKIKEEVFKTRGDVLFADVLILCEGETEDQVLPQFFKDFFGCDPFELGVNIVSVGGFGKYKPFIRVAKDLDIELFILSDGEKDVIKKVKKAYREVFSDVTNEDLIKRIKFLPNESDLESYLLDCGYQNELLNVIDQIEGTEGYLNHFIAVKDGTEKKRVKTEKICPTCEQNIFEAPIRVYSGDKGYQEAILDYLESKKTEYSSMIGCEILKRNDKTKIPEIIREMFYEISNVKNLAITPLYLER

SEQ ID NO: 63187 - protein, 606 aa, Enterococcus faecalis 62
MNLTNSQQEIVDYIDGSLLVTAGPGSGKTRVLTQRIARILELKKGKVLALTFSNKAAEEITERVKKQLSVENHERIKVETIHSFCLDLVLNRGNQIGLEAGLTVIEDRNDKLEILKRAYFNSKMMLPEDKILHKELRAIEEHKKNFLYPDNIENNSEFRDIFETYNNLLKSNRMIDFDDILYYSYRILIESPSVAKNYTRLFKYILIDEAQDLNNTQYRIIKALTPNFKNLMMVGDSAQSIYGFNGSDSRIMTDMFIKDYQPKVFSLIENFRSTSKIIKAASKIQPESKSLSVYPLEGEFQIQAFKNEVEEAEWISNKIVYLLDNGSKWVEGKITLEDIAIIGRNRYLFSKIEEKLEESQIDFTLGGINSNVECETIEMKVFELGIRIIVNPFDDLHYRQLNKYLNREGKESNFLEDILTNQTVNSAQVNINIFSSVIEAWNILHKNQESFVKSLNKIKEKVLIEEIDEQFKFLIQGDIELWRTRWNKYVKQSVQGDRSLSYFRNQVSLGKLNTDNNSGISLLTVHMSKGLEFQVVFIVGMVEGTFPDYRVKTPAQEKEELNNMFVALTRAKRECYLTYPLIKDMPWGSSKRQIKSRYLNKIEGIF

SEQ ID NO: 63188 - protein, 631 aa, Sphingomonas sp. S17
MKIYAVSIDNFRGISSTTLVLPDHAVLIGDNNTGKSSVLEAIDLALGPDRLSRRPPVDEHDFFEGNYLAVAPAAPEEGAEPDKGADAAPGETPKITVEVTIIGLSEEQEARFGGHIEWLNVATGDFFTDANPAGIDAADIKAALRVTFIGAYDPDEDDFTGNTFYSRSLIEGDKPEPFSKKDKQHCGFLFLRSLRTGSRALSLEHGSLLDIILRLKEIRPQMWEGTIGTLAGIDVASDPAIGISGVLDSIDKSLKKYVPREWGVKPHLKVSNLTREHLRKVVTAFIATGDGTHAAPFFRQGTGTINMLVLAMLSQIAEDKQNVIFAMEEVETAIPPYAQKRIVHELRKLAAQSIVTSHSPYVLEEFKLDETVILSRDSVGTLSQAQIALPDSVKHKRYRQEFRTRFCEGLLSRRVLIAEGATEASAFPVAARRLAELNAATYASIEALGICIIDAGTESQIADLAGLYKGLGKRTFALCDKQTDPAKAAIEAQVERLFMHDEKGIEDLILKNTTQDALERFSDALDWPLHILGRYPDPKANLIPALKEYFGWAKGNWGIADFLGQCFEAEIPSWIRDACITLKAICDPPPAPVAAPPVPPAPPVSPAPPAPPAPPVPLAGNGGQTGLGPAA

SEQ ID NO: 63189 - protein, 607 aa, Sphingomonas sp. S17
MVDLTPSQKEVLAADGPQLVVGGPGSGKTTVSILKAAKIAREKLRPGQRILFLSFARATVSRVFEAIDEERSVTKEEKKRIEVDTYHSFFWRILKAHGYLVGFPRRMTILTPPNEAIALSSIRSGFKAPSKLSDEEKAQKAALEVAERMRLATEEGKVCFDLFAERVAILLHGSAKVRELVSTMYPFIILDEFQDTSAEQWRAVEAIGKSSTLIALADPEQRIFDFIGADPERLNHFRAAFTPSEHDLAGDNHRSKGTDIAIFGNHLLTGKFRDEPYQGVEADWFASNPNQAYASLVAQVLKARQRLLALGQRDWSLAILVPTKRMTRLVSDNLRAPFGNVPPIAHTAAVDMEGPILAAEVIAFLLQQRSHNGCFDEFVDVLCSFFGGRGGATPTKGDLEEAARFRSALEKWNGCLAKGKATPGNSVLQATFAVHQAASAVVLTGQPDADWTAVRAVLEEGGCKRLVEVAQEARNVRLLERGTQLRQSLSQDWRDTGGYKNALAITRQSFVQEHFATAHKPESGVVVMNMHKAKGKQFDEVIIFEGWPKRVKGEIVGNPDRIVGGNMNVGPMTQARQNFRVSVTRAKIRTTIMSPKDDVCVLLIPAE

SEQ ID NO: 63190 - protein, 640 aa, Streptococcus pneumoniae GA41301
MVINNFKSFGECQAINFNNQTVLIGNNSSGKTTVLQALSKLFSDKQSDRIIRKSDFHLPKGLRPGENTRNLFIETIFEFDELDGTVYGPAIPTFFEHFTVSQDGAKPFLRIRLESSWEDDGTVEGSIDTQIYYISSDEDTIRDEDKHRAPRKDLDKIRVLYVPASRTPEKELGNASGSMLSRLVNSINWTEDEIKEIKDKIDELNNTFLSENGALTQINNEIQKSWELYHEDNRFSQAELIINSSEMAAALRQIALKFSPTTTEEAFTVSDLGDGLRSIFYFSLVDSILDIELEITKDREENPDNPRFKLVPPILTILAIEEPENHIAPHHIGKLIKRFKQLGNNDNSQLILTSHSPVIVKRIDPEDLRYLRIENNDSVLQTIVSDIQLPQSNDESYKYIKGAIQAYPELYFAKLVVLGEGDSEELLLPKFFDLLGLEIDSSQISVVPLGGRHVNYFWKLLNALRIPHITLLDFDNERYGGGWGRIQYAIKQLILNGVAKEKLVTVTAESQKSRVLDDDEIDKIKDWKIDRPDNQLLEGWIKMLEKFNVFFSAPLDIDFLMLQYYKEHYLETLSTNEGPVVSYTDENSDNKKIKLTKMDRTNDYQLIGFKNRISEAIQATLKDKSGPGDSFTEEEKELMI

SEQ ID NO: 63191 - protein, 605 aa, Streptococcus pneumoniae GA41301
MVKSEEWFPKGDIILEETALGAVKDVTNCLVIAGPGAGKTELLAQKLDYLFSTNKCVSPKKILALSFKTDAASNLKERVKKRYGDEYASRFTSLTYSAFEKRILDQFRDVLPEDIRPSRDYLIEDWDTIKELLSMNGINVNGRRMSDIRNFVENIILNDGNTHKFKKNLLKGTQDNKPVLLYSQITKLSTQIIATNEYIRKALQLTYDFVFLDEFQDTTYAQYSLLKTCFLGSSCKLTAVGDDKQAIMRWAGAKPDIFPDYIRDFNSNEYQLLMNHRSVPKLVEFQKEVHQILNSNHSSIQTNNYLEFQEGEITLFEFENESLEAKLIANDIESKIQGGIRPSEICILAKQKVGIYSFELISILNGKGIKARIENEYQDILKDPTCNLLLDLISCSQGKRDPLIWENISNFYGNINGIDELTDELILAKSYKEIDNIVSDITYLISNPIPDKDRMLNLINCIIEKIGDKRIISNFPMYNGKNDLLITINKFSKLLYEEYSQSQGAWIDIISNFKGENSISIMTIHKSKGLEYEAVYFLGLEDSAFWSFNDQPEEDKSAFFVALSRAKSHLIFTYCKLRNNSPQNNRNINEIYSLLTQSNLVDVIN

SEQ ID NO: 63192 - protein, 702 aa, Pseudoalteromonas haloplanktis ANT/505
MKISKIQIRNFRLLKDFSLDLEDELSLILGKNNTGKTSILTALDKFLNQSSRRSITLDDFNVGLKKVLLQYLSGVKELPIENCYQPLGIELKVYIEYTEQDDLSQVSSLIMSLDPDDNNIVLKFEYNIDHEQLIKLKDDYTEQSEKFDNNPELFLKEHLGDYFGSVKKKSLLFTDEAVFIDLVKENIPLNDILSFNFISAKRSVTNKDNDKTLSHQTAKIYKISDESNEQIDASEKFKETLRKTDDELSAIYADMFDGLIQKINQFGGVNPTDTKLKVSSTLQHRDLLDGNTTVMYSHDTHDLPEHYNGLGYMNLISMIFDIEMVMGKFRRSLKEKPAAINLFFIEEPEAHTHPQMQYIFIKNIKTLLKGNRERDDGITIQLQTAITTHSSHIVSECDFDDIKYLRKNNSTCDVKAKNLKSLQDEYKSEDDAEDIKLKKAYKFLKQYLTLNRAELFFADKAIFIEGETEKILVPAMMKKIDQEFRAPDETPLLSQNISMVEVGAYSQTFEKFIDFIGVKSLVITDIDSQYVRDIIKDGNTKKETIKCKPSDPLANQTSNASLKFFFGNDDLAFYKNLSINQKLLRKDGTQWIQDPDGYFLMAYQTNEDGYHGRSFEDAFFSLNKDLLGKSAEAFPSLTKRHFDIYVDSDDACPFDFAEKAVNSKPTLAIEILLNSKKTGDNEFSNWQVPSYIKEGLLWLRKN

SEQ ID NO: 63193 - protein, 650 aa, Pseudoalteromonas haloplanktis ANT/505
MATQELDISHLTTESQKVIGLIRQGYSFLLSGGAGSGKTYSLVEILKAVLVENPTTSIACITYTNAAVDEIEERVQHEHLHVSTIHDFLWSNIKHFQCELKSTLIELINDDEQPKIKSPDGEKVTNNYFDDLDGDIKYKEFVRIKDGCISHDEVIILACKMYEKYEKLCTITKDSYPFILVDEYQDTDPNVVKLLLENLNQSPKRNIVGFFGDAMQSIYEGSVGNLNGNTQPKRITALKKEQNKQGTYFSVINNLKEYTLLTPTVIEVKKVQNRRNPQLVIDLANKIRTDGLMQEPSEDINAPNMNADGTAKQGSALFLYSNNDDLGAVCHHLAWDFDSSIETKELNLTHNLIAGKAGFGDLMRIYDKDKILESIKRVKGYIKKNDIKIDTEGRTFKHVYEELGGLQDGTPNPLAPTKGQKEYIDANPDVYELALAQPYDEISKLYIDKDMLVDDKKNTADDLSKPSSNRDDLIKHLFKIEHCIYLYKEKRFNEFSRITDFSITSVADKKNLKKSMEELIKVDNRSIDEVIALANQLNLVVEDDKLERFKVSRNYVYQQVCQIPYQQFRGLYQYLEGYTPLSTQHKTKGAEYPNVLVVLDNGQWNSYNFKNLFEGGGKESVRQRTEKIFYVVAHGLKKTLLFFSINLVQM

SEQ ID NO: 63194 - protein, 706 aa, Haliscomenobacter hydrossis DSM 1100
MHITSLSLRNFRNFKKAKFHFQKGINTLIGENGSGKTNVFLALRLLLDDRMPRKIDLTDTDFNRVIGNWRGHWLVISIQFGELDNSEDCQVLSVHATGDASGQGGRLTLFFRPNFNTRKQLFDFSSKDTSEKTDETYQKILEGITIGNYESIVRGSGTGDFSDDALYKICAGDFENRVFPDPNDDDVAVLGTPVNHSELLKDFSCTFVKAMRDVVEDLKNPKTSPLLHLLRKEDKSKIDSESILDKIRGLNDDINDLTEVKNLTTGISTSINTAVGYTYAPNVKISSDVPNDIERLFQSLKLQVGDPDDLGHLGRLDRLSLGGANLIYLSLRLLEYERILSKHEKAAHFLMIEEPEAHIHTHIQKSIFKNMSPEKIRTQVIVSTHSTHISSASRIRSVNLLSRRGQFAEVFYPGKDLEEGQIDSIERYLDAVRSTLLFAKGVVMVEGDAEQIVIPELFLKVFGVSLDEIGVSLVNIGSTGFKNLAVLFHDERVRRRCAIVTDLDDSPATEVIVANAEKWKDFENSKAKGAERKVHLEDFSNSNSWIELFFAQNTFEVDFLRAGNQKTIVEVVKSIYTRKADVVRSLAKIRSGDTSVSNLEILRLAEKEGKGWFAILLSKHLTHETLIPDYILQAVAFAAPFPMDWRMLATIAQFRLEKMNATSTIANDLFRSFPQNLTDENAEDFIKTFKSAFPDDQLTQFITVQK

SEQ ID NO: 63195 - protein, 600 aa, Haliscomenobacter hydrossis DSM 1100
MILEDLNDEQKKAVCFDDHLLLTACPGSGKTRVISHIIAYELGRLNSLNRRIVALTFTIRAAEEIERRLHLMEIETSRLWSGNIHAFCLNWILRPYAGFHPRTQRGFVIIDAVKTNEILEVLLQKDDYSIIREDFKFNSPIVKIQPNGSFIVKKPTHMPLFEAYRTELEINRFVDFEHLLFYSLELLRSCPKIAVTLSGVFQNILIDEFQDTQELQYQIIFEIVTAGRGRTKVSFVGDCDQAIFSSLGGVAKSKEEIEAGIKAKVESLDLSGNYRSNQRVINYYRNFQTTPIEITARSLIRDNPGKITLNKTLKRENLADEIAKLIQQSLNQGIVEEEIGILVPQWLLILPLARKLKHLLPGVSFDASGIAPMSDSRDNLFYKIARLFLTAPSQRLYKVRQRWATEIGLELALSIGCNQENPQFSARQVLKIVNSIQSSETQADPYLRECLTNFLFAFHVKISDFPALSISFESYFRGIQRRIERAKKEGDPLPEDIESFRNFYREATGVVISTVHGAKGEEYETIIAFGLLKGFLPHWNDIIDKSIDENDVSRKLLYVICSRAKNNLHLIMEGGRTTRKGDPLEFNNLLSNLQFEYDEP

SEQ ID NO: 63196 - protein, 672 aa, Dysgonomonas gadei ATCC BAA-286
MYIKTISVKNFRLLQDSTLQLDQDKKQDLSLLIGKNNSGKTSFIVLFDKFLRPEHYKFNFNDFPISLRNDILNTGTEIDLSHCSIQMVLEIIYSEEDNLENLSEFILDLNPDEHIVKLLFKCDINRSKLESDLSKIEDEKYKRKHIEKSLTDYLETKIYTFSKDDDLSEDKNNQMIEKSISDVRKVINFQVIHAKRNVSSSEHQGSGKTALSELTTNYFNKENLFSQDAFGSINDTIFKMDEELNKQYEVHFKDYFTNVRQFVDEGTGQLNVISDLESKQILSNYSKVVYGSSDTYLPETLNGLGHLNILFLLLQIEIKKRFFEQEKKDINLLFIEEPEAHTHPQMQYVFAKKIKDILKTIQNLQGFITTHSAHIVSQCEFEDIRYFKLDKSNVIIKNFYKELEVKYTSEPEYFQFLKQYLTLYSSELFFAEKIIFIEGVSEKLLLPYFIKKYDQSRDSESDYIPLTSQNISFIEAGANARVFCHFLNFLDIKTLIFTDLDGCKIGISDTKKKYWGGCSTEEAINTTNVTIKYYLNAPELPKIEERETKTNELKLFDDWFKNIKENSVASITPNIKISYQVKENEYHARSFEDAFLSVNLNTINSNKKDINGLKNKSEIKTERTDFFDLTKAILKSDGKSDFASSILYLALTKDVEWNIPKYIVDGLKWISE

SEQ ID NO: 63197 - protein, 662 aa, Dysgonomonas gadei ATCC BAA-286
MSNTALDKIREIIDNNQNPKKEFKNFVLQGGAGSGKTESLKEVISYIAEKYPKKKIVCITHTNVAVDEIIARVGNKYEISTIHSFLNSLIKDYKKNLKEIIHHIFCISDVTELTHSEYKKVYEKYSAKLFLLKEENCDKVIGKREYDISPSIYNAQLNEKIAILNENIKEIISSKDHNLIAYNETRFDSFNELTFSHDSLLLLSYKLCERFKLLPKIISDKYDFILIDEYQDTNEDIINLFLNLLPKNKKTTIGLFGDSMQGIYDDGIGDVEKYIEEKTITRIDKEDNYRCSEEVIRFINNIRTDGIEQKLALKKDENLDARKGFAKLFYKKVDKKPNIFSSVEDKQLYLEKLNSTIKAIKKDIVPECKILMLTNKSISSEIGFSNLYNIFSERYSEVKEEIEKELDRIQISTIVELCRLYQIKQYNSILVYLKRNGFQIKTLKDKKTIISHFDYLLSTKHNLQQVLDYSFENKILKKSERFNNYLLRRSDFLENYNKNQSYKDLESLYLSGSNTKVRLKKNHNIEISDEEFSTFERALKKKTFYIDLFSDKIKFDEVLNYYKYLNEETGYITMHKTKGSGIENVIVVLDEFFWSKYNFKSIYDESVDLEKRSKNQKLFYVACSRTIKHLTIIRLIEDDEEEAMLKTYFKNIELELLPAASS

SEQ ID NO: 63198 - protein, 674 aa, Psychrobacter sp. 1501(2011)
MTFYYGVLMQISNLRIKGFKSFGPDGVDINLKHKLSAFIGLNSSGKTTALEALRKLFGSSLSERMLVREDFHIGKDKDPDDITESQLSIEAKILFSDDESEQEAVVLYFGDMVVDAQGKDPYIRIRLEAKWTKSEIQPDGEVEFQTFFIKVADNEQETTEDKVVLKPHLRHLIQILYVPAIRKPSEQIKYASGSILYRILRKIQWNDAFKEAFDGKIKDINESFKGLDEFGVIDDVIKSVWGRFHKDKRYKDTTLGFSSSTSDEILKKLEITFSPTGTHKQFQIHELGDGYRSMFYLTLVCALLEIEEQLSNQSEDNTLQATRPLLTILAIEEPENHIAPQLLGRVVKILNKISKQDHSQVLLSSHTPSIIKRIDPESILHFRITDNYESEVNKIILPEKEDDAYKYIKQAIQNYPEIYFARLVVIGEGDTEEVIFNKFMEIEEVDFDDNIITFAPLGHRFVNHVWRLLETLHIPYITLLDLDLERNGGGWGRVKYILKELIEIGVDKNQLLVLKDNSILTDERLGAMHGFGLDEPSIEMMYMWLQRLNTYDVYFSEPLDLDFLMLKNYTEFYKNAIPENGGPQIPDKTTYPDKFQEKLEAGVKATLKSDSAMGDTYSEEDRELMIWYNYHFLGRGKPTTHILALSSMTDDVITEATPDLFKTLFNRIKVLLAE

SEQ ID NO: 63199 - protein, 497 aa, Psychrobacter sp. 1501(2011)
MQIISPEEWQPSDGLNLEANALISVKSLDNRLVLAGPGAGKTEMLAQRASYLLETNTCKYPHKILAISFKKDASFNLKERVEKRCGEDLSKRFDSFTFDSFAKQILDRFKKALPEGVNVSADYELLLNDNEVLEIYSNRGESLIYSHERKRMMAMHNKQLPIDFNKSSNGMIYEVWLELINSTQSKLTFAMIMRLAELIIKTNPKIKKYLQLTYQFVFLDEFQDTTRIQYDLFKTCFLSSDSIFTAVGDDKQRIMLWAGAIPTVFEDFKNDTGASEIHLHRNYRSAPKIVNLLNHFSEHMLGDVQKATADTRWDEDDGDCNIVFFKNTEQEKVFLLDSIHSLITEDHVNPRDICILIKQRLDVYAGELITYLCEHGIQARDEGYFYDLLSEEITLFIINILYRVLNNKDSATRKATFDFISNLYSELDHQGLLNIEKKLFEFIKHAEITYDFDNLTTDTLKQLIKEAIKLINTERLKAQFPKYKNQKELSRLLTKLS

SEQ ID NO: 63200 - protein, 764 aa, Pseudomonas fulva 12-X
MRIQHVEISNFRKLLSVRIDFADETTLLVGANNSGKSSAMLALRRFLISKGSAFRLQDLTLCHLAKIDEIGREWEIPPENFELPTAKDWADWLPSLDIWISADQGEFHFIRDLIPSFAWRGGLVGMRFLLEPDDMNMLYTDYRKERARVAELEDALGTEDPPGSPLTLWPQSLHDYLNRRLGDKFKVRWYRLDPQQLKKPDKSTRMAQMQQLSPTSLPLESNPLNGLIRVHEINAQRGFSDHSDDNQGDNTRPNGARKLSEQLRSYYSRHLDPGDSPDISDLEALRAIEAAQSAFDTRLSSSFESAIREVEGLGYPGRNDPRIKVASRLAATDGMNHEAAVLFELDSIQGAPGAPPLHLPETANGLGYQNLISMIFRLMGFRDEWLRKTRAANAEVIDRVEPIHLVLIEEPEAHLHVQVQQVFVRHAYQVLCRDALLERYPNLKTQLLVSTHSSHVTHEVEYQNLRYFRRLPAGMYGIGVPVSTVSNLSNVFGDGTKTKEFVTRYLRAQHADIFFADAVILVEGSAERMMMPHFLRNKFPFLDRCYITTIDIGGSHAHRLRPLIDALGILTLVITDLDAGFNKAAKPVQRNADQITNNPTLRSWMKLMHLGNTVDELLELPENQKEHQIDDLYSVRIAYQTSISTHLPATGEAIQALPNTFEGSFVLSNAGHFAEKTNGTGLMKAFVKILNEAQTPEAVGEGFFNELREGKKAEFVLLVLGDKNFPSLEIPEYISEGLNWLESKLRSKQKELLVIPPEGAEVTP

SEQ ID NO: 63201 - protein, 615 aa, Pseudomonas fulva 12-X
MSEAAVADADTLMQACLNLANPKSFFLYAGAGSGKTHLLVEAIRELKSRERERLTFEGRRIAVITYTNAACDEVLRRLEFDPLVEVSTIHAFAWRLIQGFDNEIREWLRIKLAQDIEKIEGELARSRGDNKTSRANRRKLQSKIRRLETLDEITKFIYSPTVDNRERQALNHDEVIKLTAAFAPERPLLDVLVDRYPVVLIDESQDTHAPVMEAFLKVQQLAQARFCLGLLGDTMQQIYGHGVTRLDKAIPDDWLKPEKVVNRRCPRRVIDLINVIRSAADTHQQTPKPDAIEGVVRMYCISQSQEQAQNLEEGIAQSMAAITEDGEWATGPEGRKTLILEHKMAGRRMGFEKLFTPLYAIEHLQTGLLDGTLPALRVFSEGVLPILTAKDDHFLLLEAVRSRSPLLSKDAMQSTGDQSAHMQRVEEATHALLSLFEKNDPTLSEVATLLLQTQLLDVPDNLVGAMVLGAPSEAPDPEDTNAMTNYAYQLFLERPFSELAAFASYADGLSPYGTHQGVKGLEFPRVMVVINDEEAGGFLFSYDKLLGVKEPTKTDRDNERDGKDNALARTRRLLYVTCSRAEKSLAIVVYTPQPILAKRNVVAAGWLQESEVEIL

SEQ ID NO: 63202 - protein, 661 aa, Enterobacter hormaechei ATCC 49162
MHLKNMTIGGFKSFSYNEPQKISFEKDRTVFIGNNGTGKSAILDALNKLFSVSNSFRTIYPSEFHVENEDDQTQIKNLFIDVTFAFGKIKDDVSIPSLIEQMTLDDGEDVIFRVRLEASLSYEFSDVGDIDENIYIITDISETPSDDCKIKLSPLIRNSIQIHYVPATRDPLKQLTYSSSAVLGKLMKAINWDENARDEYKEKALELIAIAKKNKEISLISESINSGWSTLYKESVLSNAQLDFPLNSIDDLMKLVTLFLSPNEQGAIISAELLSDGQRSLMYLAIINALFNVEIKIKHAAKGEYSFDKSKLRLPIFSLISLEEPENHLSPHYLGRIIKLFSNYAEKDSFQMVMSTHSTSIMSRIEPEQVRHFSLKNTCSVINKLELPLKSDEKFKFINEAVKSYPEIYFASLVILVEGDSEQVILPKIFESYNFDADSKNIAIAPLGGRHVNHFWRLLESLKVPYITLLDLDLGRNGGGFERIKYAIKQLSSHRNVTYLHSEMLDRLPNWDSEQDPLTFTICYKDGKEVNIVDELKKHNIFFSAPLDIDYMMINSFPEIYCEIDSENNERGPEVLKQEKIIENDIIKQVLKDGNKGNKNYKHDNGYLTKFVWYNYRFLGSKSKPASHIRLINKIKGSLVERMPSVLKELVERVGEISHGR

SEQ ID NO: 63203 - protein, 556 aa, Enterobacter hormaechei ATCC 49162
MVDNSLPQWNPEEFIVKTNELESIIYEQDSLSILAGPGAGKTEMLAQKTIYLLEHDICPWPKKILFLTFKNEASKNVKDRVLKRSPEANDRFLSKTYHSFAKSIVDRFRLSLDENIRPNAGYDVIFKGKSDKNKVHISDVIKYASAIIKNNGKIPILYQECFTHIFLDEFQDTTLQQYELISLLFLNSQVKIICVGDLNQSIMLFAQAYPEIYRLVETDFKPKRKLLISNFRAGVKIKEFLSHFQPFVEKGVFNQITPHKNNNCTIHHFNDDINESEFITDYVLNKIASGFSPEDICILTRQKSSNYSAKLCDRLNNKGISNIVYDTFQDAIADPLGIIFSLILECALIKSPKAWSELLNLYIELNIIDENNDSDNNKLITFIDYFSTTKKATAFNDYKNVLDFITNIIDHIGLNLIKSKWPQHKSVEHTKYIWTELAKQLHKIYSNNIDRETIVMNFCGKQSLKIMNIHKCKGLEYKAVILIGFEDEAFWNYSDDNFEERCVLYVAFTRAKEEILITQSDYRDFISGGRKKTSQEITSKLRDNLIDKCGFILHLH

SEQ ID NO: 63204 - protein, 560 aa, Amycolicicoccus subflavus DQS3-9A1
MSRIAVKNFRNLVDIDVPLTRHTVIVGENRSGKSNLLHAMRLVLDNTLSGDHRRLRPEDFWDGLTTADGDPTASGETVEVSLDVTNFEDEASVVATLGDALVTGSPLTARLTYRWEPDPLVNEDVVYRARLYGGLDEQPISSGDVRDRLITVFMHALRDVESDVKSWRRSPLRALLEAASQNAAPADLENVHKAMKAANDSLNNLGPLVTLSNDISASTAAAVGANQGLEATLAAAPPDPRRLIRAMQLFVDGNAQRQLTGTSLGALNVLYFSLLELQLKQRLESSEVAHVLLAIEEPEAHLHPHLQRLLFKHLQQDDVNRSTIVTTHSPHIASATSARNLVMLRATPDGTVAHAAAEADLTQDEWDDIDRYLDATRSELVFARRVLLVEGVAEQLMVPSLARTIDVDLDKVGISVCAIGGTHFTAYIKLCKALGIPWAVLTDGDPTIKVTGARRKQLLEQGIGADTDAIFVGATTFEHDIIVASDSNRSAIVAVLTDLLDDTEDIRTVKTWEQATPEVKEFLDMISTIGGKGRFAQRLANTQLSPPAHLAAALKYLLEQ

SEQ ID NO: 63205 - protein, 585 aa, Amycolicicoccus subflavus DQS3-9A1
MTGLRRAIAELETNPRQREAFHHEGHCVVLAPPGSGKTKLLTTKAVWLANNAVAPDRGLACITLTNPAAAELRTRIRRLGQTAGRTVFVGTVHSFAWSHIIRPFASAAGYPKLSKYALAPRGEANAAMREAIRRVFSSHEDTRYVDSTVRRHRKLCLTEEEWTATGPGIRAVALEYERLLRGNDYVDFDDVIAMAARLVEEHLFVRTVLHARYPYLMVDEYQDLAPGLHRIVTALSFDAGNTTLFAVGDPDQAIYGWTGTRPELLLELAGRESVHRVDLRINYRCGALIAAAGRRILGSDGPEAVTSREGGSVTTRCEPRGLSAQANYIAGRILELQADEVPLHEIAVLAPTHDDCDELVTALRSHDIPVAWRADAYSSTPLTTTLESFAAWASCGREDSGYKLGDLLDQWQQLGDWEVLRVGTDDVVTVLLSAAADTSAGEFVETVMTIMESTGALNALRSDDANELVHMREALDPSGEMSHFSVRDLGRLRLRDGRVEVSTMSASKGLEFDHVFIAALEQGKLPFFNSARGSAAWNEDRRKFYVSFTRARETVEVLYSGWYMTKWGSRKSNGPSVFLRESGLV

SEQ ID NO: 63206 - protein, 606 aa, Methylomicrobium album BG8
MRITKINVRNFRGIFNGEVLLPEHAVLVGDNNIGKSTLLEAIDLVLGPERLSRRPVIDEHDFYTGKYIDLEGNPVPILIEVVVTDLSENQARHFRDHLEWWNEQSQNLLEGPPPEETDIVHVKPALRIGFEGKYDTEEDDFIGSTFFASPTKEDGTHDTFRTSDKRLCGFLYLRTLRTGSRALSLERGSLLDIILRLHDDKNFKIWEDVLKQLRDLPVAENPELGITDILNSVQVAIRKFMPADSVSNPHMRVSDLTREALRRTLTVFMATGVKREDGSDYAAPFQHQGTGTINTLVLALLSLIADLKQNVIFAMEEPEIAIPPHTQKRIIDGVRSRSAQALFTSHSPYVLEEFPPEQIVVLKRHEGQLTAVQATYPPAVKPKAYKEEIRKRFCEALLARRVLIAEGRTEYDAWPAAARRLHELYPEEFRTVEAMGVAIINAATDTQITPLGNYFSMLGKTVFAVFDKQGAEQKTLIDSSVQYPFEAQEKGFENIVLNGTAESALRRFAMQIVDGGEWPTHLTAQKPTSTTPLADLREALRSYFSWAKGSGDAADLLAICSKEEMPEFIVNTLISIQKIIEPPEATDLSVDEDDAETLPEGEAFTV

SEQ ID NO: 63207 - protein, 592 aa, Methylomicrobium album BG8
MRMMPKLYLRAKLLPYEGKVLELTEHRQALLATEGNILVLGGPGSGKTTIALLKADREIQTGNLKTGQRILFLSFARATIARVAQQAGKLLTIEGKERLEINTYHGFTWNLLRSHGYLLRKGRGIQLLLPPEAAARLSGIEGDARSQEKYRLFFEEGLLHFDLFAEIASSLLSRSQSLCRIICDAYPIIILDEFQDTNKEEWALIQSLGEHSRLIALADAEQRIYEFRGADPMRISEFIERYSPTSFDFGNENHRSRGTDIAIFGNDLLTGANKSKTYNDVNVSKYGFYGGCNPHYPVKTTLIASLKRQLKSGKDDWSIAVLVPTKKLMLQVSDYLGAKSDNLPSLQHDVALDTEAPALAAVLIASLLEGAPTASEIAQRLLNDLCTHIRGRKGNTPLNQSELALVNALGDFLQSGTIRGIKRKRIVETAKLLGEQRFELKLSGDPGKDWLSIRDMLHVCNAQEFMQIADDAKYLRLLHKGAVLRSRLNELWRKSGSYIGAAAAVRDALVQEHFSASLKEWRGLHVMTIHKSKGKEFSEVIIYESRHHGKIVWQGADAKAHAQAKLTLRVGVTRAMEKTTILTPGSDPCLFL

SEQ ID NO: 63208 - protein, 658 aa, Delftia sp. Cs1-4
MHVESIVISGFRCFGPHPTLIHLSQGLTAIVGPNASGKTALLHALMRLFGVTRAQRTIVPSDFHIPLAEGEQPKSRALTIDVRLSLPELADGSATAATVAPVFRHMRIERPGGTPICRLRLRARWDDDGTAEGTVSQDLCWISTADEAVRDDQAAPVAPGDRGLIQLLYTPASRDAATQIRASTGALAARLLRAIEWSPDTQRVVDAATEQLTTAFGSEKAIKAISESLSKRWGTLHDGDIDCDPELSLMSRRFEEVVARIGVLFRRGPAGKDRGLEALSDGQQSLFYFALAAAVFDVERAAVAGTIEGFRAEELSIPALTLFAVEEPENHLAPYYLSRIVQQLRTLVDTGAGQAVVSSHSPSVLARVVPDDVRYCRRDNATGTSSVSPIPLPTGEVEAVKFVRNAMLAFPELYFARFALLVEGDSERIVLPRLAEALDLTVDPSFVAIVPLGGRHVQHFWRLLKGLGIPYATLLDLDLGREGGAFGRVKYALQQLVALGVPRESILTTGSGSVLDEAELEAMHGWVPDLTNLQGWLAYLERSSSVFFSWPLDLDLAMLSAFPAAYAATIEGTGPRMTNEAAAEVVLGTAGPGLASYIGTAEALRVHMAAYRYHFLTHSKPATHLRALTHIDAEALKAGMPDTLRRVLNHITLQLSGL

SEQ ID NO: 63209 - protein, 636 aa, Delftia sp. Cs1-4
MPLPARRIRSEDWRPVGLDGLEHNALTVVRSARNHSVLAGPGAGKTELLAQRAAFLLQTGASPAPQRILAISFKRDAARNLARRVRQRCHPEHAARFDSLTFDAFAKSLVDRFGQALPERWRPTPDYGILFPKRAHWEDFLDRASSSLTKPESQAAVRALSVKDFERRHVLAEPIPEAGWPTNTAGRWAGQRFWDEQLRGAARSYLTFPMLSRLAELLVRVNAAARNALALTYSHVFMDEFQDTTQAQFDLVQTIFHGTRTVMTAVGDNKQQIMRFALAMDDPFTAFEEAYGAERIPLRSNYRSSPELVRMQHVLARSLDAEAVEPQSRTASSIPDACCAIWDFRGANEEAQHLARFIAAQMREHGLKPTDFVLLVRQKADDYAGVLAPAFQAAGIPLRNEAAQVGAQMLQELLTEPLSDAVVLLLRFATAASAGRAWSESLHLLSELHGVEHADERARRRQARALDAFAQQFLERFPLPPQTLEAARPIVQEIVAFLGRERLVAAHDPYAHGDWLQQVESSVAQHLWSSSVGKTRWPAALDDYEGTHALALMTLHKSKGLEYHTVIFLGLDDSAWWSFKYDSADATAGFFVAFTRAKQRVVFTYTAERGARREIAPLYAMLHAAGVQTLAVQAAP

SEQ ID NO: 63210 - protein, 644 aa, Delftia sp. Cs1-4
MYIEQVTLTNFRCFGPEGTKLSLDASLTALVGANGSGKTAVMQCLQRLFGITADQRRLRRRDFHVPAHEKAAPLQRELSLEAILVFPELDHGMDTTAVPEFFQQMAADDKGNLKVRLRLEATWVDDGTAEGAIEETYVAVRSLADYKTEDCVNLKGADRSRIQLLYIPATRDGASQVSALLKGRLWKAIQWSGKVKTALEGAGATLNTVFREEPAVLRIEEKVKRRWQDLHDAGTDAFPMFRPVDTRWHKFIGQVDVTFQPGDDGRDRDINELSDGQKSLFHLALTAATLDAEAEAAKGDATHGFVPGSIAIPALTLIALEEPENTLAPFYLSRILAQVEELVGTAQAQAIISSHSASILSRVKPEAVRHFRLTENRTARIRAVEMPTELEDASKYLREAVRSYPELYFAKFVVLGEGATEEVVIPRLSKAMGVEIDRSFVVVVPLGGRHVNHMWKLLNTLDIPHATLLDLDWGRQGGGWGRVKTVLTQLIANGTPPSALFNDIAVDDPQAERNLASFDTMFDTGNLAAWLSFLQGYGVFFSVMLDLDYTMLQAYYGAYTALEDGMRGPRDGVDARDAVLGEGGNHTAYAADQDDALRWYRYLFLGRGKPSTHVRALSKLSDEQLKATAPHFLITLIDVMRKNL

SEQ ID NO: 63211 - protein, 631 aa, Delftia sp. Cs1-4
MDFARRVTADDWTPRGIPGLEPAAWTALRSTGNTSVVAGPGAGKTEFLAQRAVYLLETGICRPPHRILAISFKTDAAANLAKRVQERCPPELAKRFSSFTFDALTKSLVDRFANALPSVWRPTRPYDVLFPDKDYLREFQRGAIAVAREEWRHEIGRLDLFRFEADVLGNSKLPLVAAKPASARELLLNYWWAMSLKHAQPSKLTFSCLNRLAELLLRCSPNILAALRSTYSFVFVDEFQDTTFAQYDFLKSAFMGSSASVTVVGDHKQRIMLWAGARSDAFEQLEADFGAQRVPLLFNFRSSPELVRVQHVVATAMDAGAIPTQSQAVAELDKDVVQVWSSSNRQGEAEYLATWIAMDMAARKKQPRDYALLVRQKAEVFERELLPLFAAAGLVIRNESKFVGKVSIQDLLVDDIALVVLAMLRLGTRVKAPTAWQTASSAVEFLSGVDSADALGTRSAEAALEKFLAELRTFLSANPPTQASATAAVDKVYTFLGMERIVRSHVRYQRNDMAQLIREGLTIHVAECAGATGTWPACLDLYEGADQIPLLTVHKSKGLEYDTIAFIGLDDKSWWSHTPGNPEGLATFFVALSRAKQRAVFMFCNERGNRQKVADLYQLLTYAGVVETVVC

SEQ ID NO: 63212 - protein, 689 aa, Streptococcus oralis SK255; identical to SEQ ID NO: 62612

SEQ ID NO: 63213 - protein, 575 aa, Streptococcus oralis SK255
MVKSEEWFPKGDIILEETALGAVKDVTNCLVIAGPGAGKTELLAQKLDYLFSTNKCVSPKKILALSFKTDAASNLKERVKKRYGDEYASRFTSLTYSAFEKRILDQFRDVLPEDIRPSRDYLIEDWYTIKELLSMNGINVNGWRMSDIRRYVENIILNNGDNHKFKTDLLKGTQDNKPVLLYRQITKLSTQIIDTNEYIRKALQMTYDFVFLDEFQDTTYAQYDLLKTCFLGSSCKLTAVGDDKQAIMRWAGAKPDIFPDYIRDFNPNEYQLLMNHRSVPKLVEFQKEVHQILNSNHSSIQTNNYPEFQEGEITLFEFENESLEAKLIANDIESKIQGGIRPSEICILAKQKVGIYSFELISILNSKGIKARIENEYQDILKDPTCNLLLDLISCSQGKRDPLIWENISNFYGNINGIDELTDELILAKSYKEIDNIVSDITYLISNFIPNEESMLKLIDCIIEKIDEKRIISNFSTYNGKSDLDIIVKNFSKLLYIEYSQTQGEWLDTVSSFKGENSIPIMTIHKSKGLEYEVVYFLGLEDSAFWSFNNQPEEDKSAFFVALSRAKKSLNIHIL

SEQ ID NO: 63214 - protein, 207 aa, Vibrio anguillarum 775
MPVDAFGITVAPLGGRHVNHFWRLLEGLNIPHITLLDLDVGRYQGGWGRIKTTNDQLKLHKPALQLTDGYKSIPTWNDPQHKIRAFPHYLMELEKRRVFFSYPMDLDFAMLSAFPTAFNIEADDQVEPELPNIKAVLGKSCTEASEYSDDEQKLFITYHKLFKVGSKPAEHITALSRLSDEQLLAHIPPSLGRLVDAAKEILLVSAP

SEQ ID NO: 63215 - protein, 548 aa, Vibrio anguillarum 775
MIRVESWQPADGLVLEPNAYRAAKEREYSLALTAGPGAGKTEMLAQRADFLLRTGSCRYPKRILAISFKVDASSNLKERIKRRCGAELSSRFDSYTFHAFAKRIIDRFRPILTGDEALEPGFTIGPKILHKQIDFTDLVPLAIKILKESPVARNALRQTYTDVFLDEFQDCTNYQYELIKVAFQSTDIRLTAVGDTKQKIMGWAGALDGIFEAFKEDFQAVPLNMYRNFRSQPKLLRLQNEIVKILDPASVMPEEQIAGEEGHIQVHPFQNCQEEADYLSEQIQRWIDEESVPPSEIAVLIKNQPELYAMRLMVALRDRGIPYRNEQQLQDITVEPAARLIVDFLLSTFGKQEPSAWVRLMEKLVPFTDDDDEKGELVQNWQRFILEEKKAINQNPIVPENPKRWDCLKRFIEKVGFQELMSLSHDYETESRLREVLNDTCSQIDQLMSTGLDLQASLKRFEDDQAVRILTVHKSKGLEFDSVVLLGVETESYWGNPDENLCAFFVGVSRAKRRLLLTHVGFRSRPAGHYGRWDTQRHRQERFLGCLI

SEQ ID NO: 63216 - protein, 605 aa, Methanosalsum zhilinae DSM 4017
MFLTKVQIENFRGVSSLEIEFDHDITVLIGENNSGKTSVLEALRIGMDLIKSDRTFNFSEYDFYRDNEIKKKEQFLPINLTFTFEETEEHQWNDKIVQSLNEVIVGDDYSKIKLRISGWFDEEDGELKQSYCFLDDAGNEMVGKQSFLKEIRKLRPFYYLSALRDAKEEFRSQATFWSAFLKSKSLNDDTRIELESELEEVNKKIVGSHLSFQDVVTEVKQLSTLISVGDANNVSIDPKPADFYKTIRYTDVNIPTVTNTKVPIYNHGEGTQSLCVLLLFSAYLKTRIKVDVNRLAEPIIAIEEPEAHLHPNAIRAIWPILGNLPGQKIIATHSGDILSEVPVENLRRMNRMSNVCECNIIQKDCLTPEELRKFNHQVRRNRGELLFAKKWLLVEGETDVSVVSECAQILEIDIHQCGLRIVEYSQAGGPGLFIKVADSLGIDWHLLADNDQAGDKYIRSAKNLLNGRDESTYITKLSESNMDVLLCVAGYGDPYLDGISTNTTTYPTATWEQVLEEIKETFPEKPGQALNVARKLEDRSNPEITAEEETPEYWNQVYACLKRHFSKPAASLNAIMLIKDRGADGVPEEIKQILEKVNGISGGAQ

SEQ ID NO: 63217 - protein, 619 aa, Methanosalsum zhilinae DSM 4017
MISVFQLNESQRQAVEWGEKSLLVLAGPGSGKTAVLTMRIANIIKNSPDENFRILGLTFTVKAAKEMKDRINMLLGNMDNRVQLRTFHAFCTDLLRQHGSHLNLKPDFSVITDEKDRIAILKELDVDNPEDILSRIDTMFTHGISVEELPKYFTPENQTECYDLQTIFNQYIQALSKENQLDFGSMLYFTRQLLETKPRIARQLRTVYKYICVDEFQDTNLAQYLILKLLAPTENANLFIVADEDQIIFQWNGADPKRLESLKSDYNIEVLQLPYNYRCQKEIVEIANKLIEHNSYRIHTKKPGIPFSDESGTVKLTSYENFDHELSGLVDEINVIPLKSRDKCLLIARSNKLLTAANKYLNEHSINAEIVSKNQDFSSPILLTMYFCLKLANAANSRSVLNKLCASATDINGLVLSAEDISAKAHVEGSSLLRAFFDTASQSEILNPVCNAGISYLCDTIQFQKFIEIYINHFDYLNTDDEKDDLFPDYKDDKENWTRIAQDIEDTYEGNVGLHVFLQEMDLTPKLKSIGKDCVRLQTVHSAKGMEFDHVFIIGLAEEQFPTYFAIRSGNKSIEEERRNCFVAITRASKSLYLSYANEYFGWHKQPSRFLKEMGLLND

SEQ ID NO: 63218 - protein, 597 aa, Sinorhizobium meliloti SM11
MKIYSVEVENFRGIRFAKVVLPDHAVLIGDNNTGKSSLLEAIDLVLGPDRLSRRPPVDEHDFYEGKYRAIAVEEGGDGAGPPVAPKINVEVTITNLSDEQQARFGDHIEWLNTSSGALYDAPDPAGVDAADVTAALRFTFVGEYKSDEDDFDGATYFSRSLDDDTPTSFSKKDKQHCGFLFLRSLRTGSRALSLEHGSLLDIILRLKEIRPQMWEDTISALASFDVASDPTLGISGVLESINNSLKKYVPREWGVKPHLKVSSLTREHLRKVVTAFIATGNGDHAAPFFRQGTGTINMLVLAMLSQIAEDKQNVIFAMEEAETAIPPYAQKRIVHELRKLSAQSIFTSHSPYVLEEFSLDETVILSRSDDGVLGQSRITLPDSVKHKRYRQEFRTRFCEGLLSRRVLIAEGATEATSFPVAARRLAELNPATYAPIEALGVCVIDAGTESQIADLAGLYRSLGKRTFAICDKQTEEAKAAIEAQVEHLFMHEEKGIEDLVLNNTTAEALERFADALPWPPHLLAKFPNPKAEAAAALKEYFIKSKGNWGIAEFLAQCSEDEIPEWLRDACLTLKNLCDPPPPPPDDDEEDQFADVFG

SEQ ID NO: 63219 - protein, 607 aa, Sinorhizobium meliloti SM11
MVDLTEAQKEVIRTDGYQLVTGGPGSGKTTVSILKAAKIAREALRPGQRVLFLSFARATVSRVLEAIDEENEISREEKQSIEVDTYHAFFWRILKTHGYLVGLPRRMTILTPPNEAIALSSVRNGYKAQSRLSPEEKVEKKSREEAERMRLATEGKICFDLFADRVATLLHGSQKVRALISTMYPFIILDEFQDTSRDQWRVVHALGMESTLIALADPEQRIFDFIGADPARLDHFKAAFNPSIHDLAGDNHRSKDTEIVLFGNDILAGRFRQGDYQGVECEGFESNNNQAFATLVTQVLQARRRLIDSGKRNWSLAILVPTKRMTRLVSDVLREPFGNLPAISHTASVDMEGPILAADILAFLLQKRLDPGSFDELVRLLCSYFHGRGGNAPTKTDMGEAARLQGALVKWNERLTKGRSAPGNSVLNATALVYEAAMAEILTGDPDKDWRALRAVLESGACSRFQEVAKEVRNVRLLERGTQLRQGLAQDWRDFGSYRNALAITRQSFMQEHFATAHKPESGVVVMNMHKAKGKQFDEVIIFEGWPRRVKRKIVANPDRIITSNVRNGAMTQARQNFRVSVTRAKQRTTILTPQDDICVLLIADED

SEQ ID NO: 63220 - protein, 573 aa, Lachnospiraceae bacterium 5_1_57FAA
MYISEILEITNYRNLTGKRIKFNETLNFLIGENNIGKTNMLELINIFLSVGKFIESDFTDVMRPIRIRLRIKYSDEEVGYFEDNFDVDDSRSITLLAVQDSVDERINYYHDTPIQTKISIATIRRMNVLYYYAQRMPLKEVDFRKTSGSGKVLNYFIQYSLKKSGVQEKDILKKTKLNSIVKDVNKQIKNLNTITGDNVSAYIDTEADKLVCRLLGLGDENGRELSSLGEGVQYAFNILLQIIEIIHNIKVTRKPEDFEERLIDKEGKKLFPLFLVLDEPEIHQHPYRQRSLIKKIEGLVDNKNQEFLNLLKELFDIDGLTGQIFIATHSPNILLNDYRQFIRFHRNRGNNNLLEVVSGMNIAIEDKLYKHMLHNFIYLKEAMFSKCIIFVEGDTENGAIPVFAKRMDCDMDERGIGVIKLDGADSVKRCMKLYKEFGIESIAIIDKDKKNDYGSETGIYFTKANDYEEDVYNNFKLNDYLRCCKEITGVSHFIPILRNKGLTFNPADFVADPTILEIDDETQEKVMSENRSRELEKLKQSKNAAKGAILAEYVTVIPSVFKTVINKLIKEVK

SEQ ID NO: 63221 - protein, 325 aa, Lachnospiraceae bacterium 5_1_57FAA
MIRDSYSAIEIKFCNNYRFKENAQMKALDLFIRDCVENFRPSHLKSTIHLKHLANDTEEDKFIVRGIERIISNRDSKVAVLVRAGWQGDSIAEILNKKGILYFNALFRETDPEYISFYNVALEEFHNVALGKVVQRDLKKCLLAIKRRQHEIYQQDAKKYIFESMYKLLEILFAESKKVEGTSKDKYEYIDFTLENKGLKHMMEFIDEQIVLTTIHAAKGLEWEYVIIPKLNGFAFPNSYMCNSCQDTGSCNRGFDYCEFTYRQTMESKFKEEMSIFYVAITRAKKDVFFTVNTGVNKWNYVKTISCLLNLEGLTSEDYEWENVI

SEQ ID NO: 63222 - protein, 615 aa, Oligotropha carboxidovorans OM5; identical to SEQ ID NO: 62632

SEQ ID NO: 63223 - protein, 567 aa, Oligotropha carboxidovorans OM5; identical to SEQ ID NO: 62633

SEQ ID NO: 63224 - protein, 615 aa, Oligotropha carboxidovorans OM4; identical to SEQ ID NO: 62632

SEQ ID NO: 63225 - protein, 567 aa, Oligotropha carboxidovorans OM4; identical to SEQ ID NO: 62633

SEQ ID NO: 63226 - protein, 691 aa, Fusobacterium nucleatum subsp. animalis 21_1A
MVLKEIVVENFRLLKNFKLELKEDLSLIIGKNNCGKTSVLVILDKMLNSSEIAWEDVNLVKQKELYNEIKGFNGSVQDGNKLLEAIKLQLYIEYSDIDSYENIQNFIMDLDPENNIILLEFISLINIKNILELKDIIKGRKIKDFSTFSRYMSKNFTKYFKIKKYSRCYDKKTKKIISDMIEEVDNKNIQKVLKIVGIRADRAVSNNEKNHALSSLTSRYYETYRKNIEDKSNSIFQELEVELEKADKALYKIYNGEKTNNGQDSEGIFKSIIDVVKTYGGSDNKINISIESSISEKNLLTDNTSLYYKHGDGDSSSLPETYNGLGYLNLIGILFEIETKLQELYEQPADINILYIEEPEAHTHPQLQYIFIRNIKNHINSHRNKLNKEKNKYLQIIITSHSSHIVSECNFDDIIYLKRIDNNILAKNFNSLKDEYEGDKKREFKFVKQYLTLNRSELFFADKVICIEGDTERILMPAMMYKVDKMQSSKNESTTPLLSQNISIIEVGAYSHVFIPLFKFLGIKVLIITDIDSAIKNNNGKYEKSHPDNATHTSNASIREFFKEDGLDDGNNQFKELIEKKGKDKIKARIRIAYQIPEIDKGYQASSFEDAFISLNKDFILKNKDNLYDYGALKNFSKKEINKDFYEFSLKNIEKKSAFASALLYFDEEDDDKEWKVPRYIKEGLLWIQEF

SEQ ID NO: 63227 - protein, 633 aa, Fusobacterium nucleatum subsp. animalis 21_1A
MDTRILEDEVNTALQCIEKGENFILEGGAGSGKTYSLISLIETLIIKLPEIKIVCITYTNNAVAEIKSRIDNENLWVSTIHEFIWYIIKKYQKEIKNELVLLINNETIKSFKKPKDLENNLITIDYFNNIDVEYDEYYSMNPNENKVKISHDHILILAEKMFDRYKKLSDILKDVANCIFVDEYQDTSPYIVKILLEHLKKSKKKNVIGFFGDSMQSIYDEGVGDLNKYGLKKIIKKQNRRNPRIVIEIANKFRDDKITQIPSKDKNAPNMDENGVIIEGNIKFIYGKEQEDINFLKNKALFKSWNFLNGEQTRELRLTHKYNAEMAGFKKLYDLYNDDLIIKLIDNIQKNIDNNENKESVLDELVLELRPIYNKKDLFEEITGNEIYNLIYQDIKNLLWKDVLEKCKISKESLMSYKFNGINGRYETNSHRDKILKKLDVLNELIELYESKKFNEFLKKTNFSIQNKNDKSKLKELMNFLIFEDEKTIEEVLEFSKKQGLIKEDMDFDNYISVKGFYLWERIKKISFKEYRNSILYLKEFSPISTQHSIKGSEFDNVLVILESNWNKYDFKTLFGKGSENENVIKRTRKLFYVCMTRTKKNIVIYMPTEDLEIINSAKEYFGEENVLSIDSI

SEQ ID NO: 63228 - protein, 581 aa, Acetonema longum DSM 6540
MNFESIKIENFRNFLDLELKLMNKNILFGLNDIGKTNFLCAIRFLLDRNYRRLGLADCDFFQKNISKTIRITLKIDIRDSNDDDTKKIYKYMRGAISSTTEFVYIQLIADYNKEKLCAEPKLYWGNDIENLEDIPSYQANYELDNIFNIVYIDSSIQLESAFRKYTREIFRDEKSLSEEEREKIKKTIEGLNGNIAKLANIKSLENEIKSQYQNYRNEKNLSIAIRSEIELDNIHSKLTPYICYESDKTYPTSGDGRRKILAYTLLSLENKKLEEKKINVFLIEELENHLHRSMQISLSHQLFTDKLYKHMFMTTHSSLLLGQMDNVNLIKLFKDGKTDGKSYSYRVPDEYKKLKQKLNQNLADAIYADFVLLVEGPSEKILFETIMQNKCSNYESFGGYILEVDGINFAEYYNVLKPLGIKVIVKTDNDLKLNEKKKEYNLLGLNRCLSLIGEDKICNTNNVDCKNFETNKKDIQRDIFDNRYKIECNLLRNNKIFISRIDLENDLYEIIPTKMDDLAKNTKKNAVDYLQSAKMINMIELCKTLKTRNINSIFELSKKKDSFVNSGITTIILPFNLPFKF

SEQ ID NO: 63229 - protein, 347 aa, Acetonema longum DSM 6540
MHNLFMYICKEIGIRLFIVGDIKQSIYGWRGGYVKGFKSIIADTKLFKEFKLKHNFRSNVPIQNYSNLFMDDVRDNYQKSEFNNEIIGFAYRERDFASSFISKWLDLTKNCAFLVRKNDDADVWSQHLQSKGINFIYLPASPLDNSNLESEHIWIARTLAFYLIQDRFSEYDVIAEIPSSDAFSFKKIKQMLSDLKSNTSNLDEFSKQTAKFYEYLGYTCSEKTSNEIQELFSVINNPIYIPTYNPQKYNHVITTIHSAKGLEYSQIIIQAGDFNLANVDDKYLHYVAVSRPEDKLLVLIDYSLNNGRNYIRVMSQEIEKTNLLGFDIKRDDVIKGINSSEFITTKS

SEQ ID NO: 63230 - protein, 600 aa, Acetonema longum DSM 6540
MKLVYIQINNFRGIKESHLLLPGNAVLVGDNNTGKSTILEAIDLVLGPERLSRHPVIDEHDFYAGRYLDNEKNPIDILIEAVIIDLTIEQQRHFRNHLEWWDTDNNVLIDGPPPEATDNAGVVAALRIGFKGNYDADEDDFVGATFFMLPKKEDGTYDSFRTSDKRFCGFLYLRTLRTGTRALSLERGSLLDVILRLKEIRPQMWENVLEQLRNISVANDPDLGISDVLESVQTVVRSLVPIECADAPAMRVSQLTREHLRQILTVFLGTGSCCDGGTEYAAPFHHQGTGTVNTLVLSLLSMIAELKQNVIFAMEEPEIAIPPHTQKRIINSIISKSAQAIFTSHSPYVLEEFNPSQIVVINRNNGILTGIPAQYPPKIKKYNMYREEVKRRFCESLLARRVLIAEGRTEYDAFPAAAKRLHELFPNEYTSLEGLGIAIINAETDSQVAPLGSYFRQLGKTVFAVFDKQTDESRRNILSSTDYAFEASEKGFENVLVNGSNETALRRYASFLVDGHEWPTHLNSKPTQDMAIENLKTSLMEYFKWAKGSGAAADFLNQCSKDEMPGHIVNVLKEICRILNPTNQVELSDDTLDDVAIPGS

SEQ ID NO: 63231 - protein, 588 aa, Acetonema longum DSM 6540
MTLRFQDLKGVYMFDLSEEKQKLLDATGNLLVLGGPGSGKTTIALLKAKKIIESGVLQSGQCILFLSFARSTISRVEQHANIVFMKSLTNHLEINTYHSFAWTILKSHGYLLCKKQLRLLPPHEAAALLANYDNKSAKEVEINRLFEQEGLTHFDLFACMCAKLLSRSNALSTILSETYPVIILDEFQDTNADEWALITQLGRKSNLIVLADAEQRIYDFRGADPARITQYITTFHPISFNFGNENNRSNGTDIVQFGNDLLTGNNKNKKYNNVECRYYPIREKNNQLILLKFAIIEACKRLRSETPKEWSIAVLLPSNSLMLTVSDFLEKTHKLKNGTIIPRIQHEVAIETAGPSIAALVIARLMEYGSIKQCNINQFLIDLCEHIRGRRGDKPPSQKDLILSTALLEYTKTGKITGKNRKVIIDESKRITERCNSLDFTGEVASDWIKVRDIISDATTDCIKQVRIDATYLRLLHKSSILNSSLSETWRRFDNYKGATEAVRNALTQEHFATSAKTWTGVNVMTIHKAKGKEFDEVIIYEGNFPGQRFIYDVEKIDQARLNLRVAITRAKKKATIFTPEGNSCCLL

SEQ ID NO: 63232 - protein, 560 aa, Lactobacillus johnsonii pf01
MYLNSSSLIIGSNNVGKTNFIYALRLLFDRNLSENDLDLLDSDFNAYSHSDKVEITAYLKDINEECLLSEFKGNINEGKLILKYTKEKNQDYILQAGFSEDTMQELKSRSYLRRLSMQYVDTNRNLYKYLRKERQNLLLNSQELLSEEQKNDDKTKTIEIQKNLNSINEKISSLNYIKNALENVNKELSSLSVENEDQNIQFVAGHNDAEKMLSDVALSYSSEEGPLTLGGDGRNNQIYLATWRARQELKAGPDHVTFYAIEEPEAHLHPHQQRKLAQYLTKSLKGQVIVTSHSPQIAEIFKAENIVRLYFHNKYTEAASGPNDAQIKNSFNAFNYRLNTLSAEVFFSYGVFLVEGVSEVIFYKALAKENGIDLDRLNISILAVEGIGFKPYINICNALSIPWVLRTDNDIFKNREEKYYAGIKRAVGIIKECKLDYKKPSECDKACEKWHCDTIPNDIKNNNEAMRKSLKNIGIYMAKVDLENDIANSNLSEALYAHYCIFDKDLKSLVSKMQKSKAKNMFDFVEEMHSKLQMLNDDELIEPIDSIVTKVKSQVQYNGK

SEQ ID NO: 63233 - protein, 531 aa, Lactobacillus johnsonii pf01; identical to SEQ ID NO: 62493

SEQ ID NO: 63234 - protein, 765 aa, Pseudomonas putida S16
MQIQHLEIANFRKLLSVRIDLAAETTLLVGANNSGKSSAMLALRKFLLSKASIFRLQDLTLCHLTTIDAIGEAWEAADGSFPIPVANDWADWLPTLDIWLEAAQGELHHIRDLIPNFAWKGGHVGMRFRLEPDDMQILFADYRKERERVRELQQEIQKQAAEGTEPPSLPLWPQSLHDYLNRRIGKTFKIRWYRLDPGQLRAPDPGTRKANQQPLTATATPLDRNPLIDLIRVHEINAQRGFGDSADEGALEGGHGSGRKLSEQLRAYYSRHLDPGDSPDVSDLEALRAIEAAQTAFDTRLSTSFAPALQEVAGLGYPNNSDPSIRVATRLAPTDGMNHEAAVLFELDSVGGAPGAPPLRLPETSNGLGYQNLISMIFRLMAFRDEWLKKYRSPEEQSAAGVEPIHLVLIEEPEAHLHVQVQQAFVKHAYHVLCSDPLLSKFPSLKTQLVVSSHSSHVAHEIEYENLRYFRRLPSGMAGVPIPVSTVSNLSTVFGKPNQTRDFVTRYLRAQHADLFFADAVILVEGAAERMMLPHFLRQHFRFLNQCYITILDIGGSHAHRLRPLVDALGIVTLVITDLDAGVLQVGKPVERNKGQSTNNPTVRHWMQATGLKHDVDSLLDLDFESKAQQIDDLFSIRIAYQTPINVRLPKTGMNVEALPNTFEDSLVLSNAEHFANKSGRGLVRSFAKALREADTSIELGTQLFNKLKDGDKAEFALHVLGDSEFAKLTVPAYIHEGLVWLQSKLERKSKELLIIPSSSVEVTP

SEQ ID NO: 63235 - protein, 623 aa, Pseudomonas putida S16
MSIQREANMDEIPDADEVIQECLNLDRPKSFFLYAGAGSGKTHSLVMAVKNLKDREWQRLTFEGRQIAIITYTNAACEEIARRLEYDPLVVVSTIHAFSWRMIQGFNDDIRDWLRVKLTADIDELNDKLGRAKGKNKTYLANEASRDSKSRRLNSLDEITTFTYSPTGDNRGRQALNHSEVIQMAAAFIPRPPLLHVMTDLHPVLLIDESQDTYGPLMDAFLQAQALVPERFCLGLLGDMMQRIYNDGKVRLEEAIPMDWAVPEKRINRRCPTRVVELINVIRKSADTHQQTPKPGAVSGTVRMFCTQQTPGQGFGLEDDVAQRMAEITGDDQWAVGRTGRKTLILEHKMAGRRMGFEGVFTPLYQVEHLRTGLLDGTLPILKLFFERVMPILQAAKTNDFSLMEAVRLHSPLLDPKSMKVAPDQLALLETVGGATRALCELFVEKDPLISDVAQVLFQTGLLDLPDRLVAALLLGSTTDDPPDTPDRDALETHAYQALIGRPFSEMQAFAGYTDGLSPFDTHQGVKGLEFPRVMVILNDEEAGGFLFSYEKLLGVKPASDSDIKNQREGKDDSLARTRRLLYVTCSRAEESLAIVVYTAEPELARQRVIDAGWFKDEEVKVL

SEQ ID NO: 63236 - protein, 679 aa, Streptococcus sp. oral taxon 056 str. F0418
MEIKKIYIQHYRLLNDFSLELKNDLSLIVGKNNCGKTSVLSVLEKIFNKNSNRNLVWEDINLNHRREIFENIKRVSDIPDSELSSILGINLQIWIQYSELDSYQNIQGFMMDLNPENNFIILEFSYIIPTQKLREISSLTCDFADDFSKFESFMKKNLNKFFEIQIYSRGYNPITQAMTEEKSDLHEMKDVHKIIKVRGISASREVSNKENNHSLSKTSNRFYKLNNGEEINSKANNLLQSAILKADETLTRAYSGDDSVEGIFTSVFERVRRFGGNDSEAELAIHSSLSEKDILSNNTTLYYKHDDSLLPEAYNGLGYLNLYGIIFEIETLMADIKNEPADINLIYIEEPESHTHPQLQYIFIKNIKDLLKEQNDELKESGDFSCIQTLITTHSSHIVSDCNFDDLIYFKRDNGTAVSKAFNSLKEEYGDEQLGYKFVKQYLTLNSSELFFADKVICVEGDTERILIPTMMKKVDTINPINQAFNTMPLLSQNISIIETGAHSQVFRKLFDFLGIKVLIITDIDPANRNERNRLTSCSAVDATSTTNTSIKNFFDISGDEVFSIVAQKSFAEKTTSDDRIRIAYQIPEDENGYQPASFEDAFISLNKQFIIDQKAGFIQFEALKDFDDSEIEDFYKFARDKVNKKSAFASSLLYFEGEENTWKVPNYISEGLLWLREK

SEQ ID NO: 63237 - protein, 641 aa, Streptococcus sp. oral taxon 056 str. F0418
MVERKVEPEVEKVFEVIKQGQNFILEGGAGSGKTYSLISVIEKISMEEPKKSIVCITYTNNAVAEIRARIINDNLRVSTIHDFIWHVIENFQKEIKECLVELINDDAQILFVAPKEVLGEELISLDYFDGVRVEYTEWYSMSITEQNKVQISHDHILIVAEKLFSTYPKLCDILIDIAEYIFVDEYQDTSPLVVKILLEYIQNRTKKNIVGFFGDSMQAIYDSGVGDLSSYNLIKIAKAQNRRNPKKVIDLANKFRDDGLVQTPSNDDTAPNMDNGSIIPGIVKFVYGNDINQLEILRGSQLYRKLEFNVPSKTKELRLTHKLNAEMAGFSKLFKLYNTDLFVKLITGIKKKINENKIDDNGKLFKDLVEEAQIVVIRGGPLIVDEIKSNSELSAFYDEIKTCSFEEVSSKSKVNKESLLSYKFNGLSSRYEAGTDRDRILKRLDLVYELVELYKTGKHNEFLRITKFKITSSKDKISLSNVMTEISADDITIGRVIELAEECELISKDDLFTNFIKNRGHYLWSRLKIMPFQEYVNSIDYLREYVSVITQHKVKGSEYENVLVLLDNGKWNQYNFDTLFGKGSSNENVQNRTKRLFYVAITRAMKNLIVYMPSNDRQIIEKAKDYFEESDIVDVLSLVDE

SEQ ID NO: 63238 - protein, 530 aa, Bifidobacterium breve UCC2003
MKISSVIVRNHSRLIDCTLDVRENLILVGPNGSGKSSLIRCLDLLLGKTMQQLYYSISSADFRNMERPLIIEAKLTNLNENEFSFFPDEVDASDGSLTIRLEAIFDGEDLTISRYCPKGVGNGTLSSSQLKSIRWNLIPSDFSAKSLNSGRRTIVDDYLKEINASGDKTKIEEAISALCNAIDTSSAFDGALKSLALQLNPALAGGVDATDLRFIPGAAIDGNLLSDVRLQIKSRSGVVRQATEQSDGTKALIAFAVFNLLNSDGIIAIDEPETHLHPSAQRNLMRILLSMGRQLVIATHSGVVAGEFNPDNIVVTRDGLIPVQPRQGFLQGDQKALARWWISSRIELLTAKRIIAVEGQSDRMLVEKVAELTGRHLERDGIELLEAGGCKEMPHVMSIFGENGFGMQVSVLIDEDAEAYTARSLGVQVNNLASKAVYVSRIDLEDEYVSAIGAAKLWDKLGESSLFSPEVLQTCAITDDASIPDEDQLASFCRHKRNKIACAVIASETLTKDSAEKVSSVIEVLQNDVH

SEQ ID NO: 63239 - protein, 567 aa, Bifidobacterium breve UCC2003
MTSTEYVMTQEQQGIFNYRPLNMVITAPAGCGKTEALAYRAKGLINRYDFAGNGRKLLVVSFTNQAKDNISERIKKHIGLQTMRQHVTVCNFHGLSARIINAHREMIGLDDEWTVASFDWIGRFMQSLNCDRKVKMQAREALQKIKLECLTDKEVKAKIQTIYGQVGNLAQIIEKERIKEKIITYDDQIRTALWILQNKNVAKLYRNHFFAALVDEFQDLTHQQLRLVQALCKDRVTFAGDLAQGIYSFAGGDARFVFHEITKNTEKQVKLLKSFRSSPAILDAVNSLSPRTGSEHLSAAFPEHWGNGGLSSYASFNREDAEAEWVVRMCQLILERCPEHRIGIISRTAFRAESVKSTLKSHNISYADWGNGLFRPETAKILRNICDELSVESCKEPEELMSFIKKRYTAFHGNLSEEHEDACGWLFDRLAQSDASSIAEVKRCINAKKGNKTIATRKGIHCLTGHAGKGQQFDWVFIVGLEEGTIPFYKAKSEEAIDEEARVLSVMISRARIGYVATSSSTNPRFWYSRNASSFLRYLQHAPNFLFGKDQIELWCAEADWTALSQM

SEQ ID NO: 63240 - protein, 580 aa, Neisseria macacae ATCC 33926
MGNDVMLLTKIQISNYRGIKNLDLDLAPTTVLIGENNCGKTTVLHALRACLQTLKNSGRSTPFDEFDFHFDSQTADPTTAPKIEIILTFEESKPGEWSDKVEQKLGGDGGVISFIPPDDRGRVQLRVNAEYSMATQDIDTTFDFLDAAGNPLNTKNRSRLGSLQQLRPLFYLSALRDAGREFSRTSQFWSPFVKNSQIDEPTKADIEEQLEKINAKIIEAHGTFKDVREHLNKVQELVALGKQDVVSVDAVPARIFDILNRTQVSISSTTGARLPIGRHGEGTQSLTVLMLFDAFLKSELARKQGVQESKPIVALEEPEAHLHPNAVRALWKTINDIDGQKLIATHSGDLLSEVDLTAIRRIYKSRGLVKVGSIAPDLLNPREQRKFDFLIRRARGELFFARCWLLGEGETEAILFSGVAEVLGLDLAQEGVRCIEYRLGDIDYFLKAANALGISWHCLTDADSQGLVDASKAQNRIPDMPKRKDRHISVLTGASSIEPYLANHGFLDVYESIAVPAKKAVKLTASQGAPEYADQIIQCIPDKPSAAYAVVEAMRERGVGSVPKALAGAVMKAVALARRQ

SEQ ID NO: 63241 - protein, 497 aa, Neisseria macacae ATCC 33926
MAAIDFLLRNVVSDEQVLTLLKDEEAGRQLQLLFVQYKESLKQQNCLDYGAILYFCEELLRARPRVSKQLRTVYRYICVDEFQDTNVAQFRILLAIAPDKNSNIFIVGDDDQVIYQWNGASPKRVKELEEHYDLTTIQLPENYRCPSEVVELANSLILHNSERSPDKRPLLSMRVGTDSNPIELLSFDDEQQEANGVAEHVAARLRNSVHPSDIVILARTTKLLERVQQALSKLSIETHIQRRKSQFESAPFRFLVSALKLALVRSDKDLAATVTKALSDCVKQEISSENLAEFSTVLNGDQLEALGVLVTTSNAVPQELCQAVQSLVQGQYAQFVQLTLSYFDTVEKESEDDGNEQYAEYEAERAVWQKILRDDMGGENDAYSLSLGQFLQELALANKTPEAPSSAVRCLTIHSSKGMEFQHVYLVGIAEDQLPSFQSKKAGDNSREMQEERRNCFVAITRTMQTLTLSYSQKYNGWHKEPSRFLFEMGLLEHKNN

SEQ ID NO: 63242 - protein, 580 aa, Neisseria macacae ATCC 33926; identical to SEQ ID NO: 63240

SEQ ID NO: 63243 - protein, 141 aa, Neisseria macacae ATCC 33926
MDYLKKLNPNQLVAAQWNEGPMLVLAGPGSGKTATLTARVARLIEQGRDESFRILCLTFTRKAAAEMRERLLSLVPDAKERALLTTFHSFATDILRQHGSHFNLSPDFEILEDAERVGIVKSVLEGGNLRNLFQQKRRWQQ

SEQ ID NO: 63244 - protein, 584 aa, Streptococcus agalactiae FSL S3-026
MEFKKLVIENFRNFSSIEIDLSNKNVIFGMNDSGKTNLLFAIRYLLDRSIRNKGFIKSDYHKHDISKPIKIQLEIDLSDREEDDEESLKSSHSRLLISTVAGARKNASLDTFLISLEAMYDEKELFGNPVLSWGSTLDDLVEVPQYGTRSDIDKIFQIVYVNPAIELDAFFKRNRKLLFSDDTKTDEDVALEKEIESSIIDLNTNISNLSLITSVQSQLTDAYKSYRKEDLEIKIQSEISISGYLDNLTPYINWNGDTQNYPTSGDGRKKLLSYAINHLISEKQYSSKVIIYLIEEPENSLHRSVQVSLSKQLFIQNIYEYFFLTTHSAEVLYEMNNTQLIKITNQQEATGHSSYYKVPSEFSNLKKKLNISLAQSIFYDRVLLVEGPSEYYLFSSIFEYISPDFEAEGKYLLQVNGINFKPYAKLYRELGIEFFVKTDNDLKASRGDKHEFSPIGFNRCIEILDDNIVAKLNNYRIDFSSKEERNQNIKAKKEELYTMEYSLVSQLNSKRLYISEIDLENDLAKVLSESERNGMNVSDFVNWLQSSKQYNMLEYIEGDLTPEIAHKIVKSEYFKVLAEFLDYE

SEQ ID NO: 63245 - protein, 513 aa, Streptococcus agalactiae FSL S3-026
MSDIATRDETIKKELLEYQGNILILANAGSGKTTFLAEKLKSDSKKLDNYQKLAAITFTRNATEEIKQKLVEIPENVVVSTIDSFLDNEIILPFLDQRYKVATSLQFSFQQEYKFNNFDIGLSQIMQNGIFATYDNPTARQGKNFKCEVALDILKNIVSASEYLKYKFNSLYIDEFQDCDQSMNDLFMYLKDELGIRLFIVGDDKQSIYQWRGASPRYIKNLWENENDLKKERFIGNFRSLPKIVDFSLALTPEVKIDSINETGSILYIETKQFALKEDVIRSLVDNGDIILDEKNYFLIGNNQHIEETVTQLGGIFPNEFDYVRKNPFIECTNGRFLQSLAQYYFLESFSEYDVLNNLFPDYNDDFRKGLLKKLKILRQNPERLLIEDIASYLGVPITQFGDKLESQILLEVLIDVENRILFDTSSLKNNLLMTTHNSKGLAADTVIIFVEYLIDRYKNTLKFEDHYVAITRAKSKIILIDNKTNYVSEINRLLCNNNGNFSFDNFIERRNL

SEQ ID NO: 63246 - protein, 723 aa, Bacillus amyloliquefaciens XH7; identical to SEQ ID NO: 63160

SEQ ID NO: 63247 - protein, 440 aa, Bacillus amyloliquefaciens XH7
MQQIYKNYDGSFEKELKTLNNEIKLDTNHRSIPDIVSILNNIYNDKEFKQISSDKNRANKPDHPPRVVLCDNIQKRIKREQLIYPNALLLFLLNQQRFDSIGAGEFYRQFNRLDRYSQVNQLNASDVLSDNTNENKDPLLKLLFIVDKILSYYEDFNLGSIIQTLKRNQKIFDTRIGTITSHQDKVNLNNLLKQIYDFYQKDSSIYEFLTLLRGSRVIKEEYIDNISNEYIGVLAVTLNEFKALSNYLKDPKVSTQHGVKGESHNTVFFIADDSFRTPLVHMYKFLKLWTITELSLDSLESFYYDYKKWIEDTIDHLACKISDLNKEKYEAHATYLKTRVEELCKYFENNWIFKDLCEDFYNAYLLKPNVTNFKKCFKESTVYGVLSAYRLFYVGCSRAKSNLTIFIDKYKVKDFSEDLIFKLKRTGFSVEIEAKELQKL

SEQ ID NO: 63248 - protein, 678 aa, Vibrio splendidus ATCC 33789
MLLKKLVVSGYKSISISHPQTIEFDPQLTVFIGHNGTGKSATLEALNKLFSIDHSLRGIVPSDFHLPDDVDPVTPRNLTIEAWFSLANGNPSIPPLINGLTASSSTGEIIFRVRLEASLSFDYNPLGDVDENIWVIDGDMEEPEDDNKHRLSATQRNAIQVNYVPANRDPLVQLKYSSKAILGRLLKAIKWSEGEQESFEAQAQQLNQLASDNPALTQITRAINHNWQEIYKGRHLTQAGLNFPVGDVDEILRLIQLQFMPDATGNKVDTSRLSDGQKSLVYFALTKALFDIDKATRQAVVSNQPSNFDADKMKLPIFSLIVLEEPENHLSPHYLGRIIKLVKDYGATELCQSVISTHSASLVGRIEPTQIRHFRLDNENICTKIQALLLPEDTDEQAKYISEAVKAYPEIYFSKLVILGEGDSEQVVLPKLLEHFGKDIDGHSISVVPLGGRHVNHFWRLLNSLKIPFVTLLDFDIDRNGGGFGRMKYVVEQLLLMDEIKSNYINENIIPYIPDWSSERNADSFSIHYEDGKTRVITDELEACNVYFSSPLDIDYSMICAFPEIFCEKDEAYGERGPSDGKEDEEEENTLKREAALIKAVLKKGNVGKRFDFGSDWERNFLWYRYRFLSNKSKPASHVRMFTKLEEQYTSREILEKLPPELTRLMERIVELSEQVVE

SEQ ID NO: 63249 - protein, 559 aa, Vibrio splendidus ATCC 33789
MTDWKPSENIEATTELMDIITCDASVAVLASAGAGKTELLAQKANYLFFTDKCVWPKRILSLTFKTEAQLNIKERINKRCGHKATRFDSFTFHAFSKSIVDRFKNILPENERPIDNYDIVFRRQDANGSNKILMGNLLALALRILRAREDLRTMFSYSYAYVFVDEFQDTTNEQYELLQLLFQNSDTKILTVGDINQSIMLWAGARQTVFTDFLNDFSAQKKLLVKNYRASSEIQNVLAVVLQFVQNPKSTIQEVSKIPENCSLHAFSDEHQEASFIAHSINEAIRSGINASDISVLTKQQTSQYTEILRAELTKLGINNLDMTDLQDALKEPLGQLFSQFLKALVHPEPKVMTELFKVNLALNKVESDDDKEEALTTSLVNFISLKQELITTATTADDLLSYIQSFIHEIGMSKIKGRWKQYKSSAYFSHVWQALEVHLRNMCNQTNSLEDAAKLFSAENAVHLMNIHKCKGLEYHTVYFMGLEDQAFWNYSEQTFEDNCAIYVALSRAKNHICVTISKRREHRVHWQHDNRTSTFGAVKPVISLLKDKCKFAAMSHA

SEQ ID NO: 63250 - protein, 685 aa, Vibrio tubiashii ATCC 19109
MPLQLGLNTLVGENDAGKTAIIDAIRMLLGTRDQESIRPSIDDFHYSDSKDQSKSLSIAVTFLGLTLPERVSFAEYLTYQPENTENPVILKVTLRAVLQNDKVRTTIFSGNPTGSHGLREIDIETRDKLRSTYLRPLRDAEKEMDAGRSSRISKILKRQSAIDEGESILDISAVSEDKFGEVVEKLGVVGIARLVNQLLEGHPAVNSTTNELNVNFLKPLQMLGDNLQANLGIGPNADDEMLKRQMLEKIGIALDNVGGKRGLGSNNLLYIACEMLLLSESKDELALLIIEEPEAHLHPQRQLKLIQYLQDKVNKHKQDHEIHLQVLLSTHSPTLASKLPIKCMVMVHKGKVLPLSMAGSTDGDYTFLERFIDATKSNLFFCRGLMIVEGDAENLLLPSVAKILGLDFTENGVSIVNVGHTGLSRYANVFSGTSEYPNPGIKVACLHDLDLIPYQAARELNLESVKDKTELSDLWDSFNTSLKAGEQVDFELLNSQLPQNVISGFELNSFDQSKVTSANREYKGDFVNGFYSSPWTLEYSLAFHGLAKEVTIAACLAKAEPSKRYDQSNHEKIVSVAEDYYEYLNGTYSESEVLAGKVYELFLSSVNVSTHIENEHAGLVLSGKASKAAAGQHLGRLLEMMDQKLESDGYTQRDRIEHWKDLLPIAVVEAVEHVIPSMLLETESD

SEQ ID NO: 63251 - protein, 739 aa, Vibrio tubiashii ATCC 19109
MTNIRELLSCNQDLDANPFTDDDIQWVEGILGLNNGFDEHQLLVLQRLDDLDVEACPGSGKTTVLVAKLALLARYWNSKTHGICVLSMTNAAREEIQERLGETEEGQKLLSGPHFIGTIHSFFSEFLAKPYLNSKGIAIVNIDDDFCRSQRLRTLQKDNYSEVADYLVAKQVEKKTNIVTTKGEHTPDHQKAAAWLAEYEAKSLEERRYGIPSSWKITDESYNLIRVNFGKEYSLDLPEPMESLLKECIKEVAHKGIFCFSDLFVYAKALMKSSSDVFQILRKRFPLLFIDEAQDTSSSQALILYELFMSYIDDLEPVTRQRFGDANQTIYTFEPPMAADGIDPYPSSDIERLSLPVSHRFDMSVSDIACKFETHPLSPMMQGVRQDDKGGRGHCILVFNEDSRMAVIPAFAELVAKEMEELDLDLAKFRICSHIQKEKDTEVSEGNYARTIRDYFTPYIADKMTKDYQQHKALISYFRHARYLVRETKCLSSGLEKVSEGILKGCYLVSVDSEQTKGTRYAKIKSAPNKYRAIVREINDKCAKDFSNKVVDTLTNNAGITETEWPAIISIATDVIQSLLGIEEVDSSFEFLTWKGEDVPPQSSDTGDVDRTNIYRHELLPSRKKLDFKLGTIHSVKGQTHTATLLLDCTNRGPILGQLKPFFLGSKLTSEATTQQKSWLNTLYVGLTRPTHLICVAIPESHNGFRGSTLSWTEDDFQELKAKGWKVARVKECSSLEYL

SEQ ID NO: 63252 - protein, 691 aa, Ketogulonicigenium vulgare WSH-001
MKLHNVKIENFRLLQDVEIGFEDRTTLIVGRNNSGKTSIAELFRRLLSEKTLTFRLEDFSLGCHEKFWNAFEAFSAGAEVSDVLDTLPVIRIIIDVSYDVDMPDLGALGDCIIDLNPDCTYGRLVLTFGPRPDATTFLFADLPAPEEDAENARSALFRALGARVSATYISILEAIDPNDPTNRKPLETKVLTAIIQGGFINAQRGLGDDTKRERDVLGKVVEILFQSALSDPTDPEKRTTAEQLKSAVEDIQSDLHSDFNVKLTSLLPTFELFGYPGLADPGLITETSFDVERLLSDHTKVRYVGKNGITLPETYNGLGVRNLVFMLLQLLRFFREYQATPTAAGVHLIFIEEPEAHLHPQMQEVFIRQLDQITNAFVTQLNDNHPWPVQFVVTTHSPHMANEARFESMRYFLSKADENGVRRTIIKDLRRGMGTAPEPDREFLHQYLTLTRCDLFFADKAVLIEGTSERLLLPTIIRKTDNAAPGAPQLGSQYLTVMEVGGAYAHRFFDLLTFLELRTLIITDIDAVRPNANNKREAVPVAQGQFTSNGCLKALYGADISPAALLIKTPDEKITNDRRIAYQIPEQDGGACGRSFEDAFIIANPGLFALGEEDVATAAYELAAEQKKSAFALQYAITNTEWIVPHYISEGLRWLAQGNPAPVPPPVAVAVEILAEAAGVEIAPIQGGEHG

SEQ ID NO: 63253 - protein, 586 aa, Ketogulonicigenium vulgare WSH-001; identical to SEQ ID NO: 62945

SEQ ID NO: 63254 - protein, 701 aa, Corynebacterium glutamicum S9114
MRVSAIYIDGYRRFKEQNIKFENEVTVLAGANNSGKTSLIDLLRVVLGGEGSLHAEDFSASDRYQWFMALVEAAIKGEEEFSDFVEHKNLLEKAPSIDVRLEVTYDPVADDIRQFADYLMDLDSAKSSFYFQFRFSVRVDRLIAACNDLYTDIEKTIADCGWTSASEINPGSSEFLVLQAKIDASLVDCSRPEVFFADENYTNILPMGTHKNLKHLFNFRAVKASRALDDINEDKSGGLNQRLIEVVKEDENWLQLLSQFPDQVVSAIHGLKIREATTDEALKSLNTVIESISSTNGSKQHDLFLDFHVTEDHAVQMIARAMQTRYLGEGVPLGEASQGLGYSNLIYLHLEAESFIRSTAQEENCYLVNLLVLEEPESHMHPQMQNAFIKHLLSRVREVGGLQVAVTTHSSEIVKSSGIEQLRVLKSEDDGCRIVDLRDFHTAEVARKSTETQRLFNFLYAINFSDLLFADKVIMYEGDTERMYIQALIRELPELSGLRSQYISYVQVGGAYAHVYKPLIVDELRLKTVIITDLDYDKASTISSVEDLKLLHSTNTTLNAFFKKKDSEADPANAKALTIGNLMEKVASTPGLAFIPGTELAAVAFQSEPEGYARTLEEAILAVQLGTDVWSSRTQEDWKNYRKISELKFSIPREPESPTIRQIVLSTSNQKTDFMYSLLLNSELLKTVPPYILSALRWLDS

SEQ ID NO: 63255 - protein, 637 aa, Corynebacterium glutamicum S9114
MNKMQLINAPAGSGKSTEIKRLVREWSVERPLDRLLCVTYTNRAADELKADISSPYIEVSTIHSFLSRFAQSLFSAREIVAYYFEIYGDAIKGRIENADENRKIEESNARYREELGDPLTFELVRESVEFLYYNERPFNTLYRGGLSHADLLSFVASCAKRYPNIYRRVSAKYRRVIIDEYQDTDVNVLEFFLNALHGSDTELHLYGDRMQQIYKTDPERFQDLINAFDVPRREVVNYRSTKAIVSVLNTIYNDESLRQVADSKVYGTVPRVHFSATPDDAVDQIADTDTLILSVHNSSIFSAIGSLELFNALKDLPDHGYNSRYPAATVLTEPDWEKVPSPLLRLLYGLLNLEGEHTRGHIGTVISTLRAYSKEFGEFTLHVHEDKALLATQLDELFEVMRDDNSNVKDVLEMLSGLPVTRAADVSGYLESEDYDALILVPFQQVRRLFDFRLSPTRSTQHGVKGESHEKVVFVAETSYSPVVGMKTLFDLWPKYELNLDSLEELLGKLSGVFRSAKEAIGVDIAKLNKETFPASAEAITAQARSTADALSESELFIELYGATYQAYLKKPGVTHAKKLFKLSPIEGLLASYRLFYVGCSRAKSELDVVIPLKEVSDIKATSEKLRKLGFEVIGGA

SEQ ID NO: 63256 - protein, 681 aa, Prevotella sp. C561
MYIKEINILNFRSFKEALIPFHEGVNVIIGHNNTGKSNLLRAMGLVLGYSNGHRLGTSDLFYETDVAELQRQSPRIQITLVLRRSADENLYSADMALFANMMTDPALSEEAELRYEFKLDDSQEQNYKADVTNAITAKEIWKIIEQDYIRLYKSSRSGGNQAAGININETLEQIDFQFLDAIRDVSHDLYAGYNPLLRDVLNFLIDYSVKNDVTKTEDEIKEQLKALRDDFVQQSRPLMQTLQDRLQDGKNVFLKYAFDTGATFNGAEPDFDGTVTENEMFSVLRMFIKYAVGIEVPATYNGLGYNNLIYMSLLLAKMQADGNIAYMKRNAKVLSFLAVEECEAHLHPAMQYKFLKFLQDNNLNRHVRQIFMTSHSTQIASAVKLDDLICLTSPALGQINVGYPRAIYKEESSNDMVSKQYVQRFLDATKADMFFANRLIFVEGIAEELLLPVFARYLNKNLTDEHVLVVNMGGRYFNHFLKLFDTKNPYTINKKIVCLTDIDPCRRKKEDNGNYEVCYPYEYNIDTDNYDYKHHADTEVDQYVVHPNIRFYRQDVTYGKTLEYDLMRENPNCELLLTESVSNSSEIKAMMKEQDVNEMMTKMRNSEANTRIKSSIEASEWTDEEKRKALLASRYLNSVSKGNNALELNVALMNNLDKPEEDRDEFHVPRYIVEALTWLLS

SEQ ID NO: 63257 - protein, 565 aa, Prevotella sp. C561
MATIITSEETIPINEPFKVTAGPGAGKTHWLINHIKNVVSNSHKLDVVRKVACITYTNVGIDTITSRLNMGNDLVDVYTIHSFLYANVIKPYIHLIAEDFGLKLDKLVVIDDSNFKSEGIAALVLKRVGKSWLDTKIYLKGLERAMWRYENHEYKHYKPDHPQVYKIKSGKRYVGNDWYMEFKRQLWSGGYISFDDILYFSYILFSRYPNIYILIKARYPYIFVDEFQDTIPFVVDLLAKLGNEGVIVGVVGDKAQSIYDFLGATVQQFDSFTIPEMQEYEIRGNRRSTKQIIDLLNIVRTDFSQDWLNGSEGMMPELLVGDMLNCYQQCIEKSGTDEIQSLAFQNILANSMCEKNGVREVENILEMDFDSNAGRQMVIKALIKAVEYTRMNDLRNAWYQLDIIDSDRTQTIVLLRYLLDGYKDYKDGSLMDFYNFLVNDLHVEITKIKGTAIRDFYQNHAYADAALGVKYSDSNNKHKTIHKSKGEEYDNVFVVLKEEKDLEFLLSPNLNDNNVHRVYYVAASRAINRLFICVPTLSAEKRIQLEGMPINILLPNNSQLGSGQI

SEQ ID NO: 63258 - protein, 677 aa, Ralstonia sp. 5_2_56FAA; identical to SEQ ID NO: 62662

SEQ ID NO: 63259 - protein, 585 aa, Ralstonia sp. 5_2_56FAA; identical to SEQ ID NO: 62663

SEQ ID NO: 63260 - protein, 580 aa, Pelagibacterium halotolerans B2
MLVGENNGGKSNLIDAIRLVSTPLSGRRELYCEQTDIRFGTATRAFSIQAIFEDLTPPQQGRLISAATDDTLNAACFGLTYEATGKQSHIRPNLWAGRFKTPPESGAHEMIRHVYLPPLRDAKRALASGNPTRIHALLNHFLGDRDPDEIAGKLARTSDDQLLKDVDLAVAGGLDILTTGVRRQSASLGFNTDEKLIDIARDLRFKLADHGIAPEDLQYSGHGFANLLYMATIAVELEKTDNAELTLFLVEEPEAHLHPQLQAAVLNFLEERAAQSLKPKEDQNAPAGHLQVVVATHSPNLSAWVPSKNLVFVRSVAPISGKNEGTAQQGSEQTEHSETPHAVVAPRAQSRCIPLSKLDLSDPERRKIDRYLDVTKSALLFGGRVLLVEGIAEALLLPVIAKHHVLKDIPSAFRTFRSAVFVPIDGVDFSPYAKALLSPFNDVRIADRLVIITDGDKQTVTADKPLPGGNRKSALDALAAERGAGAVLDVFTNTYSLETELVAAGNADCLKAVYLGLHPQSEDKWNEAVAKTGDDRARAIQDLFKTTPKGDFAQLLAEKAASPSFVVPDYIRQAIEALVK

SEQ ID NO: 63261 - protein, 582 aa, Pelagibacterium halotolerans B2
MRPQAFQPTREQQEIIDHDGSAFVTACPGAGKTRVMTERARRLFADMPAGRGVAFLSFTQGAVFELETRLREEGILPSPVFPSFIGTFDSFVWQFLVAPFGISNCDVRPRLIADIADLAVTPFNGAHPLPLSCFCPVTGTIFAQAAKQRGFDLSQKSNQQIQAYVTAAASIRAGLRTRGQLGFDEARGVALERLRDAAAAPRISAALAARFSEVIVDEAQDCNPDDLHIIAWLRDSGLPVKVVCDPHQSIYEFRGGVTDQLFAFAETFDEEGRKALTGNFRSAPNICKTTAQLRPLASRSAPDEPLGRHKDDATPVLILSYPGAAVPAAIGTTFCEQVTQAEIDLAESPVIAATKASGAAAAGQPRPSKRRDRSVRLAQAVTDFHFAAGFNDMKTAIDQMHHILLELEGRLGDLSYRQYLADNEIEQASWRPQVLFLLRALRFDPSKHADAKAWHAATKELLSRQLTLNDGPSLSQRLKWNNAVSTVLAAVPAATAMPRTIHAVKGMEFPAVCVVTTASTLKSILDYLDTGEPADKAEDARKLYVAASRAEELLVIAAPRSQSQRLATHLNAQGALVEVLEL

SEQ ID NO: 63262 - protein, 593 aa, Mycobacterium rhodesiae NBB3
MKLTHIKLANFRSFLDEHEFELADGANFFVGPNNCGKSNLISALELSMDPESVFVPERDRPVATQGKGPPKHTRITFTFRSTNKSSPQTTLLDRARKYELALRMKQGRDPGRRAKTYADDGEIRRVVTFGAQGARQVSYQAKGLGAVSLPIDSPEHLALESQFLKVVRFGVVHSGEDLESVLNGKFREVLQLVINDHLSKQLADTEKLREKYVKGLRTVLLKPLRERVFERVSSVFSEIKIVDLLPDVPPLNDTLSSVGITLADAASTELKGKGTGLRGAVLISMLQYLAEQSRRSLVLAVEEPEAFLHPGAQEGIALQLEKLAERPEVTLLVTTHSPHIISRRADARVTELRKSKDGNTHLAATARGDEDRAELLGSLFTDRGLARVLEQATSAPAGTRAIVVTEGYTDGLFLRYGLEAAGRSDLLQGIHFISAGGAKKVVFQAVLADSATHLPVIAILDQDAHGRSARDHLKDFGWTANDHIIYLGSWPKACNLGEHPIEIEDLIPLGAASAVSQVLGDDAHDATQKCKGRTHYSYSKAWKELAIVQLPKELIGRNLDDFVWLGEEISKRIAKIAERRSRVTSISDAAASK

SEQ ID NO: 63263 - protein, 923 aa, Mycobacterium rhodesiae NBB3
MTSYTPSQQEAIGCLDETLQIIACAGSGKTQVISQRIANILGEPGVEPRNIIAFTFTEKAAAELKDRVLRLVEEQHGEVVGMAEMYIGTMHGYCLDLLQRLVPDTFKFSVLTEITARLLVDRNSKKSGLTTCPTSSAKTPTLRRFIHSRLYLQIASILREDIVDEDLVDQRVWECLDSYLRLLVEKAEFDFTEMINLAVSFLEADPDEDEDARTIHDHVQNDIKYVVVDEYQDVNALQERLVVGLVKYGANLCVVGDDDQTIYQWRGSQVANIISFTERHEGVRQVTLAENFRSSKGIVELGRSVAERISPSDRLAKTMASAQTQPWDRGDILALTFDDENAEASWICDRIGDVRGVPFSDAPGSVARGLSWSDFAVLFRSVAKDAGPLVEELQRRGIPYIVKGLNRLFDSPEIIAVVGLFRFMTREINADTLSQLWVDADLVPDVQLWPGAVAILEEGRNFDRGDRWGVYNIQRVYLDFLAALELREESVPGLPGRGELVFYQLGKFSQVISDFEQIYFNSAPAQKYESFVAWLTHQAPDYYAESDADVGYASPDAVTLSTVHQAKGMQWPAVFVPCLRRNRFPSKRQGGLSVFHVIPENAVTDADRYRGTVEDETRLFYVAITRAQKYLWLSYSPGPNQLYKNRSEFFDHCTGQTWVSTRPSTKPLPNRIEQQPRHDVPEVTFSFSELKYLFECPYSFKLRFLYGFNPPLHEALGYGKGLHDALSEVHKKAVAGEILDESVAQDLVDRHLFTPFAYPELRETLHRSAVAAIKRYFATHGDDIPRTVHSEKQIQVHVAPGITVDGRIDLIRRLDTDELSIVDFKSTDRAQPEEVTRDQLHVYAVGYEELTGENADLIEVLNLDEAGKSTREEVESGLLTDVRERIREAGGSLRDNQLNRLASWCMQCERCDLAGICRDRANV

SEQ ID NO: 63264 - protein, 444 aa, Shewanella baltica OS625
MKLSCVRLSNFQSFGPTSTELNLENLTFLIGSNGSGKTAALQALCRMFALDPSVRRIKKSDFHVPYDEIEIPDERNLWIEADFQFSELNDEAGNTTVAPHFGHMRLDDGDGIPRVRFRLEASIGVDGDIEESFVYVHDLDKHGHPLSTAKVRRGERNLIQLHYLPARRDPAEHITFATNAILGRLLRAVNWEGEREAIKEHTEQISQDLAANTSVNALSNSIKSSWASLHKGEFFKEPKITFVASEIESLLRHLSISFTPGHDETLVDFSRLSDGQKSMLYLSLVLSSQVIGRAALNGDNSFDPDKLRPPVFTIVAVEEPENSLSPHFLGRIVSALKEMNSNGDAQALIATHAPSMLRRIEPKQIRYLRLNTSRHTTISNISLPDSETSGDAHKFVTQAVKAFPEIYFSRLVVLGEGDSEEIVLPRLMEAKGVPVDEFAITVSL

SEQ ID NO: 63265 - protein, 556 aa, Shewanella baltica OS625
MIRHDNWKPADGLTLEPNAERAVKECEKNLALTAGPGAGKTEMLAQRADFLLRTGTCRYPKRILAISFKVDASSNLKDRVTRRSGDELSSRFDSYTFHAFAKRIIDRFRPILTGIYTLDSEYTIGSPRTPQKQIEFADLVPLATRILQSSAVARNAIRQTYTDVFLDEFQDCTDIQYEFLKIAFQSTTIRLTAVGDTKQKIMGWAGALDGIFVTYAQDFQALPLNMYRNFRSKPQLLRLQNEIIRTLDPASVMPNELIVGNEGEIRAFQFETSQREAEYLAEQIQNWIIVDNIPPNEIAILIRNQPHLYAQHLIPALRNRQIPFRNEQELQDITVEPAARLIVDFLLCTFGKREPAAWLRLMNQLIPFTDDEEEQDKYQQIWLNFIQRQRKRIRENPITIDNQSRWQSVQSFIELVGIETMTALSHDYETASRLNEVLRATFNKLDETLASGLTLLEALCQFTDDQSVRILTSHKSKGLEFDTVVLLGIENECYFGAPQENLCTFFVGVSRAKCKLLLTFAKERIRPEGFSGRWSEQRTLVNEYAGYVRPFLSNNN

SEQ ID NO: 63266 - protein, 647 aa, Shewanella baltica OS625
MYLSNLKTEGFRCFGKEFNVQLAGGLNVIVGENGAGKTAIISAIRQLFHDSESGRYSITSDDFFSPFVAGGKNASSLSISAEFDGLDAADKVAFLPWVGASNTALLNLQAENKEVRGRFKKVIWGGISRSSQFDPELLDLVQCIYLPPLRDAEANLSNGRQSRLSKLLKALNRKQLKECKRDTKLHPLESKLKEFNESLADDGKLGIKEASKLINENLTKAVGHYFGQKTNIQFAKSDFTKIAESLTLLFFPDLSVKDQELFRELSQNSLGYNNLLYIASILAELTLDDEDEDQPLFKLLLIEEPEAHLHPQLQIRLLNHLKSVAEENKNVQVIVTTHSTVLASSVDLESIIHLSKSPAPVATPLRTCGLPKTSGQFINRWLDVTKSNLLFARGVILVEGIAEQMIIPALAEIVLKEQEVGRQNLEDLGISAINLNGIYFNHFMQLYCNINGENDEERSSWNNIPIRCAGITDLDPPKKQTRQIPDPKDTNKTKEIEEDFMPYEGHMKDGTNHAIKLVDSINKSTNARLYVSNYKTLEYDLAMEGNNAALMSEIIASLWPKPKNGTSKIVEHFTQLASIDWTKKSPEDVAVMAHNILKRIDDDKIGKGIFAQVLTEKIQREGRPFAAPKYIRDAILWASSIDVAEES

SEQ ID NO: 63267 - protein, 585 aa, Shewanella baltica OS625
MAVEFTDEQLAYVHSSIEDNTFLEACPGSGKTEVVAAKVAKEIDAWEKHPGGLAALSFANSATEELARRVSKYLPKGQSQFPHFLGTFDSFIYKNIVSPLSTDLTGYVGQNGDASIRIIEPSAYIGYRTENEISERGRISAHHYSFDPIKKKFIFATADQKLDRALNSIALEEAQIQDLITTKKKMLRGGFATYQDIEYLAYKALKQKEFNCYFSLLAVRYPLIIIDECQDLSELQLTIVKLLARNGTSLHFVGDLHQAIYGFRKVEPKKVKQFVQDNNFNCLYLTRNFRSCQNIVNLCAKLTGRDNIVGNITWLEPRCLVLQYDNCPTELISSFEEKCDGFENNVVVSRGHSILNKFQTSVAKPNNIQNLALAVKLYNPDNMEALNQSLQHFSEFLRYHLKESYKPNSLNCPQSIISNLSWRKFLYGALKYLTSNSLHNFDVEWSSWTKKAKVLIRALPKQSFCTEAIASTLAPLKNVNLISPTGSSKLEVAPSLAVTNKPSLQFAKGTIHGAKGETHCATIVISSARPGGDSHWKDWLKDPDSEAARFAYVASSRPRELLIWAVKTLKPPERQQLESVGFTIV

SEQ ID NO: 63268 - protein, 375 aa, Streptococcus pneumoniae GA44194
MIPPVLTILAIEEPENHIAPHHIGKLIKRFKQLGNNDNSQVILTSHSPAIVKRIDPEDLKYLRIENNDRVLQTIVSDIQLPPAIDESYKYIKGAIQAYPELYFAKLVVLGEGDSEELLLPKFFDLLGKEVDSSQISIVPLGGRHVNYFWKLLNALRIPHITLLDFDNERYGGGWGRIKYISQHLYELNTEFQEWFHTQRLDFNEIGSRGCESIGAQRLINWFNKLEEFNVYFSSPLDIDFLMLQHYKDNYLNTLSPIEGPVVSYNDSDGSSKKVKLSDLDCLDRLQLEGFNKRKEEAIRATLKDKSGHGDSFNEEEKELMIWYQYFFLGRGKPTTHMQFLSSISDDELTRNLPPVFEKIVNSAEELLGDIQHGKE

SEQ ID NO: 63269 - protein, 605 aa, Streptococcus pneumoniae GA44194; identical to SEQ ID NO: 62613

SEQ ID NO: 63270 - protein, 375 aa, Streptococcus pneumoniae GA11304; identical to SEQ ID NO: 63268

SEQ ID NO: 63271 - protein, 605 aa, Streptococcus pneumoniae GA11304; identical to SEQ ID NO: 62783

SEQ ID NO: 63272 - protein, 597 aa, Streptococcus pneumoniae GA17227
MKLTKMVINNFKSFGECQAINFNNQTVLIGNNSSGKTTVLQALSKLFSDKQSDRIIRKSDFHLPKGLRPGENTRNLFIETIFEFDELDGTVYGPAIPTFFEHFTVSQDGAKPFLRIRLESSWEDDGTVEGSIDTQIYYISSDEDTIRDEDKHRAPRKDLDKIRVLYVPASRTPEKELGNASGSMLSRLVNSINWTEDEIKEIKDKIDELNNTFLSENGALTQINNEIQKSWELYHEDNRFSQAELIINSSEMAAALRQIALKFSPTTTEEAFTVSDLGDGLRSIFYFSLVDSILDIELEITKDREENPDNPRFKLVPPILTILAIEEPENHIAPHHIGKLIKRFKQLGNNDNSQLILTSHSPVIVKRIDPEDLRYLRIENNDSVLQTIVSDIQLPQSNDESYKYIKGAIQAYPELYFAKLVVLGEGDSEELLLPKFFDLLGLEIDSSQISVVPLGGRHVNYFWKLLNALRIPHITLLDFDNERYGGGWGRIQYAIKQLILNGVAKEKLVTVTAESQKSRVLDDDEIDKIKDWKIDRPDNQLLEGWIKMLEKFNVFFSAPLDIDFLMLQYYKEHYLETLSTNEGPVVSYTDENSDNKK

SEQ ID NO: 63273 - protein, 605 aa, Streptococcus pneumoniae GA17227; identical to SEQ ID NO: 63191

SEQ ID NO: 63274 - protein, 605 aa, Desulfotomaculum gibsoniae DSM 7213
MKINRVQIKNFRNFKNLDVTLGEHAVIVGENTIGKSNFLYALRLVLDPSLPDTARHLQESDFWDGLPRPLKKTAMISISIDLVDFEDNEDLMAILAEHLVDPEPMTARFTYVFQPLATLSGSPSSDADYEFIIYGGDRAENRVGYDVRRRIPVNVLSALRDAEGDLSSWRRSPLRPLLDEAAREIDREELNNIASEVADASAELLKNNEISELAEQINNRLSDMVGKFNSLNTILGFTATDPYRLIREIRLFIDGGKRGVGEASLGSSNLLYLALKSLELEQLVEQGSRDHTFLGIEEPEAHLHPHLQRLVYRDFLRPRSHREGEDGRSEIKHKHQTILLTTHSPHIVSVSPLHSIILLRRSSSENTTEAVSTTQVILDEKEIADLERYIDVTRGEMLFAKGVILVEGDAEEYLVPVLGKRLGYNFDELGITVCSVSGTNFAPYVKLLGESGLRIPFAVLTDLDPQSDGRYLGHSRVTSLLKEIMDEGEYQKAEDEGKLLDLAPNYGIFLNNYTLEIDLFKYKRHKSMCSTLIELTENNAAKERARVWREAPEKLDETKFLKDIGAIGKGRFAQRLATKIANYKATICPPYIKEAIKYVAGKCSK

SEQ ID NO: 63275 - protein, 625 aa, Desulfotomaculum gibsoniae DSM 7213
MSPANVLNKPTYLVVAEDLRGNPGQRKAYESQKNCVILAGPGSGKTKIITIKVARILNEDIRLPRGIACITYNAECARELKRRLDELGVVENSHIFIGTVHSFCLKNIILPYGKIAGLELPEPLSVAIPKEQDRLMEMALLQEKGDEELRRWKIRLARYRRTYLDRDSLEWKNTDEDAAQVIEAYEAKLRKNGFIDFDDMMLLGLQLVEKHEWIRKLIKARFPVLVVDEYQDLGVPLHRMVLSLCFKAGVRLIAVGDPDQSIYGFTGAKPELLEKLAEMEGIEQVRLRLNYRCGETIVKASQITLGEKRGYDARPGAHKGTIDIHECPGGLEHQAETICNKIIPNVIKRRRCNLGDIAVLYLDKNMGDVIAEKVNAAGLPFIRIDQNAPYQKTPLIRWLEDCALWCSGGWKEGKPRLSALIQTWLAFNRNDCDNDMLLTYKRGLIRFLWANRRPEMMLHNWLSAFQSSCLKEMFSQQKIMRDEKEAFERLIGACAKGGRIENFIVAAFAGQGGSPEHLNLLTLHSSKGSEFDVVVIMGMDQGLIPRYGSGEGEKREQRRLFYVGLTRSRNEVHLTYSGWTKNKYGRKFNNGPSEFLIELRDSVLNDDEGCSMAKSTSNAILGGVL

SEQ ID NO: 63276 - protein, 593 aa, Paraprevotella clara YIT 11840
MYLSQLHISKFRVFDDITLYFKSGINILIGENNSGKTAIIDALRICLGCGKPDNLVYIQESDLHLNPENPTETNNTIQFDLIFKFGNASIEKECFYDFISQDKDNPDKQTIQLHLKFIQENNGKKKYFKRIIWGGDNEGQQVPYESLQEIFYTYLSPLRDAVSCLRPYSYDNKTSQLFNQLTKYDKGDESIPLNEEKKKSLAKKLYQVFENDADDWKHILIAGKDKVNTHLEGTGITRKHPDIEMRYVGREFSDVVRGIELKCPVYKTIEAGKEQKYFALSQNGLGENNLIFTSVVLGDLINRCEDHELEIYNALLVEEPEAHLHPQYQNTFFEYLNELQSKGLQVFVTSHSPTITAKSDVNNISVLQRKQSIIKSFSFDELSEDDYPKESKRHLRKFLDTTKAQLFFANGVLLVEGVAEAIIIPILAKKFLTEKIDLCKSGIELVNIGGVAFNHFGLLFNNDDERKRLLSKCAIITDSDPNEDKEISDRAQKAKGLEKHNLKVCLAPHTLEYDLFEQSEQNKTIMRDVYRKLHPKTEKLKSEFDAQTLMQSLAQNKDKAEFALQLCDRLETEDAFDVPDYIKEAILFVVSIE

SEQ ID NO: 63277 - protein, 584 aa, Paraprevotella clara YIT 11840
MAIQLSAQQQAVVDCNEPRSVVKACPGSGKTFSVAARMARLLRESNLSRHQGIAAVSFTNTACDVIKKELKDTFGYPNISYPSFIGTIDSFINTYIFLPYAHLVMGCDCRPEIVGTEFNKWYDYDASKRNYDRTKIIDPNYFVDKVSFNLNGEPIPLATAQEFNFSWSQMRNKDGKYRKDVKDIIETKRIHFAQGKANQADATYFAYKILNKYPSIAQNIVQRFPILIIDEAQDTTELQIAIIDILSQRGADSIMLIGDPDQAIFEWNTANPHLFMEKYNSPDWFSLDLTENRRSSDKICQLANSFSGNAMNSIAIDKDYAEHPCLIGHLSTPESVNQITDDFIQKCNEMGLNESEYAVVFRGQSFGETYFGLTNNDNSAKQNSPWVNGHYGVRDVVHGKYLIDQGKYTEGLALIEKGYYKITKQVRYVSTSTIRKEIAEVGFRSYREKMLDFIRKLPSTNKTLSNWIAELQREGINLMVALRKANVSIESLFRTSNQELQQARSYLRTIHSVKGMTLEAVLVFLSKRAVHTNYTTILNDSAKYCIHNNEELRIVYVACTRPKKLLWVAVPADDIDCWRKKLSL

SEQ ID NO: 63278 - protein, 364 aa, Paraprevotella clara YIT 11840
MIFEIEILIQEFKREKEKKPADINLLFIEEPEAHTHPQMQYVFIKNIKRLLKDGIQRADGEARSLQYIISTHSSHIVADSDFDDIKYLKKEGDNNVIAKNLKDLKKEYDKKTSQYQFLTQYLTISRAEIFFAEKAVLIEGDTERMLIPTMMKKIDIEEAATHKAKSTEDDYLPLLSQNISIVEVGAYSQIFDKFIEFLGIKTLIITDLDAIGADNKKCEVVNAVAYSNEALSHYFNNPTLADLKTFSLQDKLFNNIGGCWKNQSNGRLCVVYQTNEADYNARSFEDAFIHLNRNFVKNNKADFRGLQNKDYFDNPNKNAYILAQECIKKKTHFALDILYHSDEMLSNWQIPAYIKEGLLWLKQD

SEQ ID NO: 63279 - protein, 647 aa, Paraprevotella clara YIT 11840
MVETRLGVEQVKDEFQQIMEHIANGDNFLLSGGAGSGKTYSLVQVIKKVIEDNPTSKIACMTYTNAAVKEIEERVNHKNLNVSTIHDFLWDNIKHFQKELKIAIITLSNDENVNKIKIDGLSKVSNDYFDNGEETVKIQYKEYLRLKDGIISHDELLVIADYMFAKYSKLCDVVKDRYKFIFIDEYQDTHKEVIRILLEHFPKSKKHTIIGFFGDTMQSIYDDGIGNINEYKGDEKGKVREVKKTQNRRNPQKVIALANRLRTDGIVQVPSNDISAPNMIDGKVKEGEIIFIHSTNGDISRVEQFLTEKYSWSFSDTKRTKELNLTHNLIADKAGFRTLMDIYDKDPIMGLKKDILQKIKDNEKQGKPEIHIDDSDTFDIVVDKFQLKNRQRQLKKDILLSNPHNVELYNQLKNRPFSEVRRMYFDKDQLIDDKKQDDDDENKKGSKRDNLIRHLFKIQTNISLYVNKQYNDFLRVTDYNQIHTIKDKRELKQNIESLIEVGDKTIEYVINDAHRKGICLIDEKLENFLIEKEYIYNQVKNVKYAEFQKLYAYLEGQTPFSTQHKTKGAEFDNVLVILDNGKWNDYNFEYLFMNQTEKQRVLERTQKIFYVCCTRAKENLAVFYHNPTSVVLAKAKEWFGENNVISI

SEQ ID NO: 63280 - protein, 602 aa, Agrobacterium tumefaciens CCNWGS0286
MMRVARIVIQNFRTFASLDVNVADDLCCIIGENNTGKTAILRAIQICLDNMLPSSFRALMREDIHSAIDIAQPSQVLIGIELAGFEGRVNEEALVSTWKTAADRARIFYRFRPRPAVREQLVSGDILPGALTLEDYQWEIRGGGDPAIDLTEIAWDDDGIGESVRFADLQSYLLVHLPALRDVESDLRNPRQSPLIRLIEAFEIDAAEQDALIAILDEANQAIANSATIAEIAGAIDARFKDVSGPAFEMDATLGLSAATFRAIIRNLKIILSDLSLTSFEPGRNGLGMNNILYIAILMEYLQRRIALNRSAGQLILIEEPEAHLHPQLQFSLIAALRAINVQTILTSHSTQVTSQVPLSSIVSLTKREDATIAAGNLALNAALTAPEIADLERYLDATKSALLYARKVMLVEGPAEMFLIPAMIEQVYGVKLERLGISVIAIHGVHFDVYAKLFRAGSLEKKCAIVADADMKPSDAEDFDPETHAPDLVALENDFVSTFEGATTFERELVSLGRLPMLIETVRALGAPQILAQMEQGFATLALGGLSPADETALRIELGRITLNTAKRFGKARFAQIAARYAHLATDLPTYIEEAYEWLTE

SEQ ID NO: 63281 - protein, 587 aa, Agrobacterium tumefaciens CCNWGS0286
MIRLTSEQREAVEYDGDLLLTACPGSGKTRVILAKLLTLADQVVGTPQFIGCITYTNAAVDEIETRLRTYGNNTIADRCEISTIHAFCLQFILRPYSWLLPEVPASFQVLSRENSQFEQIVTAVEDAFGRMPAGQVFEDYESLRIDVNGDPCGQGFETGIVTEESATLYWERVRAHGYLDFAMILYYSWKILEQHPFVARGIASRFAWLLIDEFQDTTDIQIAIFGALRNFLHTRFFLVGDQNQSIMRFAGARPELADQFGDEIDAHRDTTLTGNFRCGPAIVDTASTLIPTVPGMQSAGDAAQVAAQVNYVHVARPIDAITDYFLPALQDAGIPLGKAAILAPWWTHLIPVARALRELDVPVFGPGARPYRRRRLLAGLAEQLGACAEAGNYLGLPGVERALFRLIGDLTGESRYDMFSYQGRRVALGLIYLARGLADQHPGGVAWLRAMAHEAGHYLENEELLPGSAKQTLIDSAEEMLSDMQASKVDLANLLISDMGLFANPEHALKLITLHNSKGREFDGVALICMNNGSIPHFSTSTQEAYDESRRLFYVGLTRAKRILLVASDQSHWRNKPTPFIAEAGLG

SEQ ID NO: 63282 - protein, 691 aa, Fusobacterium nucleatum subsp. polymorphum F0401; identical to SEQ ID NO: 62870

SEQ ID NO: 63283 - protein, 633 aa, Fusobacterium nucleatum subsp. polymorphum F0401; identical to SEQ ID NO: 62871

SEQ ID NO: 63284 - protein, 729 aa, Clostridium clostridioforme 2_1_49FAA
MHIKRFDIQNFRKLKCCKIELSDKTTVFVGANNSGKTSAMDALAKFLSARKFVFNDITLSNRKKLDDIGKVWINGGNFDFEGCMQEMEQIMPALDVWIDVKDNELHYVSNIIPTLDWNGGVLGVRFIYLPKNVEKLCVSYKEAFETAVKTCASSKKVKLALWPQNLCEYLGKGDLFNTLFEVKAYVLDPSKMNDDDLQPTDYLMECTTSNPLLGLIKIDIIGAQRGFSDTGDESAGEANYHTQNLSSQLKSYYDKHLDPENEPSPEDLKTLQAMEKAKKVFNDTLADKFHNAILELEDLGYPGVNDPRITIESKVSVSNSLNHEAAVQYALNSKEKLRLPEKYNGLGYQNLISMVFLLMRFRDDWMRTGKANKELLEERIEPLHIVLLEEPEAHLHVQVQQVFIKKAYDVLTNSQFLKAHGNFQTQLVISSHSSHIAREVDFKDLRYFKRLPATKDCIVPVSKVINLSGVFGEDNETTRFITRYLRTTHCDLFFADAAILVEGSAEYMLLPHFIRNKYQELNQRYITLLEINGRHSQRLKPLIEKMCLPTLIITDIDSGEPTGHHKHTLPQRDKGIISTNYAITQWVLKEKSLDKLLDISEKKKEKSFTTPYSFKMRIAYQIPIDLKYNGKICEALPSTFEDSLVYSNFNLFSTTTGEGLMEAIYGICNEGLDFESFHEKIYNLFRGENVPKAGFALDLIYSVDPQTLQVPNYINEGLLWLQDLLDKHN

SEQ ID NO: 63285 - protein, 619 aa, Clostridium clostridioforme 2_1_49FAA
MAGKELVSMDDNHLDDHVDEEIRSCLDWKCPKSFFTYAGAGSGKTYSLVKTLNFIQEQFGIELNIYSKQIAVITYTNAACNEILNRVEYSPIFFVSTIHSFLWELICPYQKDIRIWIKNNIQKKLEETEIEEAKGRKGTKASQTRLSKIESYKKRLEKIDSVRKFSYNPNGENSGYDSLDHADVIKMGSEFIKCKATMQQILISKFPILLIDESQDTKKELVDALLDVYAKNKDKIIIGMFGDTMQKIYLDGKENLEDSIPDSWIKPVKVMNHRSARRIVQLANSIRRCVDDKEQRERTDAKKGIVHLFIADSLGDKQKVELEVAKRMSQLSLDVEWKNENAYQSLILEHYMAARRLNFLNLFLPLYKNKRIAQSVLDGSLPEAKIFSQIIFPLVDANSEGNKFEVAKIIKRYSPLLSRDNLQRESANQRQCLQTANEAKESLCRLFEGEKMPTCIDVFKEIDRTGIFNLSERMEHIVLDCEQEQDSTVEALKQALSTSVSEMKNYCLYAEGKSSFSTHQGVKGLEYPRVMVIMDDAEAEGNLFSYEKLFGAKEMSDTDFDNEKQGKDNSISRTRRLFYVACTRAKDSLALVAYTKDKELVKQTVLSNKWFDESEVEFV

SEQ ID NO: 63286 - protein, 656 aa, Clostridium clostridioforme 2_1_49FAA
MLLSKITINNFRLIVNAELDVHQNITLIVGRNNTAKTSCMSILEKVVKNRVLSYDDYPLQRRKYAFILLAQFMRKKITYEQLCKRLPLTSIEFLIDYSLDDAEDNLGALSPFIIDVDVDTTTALVKAEYSLKMDEESLRNCFHTCFYKDGTFALDPQETKEVCSANFSKIFELVIYAINPKNKADVQIKTQKELADLFPFYPIPAERVLGEAAEQNYNSLGTLISSYFSVDIKNLDPQIAADVLKLRETVEEANKSIQRESSNLLSSIVGKAIGFGYPNGEELQLGVNTKLQIDNQIKDQTELTYMAPLAGEALPSSHNGLGYKNLIKMEFLLADFSEKIKQDHTACIPLLFVEEPESHMHPQMQHTFAGYLQTFLSKISDVHIQTFLTSHSAHIANTMDFSNIRYAQKTKRGVVYKDLGAFGAEDPENMDFIKKYLTLSRCDLFFADKVIFVEGASERLLVPDMIEKCDKSGLFAPITYKLPAQYYALIEIGGAYAYKFIPFVRFLGIPCLIITDIDAMKDGRTKSVVSKGKTTSNSTIKWWVRQVKGLPSADKSKIKLEDIINLTADEKTIDKCHIEFQVAENGLCGRSLEEAIKNVNRAFYGLADPVTEEKLEFTEKSKTDFALRLICDYPDYSIPKYLKDGLVWLNKQKVLV

SEQ ID NO: 63287 - protein, 585 aa, Clostridium clostridioforme 2_1_49FAA
MSKEPQKSNFELAQEEANKIDLQIIDTLQKGYNFRVEAGAGSGKTYSLNKVIEWIQVNKWKQYHKKNQHVVCITYTNAAVDVISGRLANDSFIIPSTIHSFAWNAIKQYQSTLIKFISEDETFRLTEGDFFAIRKVEYTLGHRYNENGIMYLYHDDVIRLFAALLDNAKFRRVFSDKYPLILIDEYQDSLKPIIDRFLEYFISRNSGPQFGFFGDSWQTIYQSNKACGLIQHENTVEIKKGANFRSAPKIVDLLNFIRPELPQRSAIDNFAGEVTVITCDDYIGERRTDRNFKGDLPSPELKERLNGLMEHIKHSCIPASENVKTLMITHRVLAAQQGYNKLLDILKDGLRDKEDPFLLFFMEQLEPIYQALEANDMQLLFDTLKLKRYPITKKAEKVKWKKLQEALKIARKKNSVDVLQTVFESRLIPIPTKIEGYYDLYLNAPETMYSGADVTIKDFLDIEYEQFLAAINYFHPEADFSTEHGVKGEEYDNVIFVISKGWNQYQFETYAPMIKNGYPQDKEAAYIRNRNLFYVCCSRPKKRLYFFVSVPVDRVFRKFLTEMVGEDNILTYSEFLNSQNHSKTE

SEQ ID NO: 63288 - protein, 640 aa, Corynebacterium casei UCMA 3821
MKFTILRISNFQSFGPTPTILNLADMTYVLGPNGAGKTAVLEALSRMFSPVTAQRTVRISDFHVPMDHSRSELQDEEPVLWIEVDIEFPEADSEGYYASIPPNFHHMMIESADRVPKVRVRLTAKLALDGVVEERIEYIRQVDESGEPTVCSEMSRYDRGYIEVHYLPARRNPSEHIAYTATSLIGRTLRAADWSQERTTLSDLSEQLTDALTSNSTVSSMGLSLTKEWGGLHRGEFFTEPTITFGRGELEGVLRQLTIHFSPSHDGASLPFDLLSDGQKSLLYISLVLAWQSLARRVLRNEEASLDPTRLRPPVHTIIALEEPENSLAPQYLGRIIRQLHNACSEGDLQALIATHASTLLRRVKPESVCFLRLNSERETTVHRVLLPEDDDEAAKYVREAVQAYPELYFSRLVILGEGDSEQVVLPRILAAAGIAEDDASVSVVPLGGRHVNHFWRLLNELNIPHVTLLDLDSGRYQAGWGRVRYALNQINKVKPKTYPREELNNLPKWDSTDSFPQFPRGKGPIWDLEQQGVFFSNPVDLDLLMLEAFPDAYDVERSTPDKKEIVAVLGKSHVNKDLLNPKVLSLFGDYHENFNLKSKPATHLRALSMLTDEELCEGLPAVFKRLIKHVDAKLMGLPE

SEQ ID NO: 63289 - protein, 552 aa, Corynebacterium casei UCMA 3821
MIRPEEWCPSDGLALEPYALTAVTSTGKNIVVAAGPGAGKTELLAQRADFLLRTGACPYPRRILAISFKVDAARNLRERVRRRVGSQLAAQFDSFTFHAFAKRIVDNYRPALTGQNALSPNYRLDVHNQIQYEQITFDDLVPLALEILKSNRYAKNGIRQTYSHVFLDEFQDATAPQYNLLKELFWDSRTFLTAVGDGKQKIMTWAGALNGILHTFADDFSAIPLPLYQNFRSAPRLRRMQNRMIAEMDPAAVSPGQELTGDDGVVEIRGFDTSSEESETLAERIQDWLDEGVDPGEIAVLVRQQAGLYTAPLGEELAKRGIPFRNEQESQDLNAEPAAVLVFNFLRVIAGDGQADAYVELMRFSNRSNLPEEESLQFDRRLKNLLQEARQKVRVSEGDHSAPQFWSIWTEKFLSLISRPTLVALSPSYQQGQRLDEVIHQALDAFEQELSNCGDVVVALKRLSGKEAVRFLNIHKCKGLEFEKVIILGVENEMFWGDKSNSLAEYFVAVSRAKNHLVLTWARFRPRPIGHVKRWDEFRTQHQRFINFGRGD

SEQ ID NO: 63290 - protein, 690 aa, Fusobacterium sp. oral taxon 370 str. F0437
MVLKEIVVENFRLLKNFKLELKDELSLIIGKNNCGKTSVLIILDKMLNSFDIAWEDVNLVKQKEIYKEINKFNENIEEGNKFLEAIKLQLYIEYDDTDSYENIQNFIMDLDPENNIILLEFILLIDIKNILELKDIIKEREIKDFSTFSRYISKNFTKYFKIKKYSRGYDKKNKKIISDMIEEIENKDIQKVIKVVGIRADRAVSNDERNHALSSLTSRYYEIYRKNIKDESNSIFQELEIELEKTDKALYKIYNGEKGNNEKDSEGIFKRIIDVVKTYGGSDNKINISIGSSISEKNLLTNNTSLYYKHGDEDSSTLPETYNGLGYLNLIGILFEIETKLQELYEQPADINILYIEEPEAHTHPQLQYIFIRNIKNHINNHRDKLNKEKNKYLQIIITSHSSHIVSECNFDDIIYLKRVENNILAKNFNSLKTEYKEDEKRGFKFVKQYLTLNRSELFFADKVICIEGDTERILMPAMMNKVDKIQILKNEITIPLLSQNISIIEVGAYSHVFIPLFKFLGIKVLIITDIDSATKNKGKYKKSHPNKATHTSNASIREFFKESGLDDGDNQFKELIEKKDTDKIKDKIRIAYQISEIEGDYQASSFEDAFISLNKDFILKNKDNLYDYGALKKFNKNEINKDCYNFSLNKIEKKSAFASALLYFDEEENDMEWKVPRYIKEGLLWIQEF

SEQ ID NO: 63291 - protein, 647 aa, Fusobacterium sp. oral taxon 370 str. F0437
MESSSLYKGGIIMDTRILENEVKVALKCIEKGINFILEGGAGSGKTYSLISLIETLIIKSPKIKIVCITYTNNAVAEIKSRIDNENLWVSTIHEFIWYIIKKYQKEIKNELVLLINDETIKSFKKPKDKDLENNLITIDYFNNIDVEYDEYYSMNPSKNKVKISHDHILILAEKMFEKYKKISDILKDIANCIFVDEYQDTNPNVAKILLEHLKKSNKKNVIGFFGDSMQSIYDEGVGDLNEYKLKKIVKKQNRRNPRRVIEIANKFRDDKIIQIPSKDKKAPNMDENGVIIEGNIKFIYGKEPEDINFLKNKALFKSWDFLNGEQTRELRLTHKYNAEMAGFKKLYNLYNDDLIIVLIDKIKKNIDNNENEKKLLNELVLELRPTYNRKDLFEEITSNKIYESIYQNIENLAWKDVLEKCKINKESLMSYKFNGISGKYEANSYRDKVLQRLDILNELIELYESKKFNEFLKKTKFSIQNKNDKSKLKEMMNYLILEDRKTIEEVLDFSEKQGLIKEDTDFDNYISVKGFYLWERIKKISFKEYRNSILYLKEFSPISTQHSIKGNEFDNVLVVLESNWNKYDFETLFGKGSENENVIKRTRKLFYVCMTRAKKNLVIYMPTDDLEIVASAKEYFGEENVLSIDLI

SEQ ID NO: 63292 - protein, 596 aa, Methanosaeta harundinacea 6Ac
MCAISQFSGVKIEEVRIRNFRSLKEVDVKLDWLTVIIGENNAGKTSFLDALFVAIGAGRHNISSDDIFLAQSETKAPKEREVIIDLLIRPIDKGGNIIDIFPEGCYWIELYGEGISQDDDGNEFVAIRTQMRWDSTEGGYEVERKFLADWQDPNRLNLSKVKGSVSSYQIKPLALYLLDAKRDIKEEFQSRNSFWYKLISDLGLENGKITEIEAELGRINEGIISGSGVLGHLQEHLNDLYKTIGGDSESVSITPIPRHLRDLSKGVDVNYSTKGAQSFPLSRHGMGTRSLAAVLTFRAYMTWKQRNSNDNIHPMLALEEPESHLHPQAQRALFSQIEEIPGQRIISTHSPYIAGQTDVSKFRHFRKVGENTMVTQMDTSELEADDIHKIDRMVMNTRGEILYANALLLFEGEQTEDQALPIFAEKYWGQHPNALGISMVGVGGNGRYLPFLRLARSFQIPWYIFSDGESETITNVDKALSKAGEPITSTRRFTIPDGKNFEEYISVQEYEDVLIDVILCTESKNPHHKAALKAKWEEETNPLQEICSTLEKNKTLYGKQIADAITGMEDEKLRFPPLIRSLFEKMSDDLGLEKRG

SEQ ID NO: 63293 - protein, 633 aa, Methanosaeta harundinacea 6Ac
MNIQLSETQRKIVEHGEGPLLVVAGPGSGKTRVLTERVRRLLNEDTGHFRILALTFTNKAANEMKERLSEIPNIEKRAFIGTLHSFCMEVLANRGKPVGIDELPNIFESYQDRKQVLFQAAMANPYLRHKLNIILDANTQDRLLNRWLDMISSAKNNLFVPEMMDNETDRQVYEAYNNGLRVSYAIDFDDLLLLTYRLFQERPKIADFYRRQYRYICIDEGQDLNEAQYQVISALCGLEHRNVMIVGDKKQAIFVWNGANPKYLDQFERDFGAKKIFMNDNFRSSQVVVNAAKSLVSEYEVEGQLPIAGSIELMEGIDEQHEARLVLDYIQNLLNEGHRDVEGPITLERCALLGRNRYVLSAVEDELNKRHWPYYKQLSAQQESESSLIQDFELCLRLLANPRDRLHFSMLIARWDMREDASDFGQHVSDGLRLLSALKRRTSDNDRLAVILALESMDWTEENFKFKNAMEYLYDYSETKESQEERALIIEDIRTWQKHWNYYLRSQPGGYHTLTSFLGQVALGTTQQPRQEGLALLTVHSAKGLEFDVVVVMGMAEGTFPDYRARDGPALEEEMRDAFVAVTRSKRLLAFSYPRTKLMPWGSERKQRPSRYLSIIGLIKPDNPRGPNPGKIV

SEQ ID NO: 63294 - protein, 686 aa, Marinobacter manganoxydans MnI7-9
MKLNRVQIKNFRLLRDVELFLESETSVIVGRNNSGKTSLSEVIRRFTSDKNATFYLQDFSTECYEEFCAAFKAEREGKEESEIRTLLPIIELRLFFRYNPAQPRLGPLGEFIVDLDMACDEALVVMRFEPMDGAINRLFDGLPEEITDATRKLFFREIAARIHNLYGIKVWAEDPNDASNRKESSQAAVRTLLKTGFINAQRGLDDITTKESDVLAKVLEGLFNNASLDTADEKERKIAEQLEEAVRTIQETIDSDFRSQLQQLLPTLQTFGYPGLGGSVLTTETSLDVHRLLTNHTKIRYEGDSGVLLPESYNGLGMRNLIFILLQIVSFYREFRAQAHAPGVHIVFIEEPEAHLHPQMQEVFIRQIGAIVEKLNKEHEKDPEWPVQFLVSTHSSHIANEAHFESIRYFLPSPANDRSTIWNTKIKDLRRGMSSTKPEDKKFLHQYLTLTRCDLFFADKAILIEGTSERLMLPIMIKKRDKADTSGPKLRSQYLTIMEVGGAYAHKFFDLLNFLELQTLIVTDLDPVTDVGGKKCLVHEANATSNACINSWFGGGPNVPNDLLEKSDEEQIRGRIRIAYQCREVNDGPCGRTFEDAFLLANGAKFGVSGDTPEALAGDALAKAETFKKSAFALQYAIDDTDWNIPKYINDGLAWLARGFVAPPTVPVPPEATVVSEDIAEESAND

SEQ ID NO: 63295 - protein, 585 aa, Marinobacter manganoxydans MnI7-9
MTEPTELSPAEEASERALTAVREAIEKSNSFKLEAGAGAGKTYSLVKALQFLIKREGERLPRLNQRIACITFTNVAKEEIKARTDRSPLIHCDTIHAFCWSVISGFQSQLRVHLQELEGWSSDPWEERLKEAGGPGSRRIEYSLGYRGITDEAISIHHNDVLPLTIRLLGYEKFRNIFRYRYPVILIDEYQDTNADWIAAIREHFFGKGGPPLFGFFGDHWQKIYGDGCGELVDTTITEIGKQANFRSASAVVDCLNRMRPELKQFVLDPDVRGEVRIFHTNEWPGIRLKGPHYGGDLPDDAANNTISEVKSRLTKAGWDLSAERTKILMLTHRALGKQQGYSSLASVFRDNNSFTKKEQAHIAFFVDHLEPACRAFAAKRYGEMFAALGASKSYLLKAADKKDWSDSMTRLLEIRQTGTVADVVAHLREFRIPRLADAVEKIELRLETFDPSEGEEMPRSLMEVRKLHDIPYQEIISVTNYLEGHSPFETKHGVKGAEFENVLVIVGRGWNKYNFGKMLENVPKQDTLSEKDRATFENNRNLFYVACSRPKRRLALLFTQQLSPGALNTVESWFEKQNIESVVE

SEQ ID NO: 63296 - protein, 769 aa, Enterobacter cloacae subsp. dissolvens SDM
MSAADATTSLTGQISLRFVELCQFRRLGKVQLEVDPKTTILVGANNSGKTSILAALRHFLADGSPFGAFDISVSQWPKLRELGRAWDALEEDPSTSGASEDEWVEQLGTLLSAMPTLDLWFDAKAGMFHYVSPFLSKFSWKGGGVGVRLRLEPATNIEDLKQLAWKYHLTRIPVKDMGKDSLAWPIDLLDFWLREPSLLGQVRAYKLDADNNPLDGIKTYVSQILDANSSPIDRKHLQKIIKVDFVAAQRGLGSEEADSRSASGPHRIGLFSNQLLKFARQHLNVAATGHGHRADLIKAVADAQQELDKKIHEAIGPSVEEVKELGYPGLHDPQEIRFRTRIQTAELLDHGTAVQYSMQKDSLEELLPEYSIGLGYQNLQSLSYQLVSFKAARLNPEKGAPVPIHLVMIEEPEAHLHVQVQRIFPGKAHKLISPNGSAESGLKSQLIISTHSSHLAHAENFDRLRYVRRVAKSEEQNMPTTEVVNLGQVFGDDKTTRQFAERYFRVQHTDLLFANAAIFVEGVAERMLLPLFIERDFATLNSRYLSFLDIGGSHAHRLKSLVERLRIPTVIITDIDPVEERPGKPKKNGDPTTTLVAVANTGQPGLQCGNPTLRGWHPKLQQLEDFKNPKDEHIVWNEIAECSVRFAWQLPVAEAGNQWPSTFEDSLILRNIPWFKALMNEKVDDEGKQITPPKGALGSVARQVAENDNIPELLAALHKLMHGSFNKGDFAASIFEMVAADEPIVCPKYIVDALEWLQTQLEPSKEVMP

SEQ ID NO: 63297 - protein, 649 aa, Enterobacter cloacae subsp. dissolvens SDM
MTNSLILDGNDRDAGVVEEICGYLTDIPPRNYFLFAGAGSGKTRTLVEVLRRLTGVTEHEKGGQLARSLKMYGRSIRVVTYTKNAVSVINGRLGDNSLVCVSTIHSFCWELINGFNDDIRESLIAVKEAQLAKETAEAQAKPRGITAAKQRDLDEITNEIEVLRTTEVFKYHPDRNTYGPGALPHNYVLDATAWLLQNKPTLQSILKDRHPIILIDESQDTMKGVLDSLMVLAKKSERDLTLGLLGDHRQRIYMDGHADLPSIVPESWATPELQMNHRSQRRIVTLINKIWETEFEGRTQPTKGSAQHPRTEKAGGTVRLFLGDTSRSPEDKVPSERWCAERMFEISGLADWNQGQYQLLALEHKLVATRGSFLDVYEAMVLLDPNAAAPSGSGDNKGPSTVQILLNELAHLEACVSDEGIVNEFKATEVFRRYGGLDNMPEDSEARAERTDEMLEAIAIFAMACANTESTIAEVLAPVLNAKLFEVDHRLQEAYADKSPAPQAPGRGEDESKQARMRRGWCALFAAPWKQLKCYRNYLAGISELATHQVVKGSEFKHVMVVMDDALAGGTLIKYDKIFGGTQLSPTDKKNAEAGKETTIDRTLRLLYVTCSRAQESLALVLWSSDPAAAMARIKESQWFAEDEIQIIT

SEQ ID NO: 63298 - protein, 689 aa, Peptoclostridium difficile 70-100-2010
MQLTKIILSNYRCFGEEPTTIEINNLTGFIGHNSSGKTALLSALMKLFGEKSSDRIIERSDFHIPESIDPDSISKNELYIEAQFEFPELERGKDSISIPVFFKNMVVSEPGGKPYLRIRLEANWEKSSNPEGSIDSNVYYITSTTEEINPEDKRNIKRYELDQIKMIYVPAIRRPDEQLKNVSGTIISRLLNGISWSEQTKARIKTKASETEEIFFEEKGVESLKKSLETQWNSYHKDIRYSNPKINFNSTDLETILKKVEVTFSPTGTHRDYRVEELGDGLRSLFYLSLVNTFLEIEEEILKSINDGKEEDIFTLIPPVLTIVAVEEPENHISPHLLGRVVEKLNFISTKENSQTILTSHSPAIVKRIEPTDIRYFRICKEYECTKVKSIILPNEEKEAEQFKFVKESVLAYPELYFAKLVVLGEGDSEEIIIKQMIELKAESVDSSEISIVPLGGRHVNHFWRLLNDLEIPFITLLDLDRERDGGGWGRIKYAIQQLINIGHDKNVLLYTCEGISQDNEFKEMHTWDVTDTENMAKWIEMLKGYDVYFSAPLDIDFAMLQSFKDKYISALTSAEGPRIKDHGKIQDIVINEDAEDESLKAAYKDRIDSDIKSTLKQEGGDGSTYTEGEKELMIWYSYFFLGRGKPTTHLSLFSNNTDIDFESFPYCLKEFVNSIIEKMIDDSGGGRK

SEQ ID NO: 63299 - protein, 621 aa, Peptoclostridium difficile 70-100-2010
MKRNWVSKEDWSPAAGFRLEVEAMNTVINDKNTLVVAGPGAGKTELLAQRACFLLETNTCRYPKKILAISFKKDAAENLKERLELRCGKELASRFESKTYDAFAKEIVDRFRNSLDEAYRPLNNYNIAENRDVRRAFEIAGLNFRGNQTEFNKVYGNKLSINKLPLHTDFVDKIFIDAWNVLLKGNKDTNFVSSLTFGMISRLAEYLIRTNRYIKKAIEMTYSHVFLDEFQDTKSIQYDLVKACFFKTETIITAVGDGKQRIMLWAGARKSIFEDFQNDFLSQKRTLIMNHRSAPRLVEIQKAMYNSLNEEAIDLKTNEKWNYEDGEVYLRLFEDYIKEADILSEEIVELVETGIEINEICILVKQSVDIYSKEIINKLSERNIKARNEAMYQEILKEDIIKTLVSLFRLSLSDRNPDDWDYIYDILGELYGIDEGYNPKILNDFITKVELMINDLKVNLNITDEKQFSDLVDSKVEYISYEKFASKFQKYKSKDYFDDLVDKFKKLVWIEYNETKDWIKAIDNFEGKNSIPIMTIHKSKGLEYDTIFFVGLEDSAFWNFKNQPDEDRCAFFVALSRAKRRIDFTFSLDRPAGFSNSQKHYCINEFYELFDNTEIVKKIEY

SEQ ID NO: 63300 - protein, 600 aa, Halomonas boliviensis LC1
MYLSRIKIENFRNFSNLDVALDGNIVVVGENRVGKSNLLYAIRLIFDPSLPDSARQLGLDDFWDGLGEPDEDDKIVVAVEIKDFDDDLDILAEMTDFRLDDDPETVRLTYEFRPRGDLEGSPASEDEYEFVCYGGESDTKTFGHAQRRRITMEVLPALRDAEGDLATWRRSPLRPLIESAFRGVERNELEEIKDAVQAATARLGDFEAVKELEEKLGTRFAEMSGPKQDIKPRLGFGATEATRLYRNIRLLIDDGQRAINDASLGSANIVFLTLKSLELQRQMNENLRDHTLLAIEEPEAHLHPHLQRSVYRNLFEDIGGDDESTPLSILLTTHSPHIASVAPLRSLVLLKETADDGAVGHSTASISLSEADEEDLARYLDVTRAEMMFARGIILVEGDAEKFLLPVLAETIGHPLDHAGITVCSVAGTNFKPYAKFLTALDIPFSIVTDWDPVEGKNPLGMNRALKLIAAMEHERAGDEPVEVVNELKELAKNEDDFSDRCENFGVFTNTHTLEVDLFIDEDFTAEIIAVLREQKWSQERRNWIDGWEVDRDTLDVENYLKLIESVGKGRFAQRLASRIEGIEPPAYIKRAIEFVADRV

SEQ ID NO: 63301 - protein, 595 aa, Halomonas boliviensis LC1
MSERALYLQAAESLRRNPGQWAAYDSHGHCVVLAGPGSGKTKTLTVKLARLLAEDVQEPRGVACITYNNECARELESRLAALGIEPGGRVFIGTVHSFSLTQIVLPYAKVAGLGLPDEFSVATQSERARALERAYRSVIDGPDNPQTWDFRMGNYRRAILNRNSPQWRERDPVLAALVEAFEDELRAMGRIDFDDMPLLALRALRANEWLQRALLAKYPVLVVDEYQDLGRALHRMVLGLCFSAGMRLFAVGDPDQSIYGFNGARPDLLQQLSRRDDVETVHLRLNYRCGSRIVTGSRYALGEDRDYEAAEGANEGTIHFHPRTGNRDQQADDLFSSLLPDIRERLPDLRLSDIAILYPSAPIGDAVASAAQNYGLQTIRTDKNSLYPRSSRLMRWLEQCAEWCCGGWRTGTPRFRTLMNDGQRIFSESLTAEGDVLLFQRRLLKTLWERRDSTVLLHWWLNEMRREAIAELIEGCRTLQDEGETLGAFIDRAAPDGDCAEMTLGQFAGRSEGKNCISLSTLHSAKGREFVVVIMFGMNDGTIPWHNQSNQRLVEWRRLFYVGFTRAKQELHMMYAANMPSPFVKEVEERLNADG

SEQ ID NO: 63302 - protein, 750 aa, Pseudovibrio sp. FO-BEG1
MKIQSVEVYNFRKLHKAKLDFSSSQTLLVGANNSGKTSAMVALRCFLKDRGGITAKDVTASNWKRLEAIACSWMEEGVEPELHPLIAELPYMDVWLHVSDNEFHHVAHLIPTLEWKAGLLGVRIRLEPKTFADVFNEYREARKKSLDRLVEYAKTHADKVGDFSLWPKSLQDFLDRRMSSLFTLNAYLLDPDKPAVVQDGETTVLQPQVLPETAQGLGPNPFSGLFQIREIKAQRGFADASDAKPSRDDDTEDRSPTSKRKLSDQLQAYYRQHLDPDKDPTQEDVSALGAFHTAQKTFDERLQQGFSAAIGELETLGYPGIANPKMLISTRIKPTDGLNHPSAVQYDISGDSTPLRLPEDYNGLGFQNLISMVFLLMRFRDDWMLVGKHARSSTGLERELIAPLQLVLIEEPEAHLHAQVQQVFMRRAMSVLRNHELLKDDASPFSTQLVVSTHSSHIAHEVEFADLRYFKRKPAKPDCVATSDVANLSGLFGTDDETTRFAKRYLRTTHCDLFFADGAIMIEGAAERILLPHFISQAHKGLAERYISLLEIGGSHAHRLKPLVELLEIPTLIISDLDAVDPKNNRKSVLPSNGAAYETANSVLKSWLPKLTIVDDLLAADDVPELCVGGFGYTGVVYQRDQSVQCEDDTNTVNLIPSTFEDALVLANLDIVKKMSGVSMSNAFAKIASSSKTAEGLVEGLYQRLSQSPQKAAFALDLLSVENIDDLVAPPYIAKGLSWLEKRLNAGDAT

SEQ ID NO: 63303 - protein, 668 aa, Pseudovibrio sp. FO-BEG1
MSEEHIEIVDDNNRDNPADEAIRDALCLDKPQSFFLFAGAGSGKTRSLKSVLETLADIIGSDLRRRGRKIAVITYTNVACDEILRRVNSDPIFDVKTIHSFAWSLVEGRNHDIRKWLLEEKLPADLAKIEEKHAKGRAGKEHDKRKKQIASKKKRIEELPNIHHFTYNPNGDNVGRASLSHDEVIAMASSFLMSKETFQKIVLSKYPFILIDESQDTLKPFMLALLEFEKAHQSKLALGLFGDTMQRIYGHGLPDLVDRIPERWDKPAKVMNHRSRARIIDLANSIRADADKRSQRPRSDRAGGFVHVFIAPNEGTDREQFEADARLVMAEITSDEKWRVPSAVKTLTIERHMAAARLGFSGLFEPLDKVDSFQTSFRDGTLASMRLFSERILPVIEHNNSGDAFGLMAILRKHSPLLSKSSLSITQKGQLSGLGKARFAVKDLTALFVDDADPSCGDVLKSVAASGLFEIPEVLKSLSSLDFSPNAEFEPTNDDRVDAWAVALRARFSEVSKYRDYVLDLSPYGTHQGVKGLEFPRVMVIADDGLTRFKGLASYEKLLGARAKSDRDLKNEREGKETTFDRTRRLLYVTCTRAEESLAIVVYSDDPSSVADTMMSKGWVTSDEISKGDNLRKERATAFGRVLEANEKRRLEIHIEQTEMRTQKERPI

SEQ ID NO: 63304 - protein, 159 aa, Staphylococcus argenteus
MYMYISQLEITNFRNFKNTIFKFKQGVNTLIGENSSGKSNVLYALRLLLDENLPFNATKLLETDFNQNIDDWKGHWIILKLTFKDLDSSEAASFVAHHSKNIKNHEESIGTYALYFRPNKMIRKGLFDFTKQIKNLQKNNGDISEVKMAYPRMMIFSLE

SEQ ID NO: 63305 - protein, 439 aa, Staphylococcus argenteus
MAKSYHQHLLENNLIDFDLILYFSYYLITNYSQITKNLARFLKYFFIDEFQDTQDLQYAIVGEIIKASSGNCKIFLVGDPDQAIFSSLGGVVKTPSQISEYIGGYFVKELGLSKNYRSTQRLINLFSEFQSTGFVIEPGADHRDEEGIILFDKGIPKEDLVNRITEIIKEEIAKGVRPNDICILAPQWSFLTSIARKLRANLPGLDFDSPGLTLLPRNNDNFWFKLARLILISKDVSRYLVRVKWAKELLEELTAITSIHKEIDNDGCRKLLKKINSINVNNEDAIKYLEESFNYFFEILDFDYSSSDLLQEQWNSFFNGIKRRYENPDFNNIPKDINYMKKMFNSKDGIVVNTCQGVKGEEFHTVIAFGLLRGRLPHWNQIIGQPKSNEISESKKLLYVLCSRAKKNLYLFAETGRKTTKGGNYKVNNELNEVDFKKL

SEQ ID NO: 63306 - protein, 687 aa, Staphylococcus aureus subsp. aureus M013
MYISSVKIKNFRNFDNIDIDFHEGVNVLIGHNNSGKSNLLRALSLIFDGSVRKQLSVEDFNNSLTKESLKKEAPKIVISVHITQSENERLMSDELITVSNWLTKLEEPYEARIQYEFFLPKDEEKNYIDLVKNIDEKEEIWNLIRSQFIRLYVNKIWVGNPEHQIPIDNDSLNKFDFQFLDAIRDVERDMFSGKNTLLKSVIDFFIDYDIKSDETITEEEQKEKLEERRKEFSDNSSDLIETIHKRLDSGNQKILSYTNGIGASYDKSTPDFKGNLTESEIYTVLQLIIKHETGMTLPITHNGLGYNNLIFMALLLSKMQADSDGNFLGSNAKVFPILAIEEPEAHLHPTMQNEFIKFLKNNIREKKVKQIFITTHSTHISSSTNIDDIICLYTDDSKTNVSYPGKVFDKNNQSKKYVQRFLDATKSNMLFAEKVIFVEGIAEQLLLHIFADYLNKPLEKNHVAVINVGGRYFNHFLSLFDSNNKYAINRKVSCITDLDPMRKEKNENGQKNNFKACYPFEYEMDLDKFDYSTNNSLDKYLNNEHSNIRVFVQPNKYGKTFEYQLMFDNPSLKLLLTDSISNSQELAELMDHYEENESLQKLIDTLSPSNENQRIIKSLKDTNDSWNEDNKKKALIASRYLNSIGKGENALELASVLKDNLELKGQSDYEDFVVPKYIEGAIRWVCE

SEQ ID NO: 63307 - protein, 582 aa, Staphylococcus aureus subsp. aureus M013
MIINAQTKLNIEQDFKIQAGPGAGKTEFLVNHIKNVIQTSEKLERMKKIACITYTNTAAQTVLQRLGKSVSNRVDISTIHSFLYRNVVKPYCSFLPKEYGICVQKLKGHSDPIVINKYVNAWLKTEYFTKLKPPSNRNQLLKMPVLKKALQNWLLSMKLSYENNDVQFICDNTKAQAIDKKSKKRMGINKSNLNILEKQLLNYKKIYWEKGIIDHDDVLFFSYVLIRDYPFILTILCAKYPYFFIDEFQDTSQLQDFIIDKIRQKGCIVGVIGDKAQAIYSFQGARVSLFEKFKVDLINSHTILENHRSSYQIVTFLNSIREDITQTVYSGIENDKVTILIGNRIRSYTKVVNICNKESLVTLSRDNITSNAMRIKLEGNNFDKKLLEKFQEIDSNSKRRNTIISLIKAIELAKNTKYKDALKIVESIYKDENNPKKIALNSLINMINKYDKYGNGTLMNFYNTLCKTLDIKLSGFRKGQVKDFYENTLYKNMVICTNIVEDTSNHITIHKAKGAEFENVFVIGNKDTLSLLLKPDLMNDEEHRIFYVAMSRAKKKLFLQFDYLDNNEQKKIKERYDVSIIQ

SEQ ID NO: 63308 - protein, 647 aa, Actinoplanes sp. SE50/110
MKIVALRLSNFQSFGPEPTTIDLDDLTYILGPNGSGKTAALEALSRLFSPLAAQRQIQPEDFHVPVDRSASEVQDAQPTLWLEVDVLCPEAGAGGTHASVPPFFAHMRIDTADGIPQIRVRLTAQLAADGVIDEKIEYVLQADAAGVPTSCTQMSRFDRAQIEVYYLPARRDPVDHIAYTAASLIGRSLRAADWTSEREVLGDLSAQITDTLVANAAVAGIGVHLTKQWQNLHSGGYFRDPSIAFGRGDLEGVLRQLTVTFSPSHGGASLPFDRLSDGQKSLLYISLVLSWQSLVRRVLRGEETSLDPDRLRPPVHVVIEIEEPENSLAPQYLGRIIRQVRGACSAGDVQALIATHAPALLRRVDPDTIRFLRLDAARRTTVERIVVPADDVLAAKYVREAVQAYPELYFSRLVVLGEGDSEQVVLPRVLAAAGIAEDDASVSVVPLGGRHVNHFWRLLNQLHIPHVTLLDLDSGRYHGGWGRVRNAMRQLNAVQPDTFAEAQIDQLPKWDDDCDFPQPGCGPDIGGGLGPIDVLEQHGVFFSQPVDLDLMMLAAYPTAYAVDPPAKPDPQTVVAVLGKSHKNEIRLRSEVLDLFDEYHRKFDLGSKPATHLSALASLDDQHLLKESPMVLTRMVEHVRAVLGGLPE

SEQ ID NO: 63309 - protein, 553 aa, Actinoplanes sp. SE50/110
MIRPEHWRPADGLTLEPNALKAATAADLNAVVAAGPGAGKTELLAQRADFLLRTGQCPYPRRILAVSFKVDAARNLAERVRRRCGPTLADRFDSFTFHAFAKRLVDNFRPTLTGANALDSDYRIDRQDRIASKQITFEDLVPLGLEIVQANIYARRGLDQTYSHVFLDEFQDCTADQYELIKAVFGPSTAIVTAVGDTKQRIMLWAGALDGVLETFADDFSAVRLPLYQNFRSAPRLRRMQNRMIAQMDPSAVSPAEDLVGDDGVIDVLGFSDEYQESRTVGDLLSGWLGQGVPPAEIAVLVRNQPHLVASVLGDELRARGIAFRNEQESQDLTAEPIAALVLNFLRVVADDRQPHAYADLMRIVARTNASDDEVARFDSQVKRIITTARIAVRASTFTPDDSAGWRNLVIGFLRLVSRPVLTALSASYQQGNRLDDLIVQTMAAFERELAVDGNAVLALRRLSEADAVRVLTIHKCKGLEFEKVVVLGVETQLFWSKDLTTIMSEFFVAISRAKLHLVLTHVEHRGRPSAATRRWDERRSSHQTLLGFAAED

SEQ ID NO: 63310 - protein, 554 aa, Azospirillum brasilense Sp245
MLKSLIKVDFLNAQRHLADPSTVSGDRSEDLSKRLSRFYQRHLDQRQDDHQALKALFESEVGLDKHLAEVFKDTLKRLKHLGYPGLNNPTLEIKSALNPASIMAQDARVHYIVGEGAQKVVLPDTYNGLGFKNLIYMVIEVLDLQERWKAEEEARAPLHIIFIEEPEAHLHAQLQQVFIRNILDLLVIPDEAGGSFSSQAVITTHSPHILYERGFQPIRYFRRDLIGSDQVTEVLNLSAFYAQETEHRDFLQRYLKLTHCDLFFADAAVLVEGNVERLLLPIMISKAATSLRSSCICILEVGGAFGHIFKSLIEFLRIVTLIITDVDSVTLLPADHDGDDDDNDEIEVEVETLEVEAVDDYELLLVGDAPPAPAGEAAAPAPARRYGKKCLPVAGAVTSNQTLVKWLPAKQLIDDLFAATEQEKETPADGTIRVRVAYQTPVPIIWKGHHAKLAGRTLEEAFGLENAEWCQSAEQRKLGLRLHGALADPAALAAGLHKRVSGDKFDKTKFALGVLTARPEEWQVPAYIRDGLIWLKAQVDLEVEAEMEGASVDE

SEQ ID NO: 63311 - protein, 614 aa, Azospirillum brasilense Sp245
MVAGAGSGKTTSLIKGLASIIAIHGERLRLRRQRVACITYTEIAAGEIWADVGNNPLVHVSTIHSFLWSVARSFQPDIATWVANRIGERIGELQHAAANFGPRVQQKTREKNAHDIVRYEQQREAITRVRTFTYGTGSDYAKGILGHDDIIKMASQLMIHRPLFRTLVAQQFPFVFVDESQDTFPVVVEALMAVQQQEQARFCLGFFGDPMQRIYPTGIGTVPKPDGWRAIPKPENFRSPTTVLNLANAIRRDGDDLVQVGGRKKKNGEEEVPVVGTARLFVLPTDAHRDERVAQVRAWVANANNDEMWQPAAENDPVKMLVIVHRMAAKRLGFGDLYGALNDKAPDAFKNGFLDGTAWPLRPLISFLLPIAEAARGGRDFDTMRLLRLHSPLLLKANLQGVNVAERLDQLQTVSNQLGELMGPKSQATIRDVLMLAKECRLVAFDPRLSAYLEDIAANEPEIEENEDGEAEEEDPSIEISSMAAFLACPANQLRPYQAYVNQESPFSTQQGVKGAEFDRVLVVLDDDEGTHVQFSYEKYFGLKQLSARDKKTLEEGGETSVERTRRLFYVCCTRARQDLVVVLFVADPAAAIAHIRGLGLFPEADILSQDALA

SEQ ID NO: 63312 - protein, 762 aa, Azospirillum brasilense Sp245
MKDVRIDLASDISIFVGANNSGKTSATHALQLFAAASRDRFSIHDFSVDCWDAINAFGDGVDGASLPSISLDIWFNVKANDLHRVVDLLPNLAWQGNFVGLRVEFAATAPDTLRTNFQKARERARENIRPGVNGGADYHPTPRIPCHYLGDGKSDRFRREFELRYYVLDRAHFDDDLCAKAGYAPLRVTPDKGQTGRDILAGLVKIDVLHAQRHLSDSAGGSRSEDLSRCLSRFYDRNLEKRGEDYEAQRALADSEAMLNDHLGRVFGPTLQRLAVLGYPGLNNPSLLIRTALNPATIMSSHEGARVHYALGPVNPRRDPLTLPDRYNGLGFKNLIYMVVELLDFHTRWRDIEENRPPVHLIFIEEPEAHLHAQLQQVFIRKVFDILVLEEEEAKHYTTQIVVSTHSPHILYERGFRPIRYFRRTSGPALQTSDVLNLSNFYQNTANPTRDFLERYLKLTHCDLFFADAAILVEGNVERLLLPQMIAKAAHRLQSACLSILEIGGAFGHRFRPLIEFLGITTLIVTDIDSVLPPQANKDNASPGEGAAPLAEGDASSAEEADASQTEDEAPEATDDDDSAAGSACMVHIDGALTSNQTLVQWLPGQKTIVELLAADKATCTQLPKANGDALVRVTYQTRVEVTWSGRTVAIAGRTLEEAFALENLAWCQAKERADLKLRVRGAAKLSLEEMAERLHRKISKSSFHKTDFALALLSHDPSAWNVPHYISVGLSWLEQQVMPPPAESVPELAPKLENLEQAGTA

SEQ ID NO: 63313 - protein, 329 aa, Azospirillum brasilense Sp245
MFLLPADDHRSERIAQVRQWLSRENNDPHWENDAREADVRVLVIVHRMAAMRMGFPGLYAALHDKAPSSLKDGLEDGSTWPLRPFLTYLLPLALAVRVGDHFEVMSLLRTHCPLLTADGIAGREVGEVLLQLKAATIQLSALFDAPTTTIRHILDHAITTELLRLDDRYTPYFADPDRGPDADDPESGPVTAFLACGAKELWGYRHYIEDMSPFATQQGVKGAEFDRVLVLIDDDEGRGQNQFSYGKYFGITPLSERDTENLAKGEDSVLERTRRLFYVCSSRATRDLAVVMFLPNVEAARSQIEAKGLFRPEDIYDDRSLVEHPAAAG

SEQ ID NO: 63314 - protein, 635 aa, Pseudomonas stutzeri ATCC 14405 = CCUG 16156
MFLRALEIDGFKCFNAGFSIEFHNGLNVLVGENGAGKTGVVSAIRQLFNDSESGKRSIHERDFYRGFEADAVPTETMRIAATFSDLNQEESTAFIDWCGKDPEAKLNFDAINRESRGRYRHQILGGHQRVKPVDPETLDLIHCIYLPPLRDAEIKLREGRQSRLARLLKALCRKELDACRKEGTAHPLEQYVGDFNKELSESDKYAIKQANKRIGDNLKQALGMNLSQGTLIQFSEVNFSKIVEGLRLLYYPDLSEAAATQFRSLEENSLGYNNLLYIASILAELILEADEDRGEDTYLRLLLIEEPEAHLHPQLQIRLLKHLKTVAEKQGIQVIVTTHSTVISSAVSVENIIHLSRKDAPVAVPLRSCGLSDPSRKFIDRWLDVTKSNLLFSRGVILVEGIAEAIVVPELARIVLKENGEGRNTLEDFGVSVINLNGIYFKHFMQLFCDVDGEPKSLNIPVRCAGLTDNDPPKSVETVEDAEGKKTAVPYLPHADSFMAGENHALKLVPLIAESEHGRLFAGSYKTFEYDLALEGNNLARMFKAASSYWPTQGPVKKGLHARSELKFAEMGNQERANYAWELLERIDSDDMGKGLYAQILADELAANQEGEFLVPNYIRDAVLWACELTLEKHE

SEQ ID NO: 63315 - protein, 582 aa, Pseudomonas stutzeri ATCC 14405 = CCUG 16156
MTPLTPEQRAYIRASLSEHVYLRACPGSGKTEVVAAMIANASRVWQRSPSGIAVLTFSNSATDELKDRLHEHLGEALPHPHRVSTFDSFLLNHVVGNIATHLTGYPGRDGDYRIRLLDKSSNIYLTRTKIGERRISACKYDYDIVTRRFEFTTGDLTEVKLNAVEQSPEMIDDLTETKRRFWRGGFATYRDIDMLALKALRDAAFEGYFAKVVRRFPIVVIDECQDLSAEQLSIVRQLARRGMKFHFVGDLNQSIYGFRKSDPARVRILLEELNFTEYALTANWRSGQAIVDLCSDLLRVARSAGNPGIEPLKPLLIQYQECPSELTPKITELTHAYQNVVVVARGYTTLQRFTRGTSELAAIEELALSCVLIESQNLEEVRQALKLFAEWLASKLSFDVSPGSLSCPIQVESNLEWRQFIFQCLKFLSSCGASNLELTWKEWAAQTKRVIQSLPDQLFVPRAIVPLLEGLRGMSLSAPAGKGADALAKQLLQVGQQSISNHRVATIHQVKGESHDATVLLSSLKAGSQGNWKDWLQDPLSEAARFAYVASSRPRHLLIWGVKALKPDERDRIAGLGFEIVD

SEQ ID NO: 63316 - protein, 707 aa, Pseudoalteromonas arctica A 37-1-2
MYISKININNFRNFSNSTFEFTEGTNVIIGHNNAGKTNLIKAIQLVLDSRKSKSKLTVDDFCKQYSDFSTPPEITISITLSEQTDEPADDKVVVYDWITGFNPKYEAQLTFSFFLPQGDDYDDYCNQIEHFKIGGNYESEKVWRFIKKYFFSKYVARVYGGDIDKKESADYEMLQKFDFQFLDAIRDAEKQMFFGNNTILKEVLNYFLDFDITDGKKLKDLPTQIKDKLRDKENNFEDDSNKLFNQLKTRISKNEILKYAKETGASKGGIPDLDAHLNEDDLLFALRLIIEIDGMKIPISNNGLGYNNLLYTALVLAKMQIESQSSYYGENAKVFPILAIEEPEAHLHPSMQFKFLKFLSQNINSKGKVRQLFVTTHSTHITSAAELDDVICLYKGINGNTKVGYPGKAFGKDEDSKNYVKRFLNATKSNMLFADKVILVEGLAEQLLLPCLAAYECYDAKNKITNEDELINQHVCTVSVDSRTFSHFLRLFSYDETNKNAIEKLVVCITDADPESKGNDGKWRGCFPFELKDSDKFNALASHVKSLKNDFEKPYRNISIFHPEEKKGKTLEHEFIRYNPGSELVITKSFPSQNSPHTIEHFKALQKVFNDNNEDFLGIISAYEKTLTTDKQKEKFEKLKTSINVCTFSNKDKSIAVLSAIYYNIVKSLKGEHALYLEECLRKDLDESVPEFIIPTYVKDALKKILG

SEQ ID NO: 63317 - protein, 190 aa, Pseudoalteromonas arctica A 37-1-2
MDTIKELPKVLSDINVPFKISAGPGAGKTTWLVEHVKNVLENSDKLNKTQKVACITYTRIGADTVNKKIKNFTDTNRLDIGTIHSFLYRNVIKPFVYLIEEDSDKNKLFNIHELTGHVEHRPSYDRISSWIHSIGSRYSYLYDQKKSDENGQTNLDKTRTILKNFEWQFSGNKLEGKLSKVYFSDLRFPS

SEQ ID NO: 63318 - protein, 687 aa, Bacillus sp. 7_6_55CFAA_CT2
MYISELTISNFRSFNKKTTLNFNDGINVIIGQNNAGKTTVIKALDILFNNSSSKRLNINDFNRSASIEELKVCPPKIYISAKLQESENEGEYSDELVTVATWLTTLNKPYEATITYEYFLPEKEVAEYTNLMKKISIEDINHYWKAIEHNFLKKYVHRVYVGNPEFKNSVQNDEINRFDFQFLTAIRDVERDLFKGNNSLLREVIDFFMDYDIKSNSELEKKEKIEQIQKKKRDFSVESKKIIESLQQRMRNGEEQILKYVNNTGAGIDESKPSFDGEILDTELYSALRLIVEKESGIKLPAISNGLGYNNLIYISLLLSKMQKDASGEYLGSNAKVFSILAIEEPEAHLHPSMQYKFLQFLKENKDSDVNQIFITSHSPNITAAVDLEDILVIQKINEEIKIAYPSKVFNDSNEEDIISRNYVKRFLDVTKADLFFAQNVILVEGIAEQLVLPEFAASMDLNLADSHTTILNIGGRYFNHFLKLFDTNRCKFALTKKVACITDLDPVRKLKDAADEDSNWKKCLPIFLNLQPEDYEYKKTSNSLVGTYSHSDSKIKVFTQTHGQSSTFEYDLILKNPSCEKLVTPSVSNAQEIKELMDLVARDKPIKEVVARIRKNAFKDELLNLLTLGLLKDELSVKKGIIASRYLLSISKGEAAQEIAYVISTAEQGLIEPPDYISEAIKWICQ

SEQ ID NO: 63319 - protein, 441 aa, Bacillus sp. 7_6_55CFAA_CT2
MKLCEALNKLQWVLDDEIPTLKFLNAYDGKIEGYFLKKSAYYKYKQLYWSEGKLSHDDVLYFAYKILQENIRIIDIIRAKFPYILIDEFQDTSPLQTAIIELIGQKEVNIGVIGDLCQSIYSFQGANVESFEMFSIENMKLYILKDNHRSSNEIINVLNHMRKNKDFEQSSPTHKSGNLPTILVGSKKSAYHYLNDKSINPVVLSYKSENSKSVEYETDLIEDMDFNIILQDSNNERGWRIFHIIQSIELAKQFQLKEALRLMKIAYRKDEPFTDKEAFVNLKRFLNMYNEFETKSITYFHNELIVGQYNVKGRISRGAAKTLYDGLTYRKVALQMKILDDLSDFKTIHQSKGDEFENILVIIPPQKQGTELNFLLSPNMNIEVHRVYYVALSRAISGLYINVESLKEQEKAALIEIGFEVIQVDQSNELNITTKELVKSL

SEQ ID NO: 63320 - protein, 769 aa, Citrobacter freundii 4_7_47CFAA
MHLSKLAVRNFRRLHDVVIDLASDISIFVGANNSGKTSVGHALQLFTGSGRFSIHDFSAVLWPDIVAFGEGAVEVSLPSMEVDLWFEVNSDDIHRVIDLLPSLSWQGSLVGIRVSYSPKNPLETRARYAEMRHRMLEAVARDGNGELIFDPSPHNLKEFLQDRLNEEYELRHFVLDPARYGVNMIAEENYNPLPLDGRDRSGREILNSLLRIDCLNAQRHLSDSPGGARSEELSRVLSRFYSRNLEQQSDDHQALSALAESETSFNRHLERVFEPTLRSLSQLGYPGLTNPRMVIRSALDPAQIMGGRNGAMVHYALGADDGNPNPPTLPDRYNGLGFKNLIFMVVELLDLHAQWIAIEDNRPPVHLIFIEEPEAHLHAQLQQAFIRKVMDILAVTGEEQVHYTNQVVVTSHSTHILYERGFRPIRYFRRSRSSDVSASEVLNMSIFYDNADPEVRDFLERYLRLTHCDLFFADAAVLVEGNVERLLMPQMIANAAPRLASSYLTVLEIGGAFGYRFRALIEFLGLTTLVITDLDSVYGPQEQREVVDTQPDILEVTAANDDDTELDDDEEDDQTDIALRPGKACIAGYPGAITSNQTLRQWLPRCATVSELWEAQSDQKIQRRNSNTDALVRVAYQCPKDVIWGQETMELTGRTLEEAFALENLEWCQHVNRKPLKLRIPRANGMDLLTLAMRIHKRVQAKSFGKTDFALALLSEDPNSWVVPSYIAEGLRWLETEIVSAEQNNGVEDGATQIGEVSVSAVTENEGVA

SEQ ID NO: 63321 - protein, 625 aa, Citrobacter freundii 4_7_47CFAA
MTSRIGSPDTQADLDVRSCLEQIPPCSFVMVAGAGSGKTTSLIKALAYLAKIRGQEFRRAGQKIACITYTEVAVSEISEDVGDSSIFHISTIHSFLWSIIRPFHLDIKGWVASRIDEKIADKQEHYNRPRVRAQTKTRLEEEIAGLEVQKAQLDEVDKFVYGTGSNYAKGILGHDDILKLTPTCIETSPLLRQLVSKRFPFIFVDESQDTNPSVVNALRHIARECSGMCVGFFGDPMQKIYMGGTGAVFLDEGWAEIRKPENFRCPTSVLTVINAIRAQGDGLEQIRGRTSFINGSEQLVAGSVNLFILPSDSERNSRLMAVRQYLARENNDNQWLSDVREGDVRLLVLVHRMAADRLGFPNLFSALTDRAPMSLSEGVGDGTAWPLRTFVQNILPLVKAASEGDEFSVMSILRNECPKLESLRIQGQPMGPVLTVLKQALDELVSLLSSDSHASIRDILSHINDTELLRLDERFGIHLVPNPVNDGSKAFENIQAFLQCDCNELWAYQRYFTEESPFATHHGVKGAQFERVLVVIDDEEARYHQYSYGKYFNYIPLSESDEERIAAGEESVIERTRRLFYVCCSRATKDLAVVVFVPDVVRAREAIIEHNIFTETSIRGVEHLM

SEQ ID NO: 63322 - protein, 729 aa, Enterococcus faecium E4453; identical to SEQ ID NO: 62500

SEQ ID NO: 63323 - protein, 582 aa, Enterococcus faecium E4453
MTNIFEKIVNDLNLEQKDVVESEDNLYVNACPGSGKTRVLTRKIAYQAIKHDGSLKRIIAITYTNRAAEEIKERLSLLSIDDDINIWVGTIHQFCLEFIIYPFKMNLSRVSKGFTIIDDYTQRAYVSQINNMLNLNLKTYELNKIDLSLSHDFKINEVQYTQVSEMYHTMLEKNKEIDFDMILLVAYKILTVNSNVARNIASNIRAIYVDEFQDTRELQYNVIAKLLQNNPQIQSMFVGDIDQAIYGSLDGIAKSVEELEMLTSHTFQSKTLHGCYRSNQRLVDFYSNFQSCPYEIESRGNNKNDRGFISYDCKVTKEDLPNIIKNIIKEKIESGIHEKDICVLAPQHYPLFSLGEYLKKELPYCNFDAINISPIKVNNHSLFFKLAILYFTESGEKVRRRKLIANDILIILKNEFGIEVKDYFIDLDLLQLINSVKRMYSGDDNGVDLYKFVTKHIFVNLNIDEKNYPSIFKHYLFFINEVEDRIKNNSLSSSVSSFKKMFKSRDGITLTTAHKVKGNEYDTVIAINLLNGKIPHWNEIFNVSDKGISSARKLLYVICSRAKNNLFLFSEVGYFTSKGDLL

SEQ ID NO: 63324 - protein, 664 aa, Bacillus cereus F837/76; identical to SEQ ID NO: 62892

SEQ ID NO: 63325 - protein, 641 aa, Bacillus cereus F837/76
MNDKVLEQDWKTSNNVKLEDSALLAIRASNHVAIAAGPGAGKTELLAHKTGYLIQTGICPNPKKILAISFKTDAARNLQERVKLRYGKNVENRFESKTFDAFAKGILDQFIYALPKDYQPKRDYEIILNEKSLNDIIKGYITKFNPYHPNWQHEYHLNKVLGTMKETELPIVVFESDLYSWINERLWVVLLNGKGDLTSSLTFSMISILVEYLLKENPLIVKALQATYSHVFLDEFQDTTYNQYSLLKTIFLNSDTVITAVGDNKQRIMGWAGALHNAFGIFESDFNATQHTLFNNFRSAPNLVSIQNIFAKSLNDTPIEVLPVGEWNENDGVCEVWNFKNHNTEAILLASYISEWMKTENLKPRDFCILVKQQEHIYAAEIMKELSKINIKSRIEKDYQDLLSEEIVLLIIRILQLSYEEKSPELWMSVIDEIIDIKYRDVDPEKIKYLSIENELVKMLDEVRNRYSDIDVTNFNSQFTEILQEIVVFLGEDRIKATYPKYNQASYFNEVIQKMLDKLKYQNRISMKELLQEFCGEFSIPIMTIHKSKGLEYHTVIFIGVEDAAFWSFSTQKEADKNAFFVALSRAKQKMIFTVSKKRNILKFGKEKNVTQETENVSELIQTLMDAGVPLIEESDLEKVL

SEQ ID NO: 63326 - protein, 178 aa, Yokenella regensburgei ATCC 43003
DDVDDVDDVDESDKIVEQISVLSEDLITTNATLRHFYRNRKVAALKDYYVKDNLMVVFQKDGIGIPTECPQKTYYATSFEEALILKNYNNDLLLDVLLKVIKKEIIKTLGSPRNVCNIAHNSRQLQKQLARKKSEFSNNLIFSLVTTEQHKPELPDYILKGLEWLTLKLKRDGVIYEI

SEQ ID NO: 63327 - protein, 678 aa, Yokenella regensburgei ATCC 43003
MKFELDQQQVEVEKNVEIELFKLIEKSESFYFISGAGSGKTHALITSVNKFINDNYTQLILNGQKLLCITYTNNAADEIKHRLGDNDLVITSTIHSYIWDLVKFHMDLLLDEHVIFLNEEIERIYSEIYELQTDSATLLKVRSLKEPQLDAIIDYILVDKNDFYESLKSASKFWTYLKGITDEEVFKHLKGNYQKLSTVFKKLVKSQEFKRCICNIEKKEEQYTTIKYFNTKNIEVLYKNIIGHNTLLIYASRLIQKYTLLSKCIIDAHPLIFIDEYQDTDENVINLFLSVDNIAKGGNKKMCLGFFGDPMQTIYKHSMHKESHSLKKLVKNINRRSHQDIVECINKIRGDNQDVKQKPIKIYAEQCCPSLIIESEKNYTNNYLSSIIQRHKSEWSINENSKLACLVLKNEMLSQLLGFEGLFSTMLDIYQTEHAKGFEMIGSEFLFREIRYAGYLPSILHDLLMPLYLLKRKANFSVSDFFNMKPISNHNLSDVLDSIKIIESLKVKCLSDFVHEISEIYVGQEAEIQSLISYNFHLVIDGLESAKEKIIDKCRFKDTEKIPQLLDELFNIDMEQFFLWLDFIYQTYPENLVSYLTCHASKGLEFDNVIIFLSDSFNRKEGYFSNLLNSDINSILEPQLESARRLLYVSSSRAVKNLKIYLFTNKEIDKSKVDYLFT

SEQ ID NO: 63328 - protein, 729 aa, Staphylococcus aureus subsp. aureus 21178; identical to SEQ ID NO: 62500

SEQ ID NO: 63329 - protein, 597 aa, Staphylococcus aureus subsp. aureus 21178; identical to SEQ ID NO: 62501

SEQ ID NO: 63330 - protein, 729 aa, Staphylococcus aureus subsp. aureus 21209; identical to SEQ ID NO: 62500

SEQ ID NO: 63331 - protein, 597 aa, Staphylococcus aureus subsp. aureus 21209; identical to SEQ ID NO: 62501

SEQ ID NO: 63332 - protein, 587 aa, Actinomyces sp. oral taxon 849 str. F0330
MKIDSIHIKGFRNFIDCEVEFGKHTLIVGENDIGKSNLLHALRILFDPSFSSRDFELDESDFNITSECSEVVITAKIIDVSEDCLVSIFKEARSDDGTVYVRFQLKKGEEYIFLTGPETETLEETASRYYIQHLQMEYVASTRDLSNFLKRQQNRLLDIARVQRTDEEEQEDQTALTSIQEKFDELNNKINELHYVSDSLNVVNERMTALSALNAEQQIQLVAGNTDAGELVDNLKLAYLSGEAPLTFGGDGRRNQLYFATWLSKQELASSNQREKVVFFAVEEPEAHLHPQQQRRLSEYLSSNLDEQILMTTHSSQILARFTDGKIVRLAKDISHKNTKALSYSTKVDEALNKFGYRMNSITSEVFFSRGVLLVEGSSEVMFYTALSGALGINLDQLNLSVISVDGVGFKKYLDVCISLEIPVTIRTDNDIFRVYGNNGCMRYRYAGVERAVDLLEILLGDSISEDTRSTIEQYKHSLVWEGEFPTEQNSKAAECLKMLAEEHGIYLALKDLENDLSSGPLRDQLAGHYGRHEEKKIVEQMQKRKAERMYDFLKTEPDLTLLASNPISAPLRALAGRNINVAGTDR

SEQ ID NO: 63333 - protein, 448 aa, Actinomyces sp. oral taxon 849 str. F0330
MSLAPTDEQLVAIEYPYNKAITARPGSGKTFTLAQMIVKDSKDLLSYQGIIAISYTRKASAELKGRCIRYGAIRNRSFYGTIDSFCINEIVAPFLSRFLKRSVDLKIIDSVNSNKFDERTKDEKVIEALKTGKLPINMLCSAAVLILDRVEAAKLYVKARYKSVYVDEYQDCGSSQHRLIMWLASMGLKTVVVGDLDQAIFGWANKSPEYLSNLISSTDFRHFALTRNHRCHPSIINYSLRLIGHTDNLLTTDELRVIRARIMPLNSPHSRNLVGTDESSIAQAIERFLPNIKNKYKVQKYSDFAILARSNATLVRFQEALTVPSKRHADSVLDRGISKWRRVFIMLLEMYFSPNRFVDSFLDDYSNLYSKPSTRAKTKLLVLKYLSLAPGKLCEETSLAVEIAKRCEPRGFNGEDIEAYQKVVSDSSVTAMYYRAPEGQRSQPINIS

SEQ ID NO: 63334 - protein, 665 aa, Bradyrhizobium sp. ORS 375
MRLERICIRNFRLLRRFSIDLARNKTTTVLVGPNNSGKTSVMEALQLFVGAGGEPRRRFSIHDFAHVRRKDFAHIESKLTAIGSEEDAIKLLRRFAPSIRMELKFRYADETADLVVANELLMSLEVTSDVIAVRIEYAIDNARGLWVDFKARTDKTQTLFEFLAGNLQLYYKVKTYKISEDGSKAQALDSNEVLNRLIKIDTISAQRHLDDEEATGAAKLSRLLHDHYNRYYKVEHAEGAKDIEDAIKSSSETLTGKYVGAFGRLTGRLKTFGYPQGHASPDLLIKAEMTAEKIYRDSTRIYYASEHTSIGGVVTKYELPEKYNGLGYKNLIFIVLQLESFRAALESMPKDKPRVHIIALEEPEAHLHPQMQSVFIREISRALEHTDGVTAQVILSTHSSHMVSGSDFDPIRYFKRKGHEVSVKDLSALPLGKDDGTVLNFLRRYMKSTHCELFFADKAIFVEGQVERLLLPLMIEKFASKKAGSFLASQYISISEVGGAYAHIFKPLIDFLGVPTLLITDLDSVDDDGKKCPVADGKSTSNAALKSWLPGKSVLTDLMSCDAPAKTEGRVQVSYQVEENGSCGRSFEEAFVYANVDWLKSNHTSLLASGKLFDEVATKDLVASAYQLCARLPKVDFALDLVAHGGWDIPKYISDGLEWLAQQGS

SEQ ID NO: 63335 - protein, 562 aa, Bradyrhizobium sp. ORS 375
MKTTEADEKIERCVEERKSFLLDAGAGSGKTASLIRTLNQIRGSQRRRLVANSQNVACITFTNVAKNEIIERTEGDDLFKVSTIHDFLWNSIKPFQNELKVAVELVNERLPAKSKRRKDPAELKAALAEVQGISYSDRGGNFLEGRIFHDDLLEVAQVMFKTYPMLSRLVAAKYPYIFVDEYQDTNEKVISSLLDCILVTKSPPVIGFFGDKMQSIYSDGVGELSEGYLAKLELIQKEENFRCATTVIDVLNGIRSDIKQKPAGQNPVGSAIYLNLHRANADEVVDVAKALVREKFSWQFADRDLRVLFLTHRLIARKAGYENLFAAYNQRGGFSQEQFQTGEDANGKFLCNEIDGLVTAWKSDDAGTVISLLHRNQRVVASKKDKKRVKEALDKLAALVVANASIGDVLKYVRDVDLLPLIDQLNYWLNPEVCGNIANDPESERDRTFFKALFSVPFREISAYRAVLERNLPYSTKHGVKGDEFDTVMVVLDDVGANWSQYSFGNLLAGSDLSEARLQRTRNLFYVSCSRARRNLAVVDLAAPGASISKIQKLFGKDNCVF

SEQ ID NO: 63336 - protein, 732 aa, Pseudoalteromonas sp. BSi20652
MYLQSLQITNFRKFGTKNNIIEFVQSDYKKATESKPDESTSQSFVACATTLIIGKNNAGKTTVTKALKQVIDNDNILGASFNLSYLNGLFDKYKKVLFGLNKDNFLDFRKDEFNKVELPNMKFRLKVGLDTDPKSTSTQNLSNLISIEDNTINKLITLEVKFIIAESEQYKERVYKTFCSAAKREHEVKFSEFLRIIDNTNFSRQIYDIKGRLIKNSLFNINNLFELTTIKANLDDGETSLSSVFNKIVQYRLKDEEGDSRVRLENEILNINDFMDRHIGESHNDIVNNVVSQITDQQNMLVHLRSSLDFKSLFNKLIRYEFEENNNYIPENQFGLGYSNLMKILGQIIDYVEQYEESEAHDKVNIICIEEPENFMHPQMQELFIKNIDDALNLLLGNHNSKNINSQLIITTHSSHIVNSKIHSSNTFNNINYITTDEDNFSNVVTLNDKKITDKIAPESTEEATAKDELKFLKKHIKYKVSELFFSDAIVLVEGVTEEHLIQHYLSESKNLQKYGISIFNINGAFAHIYKPLIDLLKIPCLVITDLDIKRSKADKENFKQIDKLDNRETTNAVLQKYVCIEKLPDEEPSDEDESKSIILPSDSPYYCIDNFMIVFQKDAINGFVASSFEEAYILTNYEHKTLNKTLKELKPRIYKRIVGASGLENTNQSKEKSFEWQCKLASSKSDFANTLLYEIITSNINAPQLPKYIEDGLDWLTKKLNNDKSLQNKGV

SEQ ID NO: 63337 - protein, 669 aa, Pseudoalteromonas sp. BSi20652
MLKIKENPEKLIEEMKVQELLNNAIDNNKSFVFNAGAGSGKTYALIESLKYIVKHYGEKLSNQNKHVLCITFTNAAADNIKSKFGNSDIVKVSTIHERVWELIHLQQDALLIEHEIKINKKLVTLKESFENSPDEEWLNSGDKERFNGYFLLDEAKNTFYNSTNHTTDFGSILEDFGYTLNRNLGKFKKAVKYLHDTDKIQKCLNRIKSGENKEVRYNPNFNSDRLHYMLISHNTLLEYGLELCKKYPTLRRIIVDSYPYVLIDEYQDTHKHVIQFMYELIKDTELSHKFLLGYYGDVMQSIYSEGISNSLNEYHPNLLKIEKKYNRRSRNEIINISNKLRNDEISQESIYENNDGGSFSFHKLISERPNDSSILVKRFIESELSSLNEDVVHCLVLKNEMLAELSGFKNLFNCFKAFFFFNEQAQKVLSRDLTKLDTSIRTILALIEFRELIAKPQKTLEDILPKEKNPVSMFDAHNYLNELNILIDEKINTFEDYLVALFQLYDSGSYLFKCKLKDFFPSDDFGYSLEGFKQLLNNDLPKSDSIKEENRINQINIAISTSLNEFTKWYEFITESSSEPVRFNTYHSTKGLEYSNVVIIMENSFSRDRSYFPNFFKDPQNIDFQERRNLLYVACSRAIDNMRILYIDPIDSFREEASLLFGEAKRFVL

SEQ ID NO: 63338 - protein, 693 aa, Elizabethkingia anophelis Ag1
MYIANIKLINFRNFENSNIEFNDGVNVIIGHNNAGKSNLLNALSLVLDNQKSKKLDIDDFYKLISIDELKEAPPKISIELTLRKGEYETSDDLVTISTWLTKLDENYEAKLTYEFFLPEKHQETYKKQIKDLPEGSNQRQDIWDCIKHNFLRLYVNKIWAGNIVNQATADSEALQKFDFQFLDAIRDVQRDMLTGKNTLLRDVLDFFMDYDIKSDPAKTDEQKYTEIKDRKNAFSKKAQELILDLDKRIEAGKREILSYAKDTGASFNNATPNFEGSISESELYSVLKLIVEYETGIKIPATRNGLGYNNLIFMSLLLAKMQVNSDAAYLDSNAKVFSLLAIEEPEAHLHPAMQYKFLKFLDQNKNRRKVRQVFVTSHSTNITSAVTLNEIICLHTDKDGKTIVGYPSKTFVADDGGFIEESKKYVERFLDASRSDMLFGQKVLFVEGLAEQLLMSVLANYQDSSIEDHHISIINIGGRYFKHFLYVFNANRDYTIGKKIVCLTDRDPERKNKTIKNGSYKGCYPYEFNIDTVTYDYKQNLFCEDYKPGSHPNITVYTQDQKLGKTFEYDLAFHNPSLKLLLTDSIQNKQELEILMDLYDKEESTLEDFFTILRDSSENERIIESIQLNTTFNLDEKKRSIIASRYLNSIGKGENALELAIVLKENLKQKGTDDYKEIVLPEYIKQAITELCN

SEQ ID NO: 63339 - protein, 559 aa, Elizabethkingia anophelis Ag1
MQLEILSDTLIDTNHHFKVSAGPGAGKTFWIVSHIKNVIQNSTILTSAKKILCITYTNTAAETIQSRLGTSSLQVEVLTIHSFLYTHIIKPYLSFISDEYDFDVSKLNGHDDTILSNYQFLQEWKEKTGQKRIKEDDQILTAFQKMRWRFDNNDLIVKPDYPIKINGYSIKNDSYFEYKKMAWKKGVLHHDDVLFFSLQILKKFPFVSKIISSKFPYIFIDEFQDSNPIQISIVKKLARLSTVGVIGDVAQSIYEFQGAEPGQFQTFNLVNNKNYYLNHNRRSSNEIIDFLNKIRNDFKQQYHRNISFPKPILFVGDMVKALKQAKINCPGEDIHTLSWDNLTSNAMKAEINGSTLDKELLNNLRQIDSNFHRGNLIFHCINAIALAKEAKFKEAINILEKYLTYKNDKFGGRKKALRYLTILLKNFDKYKGGTLLELSNFVRENLDDQLTKVTSGKVKTFYESYSFQSLLLCVNIAEDNSLNRTIHKAKGAEFTNVLLIIKDQKGLEFIYNPDLANKEEHRLYYVAVSRAQNRLFICVPTLDTEIETLLQDIISIQKV

SEQ ID NO: 63340 - protein, 715 aa, Vibrio fischeri SR5
MHLKALKIKNFRRLKNVTVELDKELSIFVGANNSGKTSTGHALQLFTSALKNKFSVHDFHIDCWDDRNIDGDIIEVSPPVISLDIWFEITENDLHKVIEILPNLQWEGSLVGVRIEFAPIDILALIVRYQEALSKANENIRRDSDDEITFHPKPRNLIEYIEANLHSEYELKYFVLDSSKFEKFNEIASYTPAKINSDKGKSGKDIINSLIKVDYLHAQRHLSDNVEGGRTEELSKRLSRFYDRNLDKIGDDYDALEALSTSEKRLNEHLDRVFSPTLSKLSQLGYPGLSNHRLLIKSSLNPAAVLSNNDGASVYYSPNGSEDRNGPILPDKYNGLGYKNLIYMVIELLDVHTQWLNIEDNRPPIHLIFIEEPEAHLHAQLQQVFIRKVLDILSIDESLLSLQTQLVVTTHSTHILYERGFMPIRYFKRDLLDNTTKVLNLSEFSDSFEEDERPTRDFLQKYLKLTHCDLFFADAAIFVEGNVERLLLPEMIENSNPSLKSCYLTILEIGGAYGHKFKPLIEFLGLTTLIITDIDSVTGNSDIEVEDEVEDDDSPSGQACMVETDNSITSNQMLIKWLPGLNTISELLQTNDDEKVSEDGLVRVAYQTAKEVTWGLETGSFTGRTLEVAFALDNLDWCQDNEQKSIKLRIPRNNEKSLEVLIEKIHNRVKGSKFDKTGFALELLMKENSEWNVPSYIKEGLDWLESKLEIVEVEV

SEQ ID NO: 63341 - protein, 621 aa, Vibrio fischeri SR5
MSRRIDSPDTESDASLKLLLEQQEKAAFIMVAGAGSGKTTSLIKALDYLKNEYGSDYRSQCKKIACITYTEVAVKEILEDLGESELFHISTIHSFLWAVIRPFKTDVVNWMVREINEKIIKAQDRIDAPRTRETTRVKLRLDIDRYRSQIPIVECVEEISYGTGGNFTEGILGHSDILKLVPQMIIDNVLLQKIIARKYPVILIDESQDTKPAFVDALKAIYETAETSFCLGFFGDPMQKIYMEGVGPINRESGWELIEKEENFRCPRSVLQVINNIRREDNDLQQTRGRMIQTPEGFESVEGSVNVFIFQQSEDNSTEIGRVREWLSESRQDPLWDEDGGNIRMLILVHRMAALRLNFNSIYSALNDNGTTSLKNGLLDGTSWVLLDFLKTILPIVDAKLRGDDFEVISLLRKKSSLFSQARLYGLDISEVLNRLVEDVEYLVSTMSSEEGSIRDLLVHLHARNTIDLDQRYIPYLTNNIEEDNEQERAAVQAFLNCPTNEILQYKKYIEEVSPFVTQQGVKGAQFERVLLVINDDEGNQNTFSYGKLLGYTNLSDRDNTNIESGKESVIERTRRLLYVCCSRAEKDLAIVIFVPDVQQAYDAVLATGYFEEDSIHTSLD

SEQ ID NO: 63342 - protein, 712 aa, Pseudomonas extremaustralis 14-3 substr. 14-3b
MHISKLSVVNYRNFANTTLVLSKGVNTIIGENGSGKTNLFRAIRLLLDDNMVRAAFKLDESDFHRGLEQWRGHWIIISLEFDEIGPDEAIQALFLHGAGVIGDAAVGRATYNLIFRPKKEVRLKLASLDDGDLAGLAAIRQAITIADYETLFTGRSEANFGNEVVYKSLVGDFDNCVFSGEVDDPRIGSRLPVFLSVSQEVSFTFIQALRDVVAEFHNNRTNPLLTLLKSKSGEIAPATMAPIVAQVLALNNSIEALEDVQTVRTDIRDTIKDAAGETYSPSSLSIKSDLSDEADKLFQSLKLFVGESAEGYEGGIHELSLGGANLIFLTLKLLEFKYQKAHQSIANFLVIEEPEAHIHTHIQKTLFDRIAYDDTQIIYSTHSTHISEVSSVQNVNILGRRGVACEAYQPATGLSPSEIGNIQRYLDAVRSNLLFAKSVVLVEGDAEEILIPILFKKVVGLSLDELGVSLINIRSTGFQNVAVLFHDTRIRKRCSIITDLDAAIVDTTPIPGEPEAEAKFKAKCLASQVVGAARKVALDAFANGNDWLSVHYADHTLEVDFISAGNGRQMASIVPLVYTQAATKATAIAELMSGDKAQYGRRVLTMAANQGKGWFAILLGEHINHKTVLPGYISKAIFFARESLTVELFFNIYSYRVKCALSGGDIPQAVADVATARLNAYRQGTLDLVALKAAMGPALRNDQIHAILADVE

SEQ ID NO: 63343 - protein, 597 aa, Pseudomonas extremaustralis 14-3 substr. 14-3b
MFTWTSRELNAEQSEAVLLPGSVFLVACPGSGKTRALTYKIAYELSRLESDRQFIVAITYTHRAADEIQERIEDLGVDTSRLWIGTIHSFCLEWIIKPYGIYAPELAPGYRVIDQHEREKLLERLCAPYASQRVSHYDCDYFFTTDGYYLGCPNAGKHAIIHRVLAEYFRILAENRQIDFELILWHASQLIDLNPAISVLLSKLFALILVDEYQDTKQIQYSILGSILRAGAGATRLFMVGDPNQAIYGSLGGYPIEIGELRRLTEVRIAEQQLSQNYRSSSRIIDYFGNFNVYSTAIAAAGDGRVYPSLVSYDSGVTRDDLVHEIVRLIRHNVETLGIPPSEVCVLAPQWLHLASMTRQLVVNMPDYQFDGPGMVPFARDIENFWYKLSRLALTEPSPSLYVRRLRWAGEVISEMKDAGIETSRLSRKSFLRECNAIPIDEDNGLAYLRRFFATLFERLGIQISDFAQLQEHHQAFFESSESRIAKLEAEGVDAIGDIAFFRKVFQNRTGITVSTIHGVKGAEFDVVIAYALLEGMVPHFNDADGDTSAQKLLYVVGSRARKNLHLFSETGRKRGRYNVYVPTRMLAACVFNYDDV

SEQ ID NO: 63344 - protein, 608 aa, Lachnospiraceae bacterium 7_1_58FAA
MGVRLALLPKDVSNLFNEYREAYSSARTTEHARVEKSSFNLFPKDLCEFLDRKLTTYFSIKAFILDPSHFEDAPVQPTSFEAECLTDNPLKDIVRVDMIDAQRGFADPDSSEGTEKVRKQLSAQMRNYYEKHLDPEKAPSPEDLDILEATEGARQVFDKTLALKFAPAIKELEGLGYPGISDPKLTITTKVMTSETLKHDSAVQYALSKTDNTLKLPEKYNGLGYQNLISMVFDLMGFRDDWMREGKAKDTNTVIEPMHLVLVEEPEAHLHIQVQQVFIRQAYKVLTNHKFLKQNLNFTTQLVISTHSSHIAIETTFGNLRYFKRLPEGTECAVATSKVINLSDVFGDSDQTNKFVTRYLQSTHCDLFFADAAILVEGVAESMLLPHFIRSKFPELYQRYITILGVNGRHAHRLSPLIEKLCLPTLVITDLDPAEKEGYHKSVVLKRGEGQISGNYAIAKWLMKEKDIDKLVDYSEDKKEFSFASPYRFSIRLAYQTPVKVDFEGEEKEAIPGTFEDCLIYTNYDLFKKIKVTDSGNLVEQTHDLLNSNDTFEMIHEKIYKMLRAGKSEQKAEFALDVIFEISPDELSVPPYINQGLMWLQDYLHPED

SEQ ID NO: 63345 - protein, 620 aa, Lachnospiraceae bacterium 7_1_58FAA
MDKIKEVTEELLDDHVDDHVDEEIQRCFLKEDPKCFFVFAGAGSGKTRSLIKTLTFLDETLGDWLLTNRKQIAVITYTNAACDEISRRLHYKSIFSVSTIHSFLWELIKNYQSDIKAWVINSINLEIAELEEKQRKSKTGKTSEKRAEDIRKKQERLAKINTVRRFTYNPNGDNVGYDSLNHSEVVKMGSKFICAEDTMQNILISQYPILLIDESQDTKKELVDAIFTVCERHKGKFIVGMFGDTMQRIYQDGKENLSQCIPDDWVKPQKIMNHRSASRIVTLANAIRFTVDTQQQRPRSDAEVGNVRLFIVSSDANKEVTEQRVAEIMSEETGDGEWRDSKQYKSLILEHHMAASRFGFLELYLPLNEVPVFNTSLRDGSISELSFLSKVISPLVQAYKGNNDFEVLKIVKEYSPLMESKKWISLDDQTKALQQVESAVDKLMELWKDDAIPTCLDVLRSIQDTGLFKLDERVDNILSSPAADESIRITALRKALSVPFTTLEKYFAYVSDNTRFATHQGVKGLEFPRVMVIIDDAEAKGFLFSYEKLFGVKLKTETDIKNEREGKDNSITRTTRLFYVACTRAQKSLAIIAYTYDCEAVKATAMKNNWFEDDEIRLLE

SEQ ID NO: 63346 - protein, 655 aa, Fusobacterium nucleatum subsp. animalis F0419
MFLSKLKLKNFRKYENLEVSFKDGLNVLIGENDSGKTTIIDAIRILLGTQSHEYYYIDEKDFNNPNEEMEIECTFSFKDNSYSKVAKFLEWITFNDEKKPELIVRLKAIKKELKIKRTITAGEIDLDTRFDLLDELRVTYLKPLRDANNELIAGRSSRLSQILKSHELFYKKENEHPFIEFAKEFNENINKYFSDDEGKLILSNINKHLGEFLGKEKKEDYETNINITEDKLDTILNSLNLSLSKNKLGLGTLNQLYMSLELLLFEIDKNTLNLCLIEELEAHLHPQAQLRTIKYLQNNFEKNSQIILTTHSVNLASSLKLENLILCKNKNVYPLGKDYTQLEEENYIFLEMFLDATKANLFFAKGVIFVEGSAENLLVPAIAEIIERPLDKYGVSIVNVSSTAFNSYSKIFLRKNEDEIIDIPIAIITDLDIKDNSETKVIKLTEERIREIEDNFEYGKGTFISLKDKFYLNVYDLKKDIRKIKNLKKLPDGLGEIIENFSMEEIVIEEYRDLIRKRKTEDYENGKIKVFINLCQTLEYDLAIGELAYYLYNAILLSKNEEEISKEKFEEEFESKSEKEKVKEIFKDNFYTNYDENKKSKLSKAEVALNLSHLLKENIEETRKILLRDRYCEYIIKAIEYVTEPITTKGSNEND

SEQ ID NO: 63347 - protein, 607 aa, Fusobacterium nucleatum subsp. animalis F0419
MIDYKKEFEINDDEIEKVYEILFNKEGNFEEEKQKIIKSFESCCIEAVPGSGKTTTLVAKLMILAEKLNKGNYEKGICILTHTNIGIDIIKEKLGMKGDVLFRYPNFVGTLQSFIDNYLAIPCYKKKYRRKVDIIDNDMANNFNLNLLRNMPLRIFLEKQHIDIEKLYYNFNDEYFYIEEKAILKSKDSNTYKSLFSRIENNILRYEEAIQLGKIYVNEYPNLKEYFSERFFLVLVDEMQDTTQDAFEILENLFDKEKVIVQYIGDRNQNLYNGTDKWYLSSKENPKLNISNRFGKNIANFLNYIRENSQDNLIEGNPSIKDYKPILFLYDSLDKNEEGGNNIIFDKFIEIIKEKGLDEKKGNFKVIGHVGIFKKGKVTVSSYFKDFLKNEKIFSLNKIIKKNSKSQPENKKIIKELKSKIELFLKKENKEELKEKFDEFIKIEENRIDFNRIIYNYLLLDKDEEKFIDNLFYFLERILKESLKKEKFNEIFKIKEVENKNNDNNEMNTYIKDNIKLEINTVHGVKGETHLATLYLDTFWYKYDISDYLFELLSSKLTDEQKKGIQNTQRNRNIFVGASRPKHLLCFACKKIDISDKIKDIFEIIEI

SEQ ID NO: 63348 - protein, 678 aa, Desulfitobacterium dichloroeliminans LMG P-21439
MNNQPYICKVHIENFRNFRRAEFWLNEKQVVIGENAVGKSNLLYALQLILDPTLSDKDRMLEESDFWEGLDDPMTNGEQILIELWFANFEGNKNVLAQLTDATVMLDEKEALKLTYKFYPYRKVGETNEYSFIIFKGDDENRRFSYDDRKFLNIRVIKAIRDVESEMRNSKTSPLTQIIKQKYTISKDVLAEISHALEEKGADTLKIGQVEDLESRIQKLLNQMVSFSQDQFGVSLKTINIDATKLLYALRPLIDNRESGNTSLGINNLLYIALILLLIEDETIKTYLPKELYEELIEKDESDLIESCYSEVEEINGYALNDNVLTNCEKRDELYDFMSETIPTANGVTILAVEEPEAHLHPIYQRLLYRHVMNRSSASVIITTHSTHISSVAPITSIVHLISKRNSTSVKTTARLELDDSDFSDLERYIDVKRGEIYLAKGVIFVEGVSEEYLIPSFAKAMGYEIDRLGIVVCNVNSTNFEPYRQFAESLGVPYIIVTDGDYYHRVEGKIKYGDLASEDDVGYGYAGIDRSTKFSGIADIIEAYVASEYEEGITFDDLEIEDQIEFFQIRGIFIGMHTFEVDIFCQCGSATTTEGQIICRVFDELTAGGLQQKQNFKDRMSNGEYNKCLAQIESSHSQIGKGRFSQRLSSYATRSMVPDYIEAAINKIIELVRSRTN

SEQ ID NO: 63349 - protein, 601 aa, Desulfitobacterium dichloroeliminans LMG P-21439
MNDYFKQKLTEVTNDSEQLRAYTSTDSTVVIAGPGSGKTTVLTLKVIRLLDDIIAEPRGLACLTYSTESAREFKTRLSKLGLRGRKNVFLGTVHSFCLAEILTPFAKLYPKYEIPNPIRIISEAEKKKLFDSVNPPGGTSITEMDKERTRNIRGISRVALESYEVALQTAISFEEALQKSGFIDFISMVKFSVELIQNESFVRKAIEAKFPWFVIDEYQDLGRPLHEIVLSLLDKSNIKIFAVGDADQSIYDFQGAAPDYLDELSQRDGIKCIRLLNNYRSAQTIVNASEYVLNSRRGYVASGALREYPATMDFIECDAGMDEQYQQTVELVRRFHSEEIPYHEIAILVGKNDEVKALKDQFEKQGIPVYLARQDFRNTESIFWLQSCASWLEDKATASFDEISQKWIGFLSHKQAVANSDDYDLLLRRTLLKVLETSKQYKDNLFEWLMYLLNELDFQNVFDGSERYPDEIKNLKSLIRVAKQTEPVLTIGFIARLGVPDNQVVLSTRHSAKGLEFDVVMMLGMEKDSFPNYYDTTQRRIDEARRLCFVAVSRARKACILLRSKQLPNKYGKWYSKDPSPFWITLKEFHDANGLSTYDAD

SEQ ID NO: 63350 - protein, 711 aa, Desulfitobacterium dichloroeliminans LMG P-21439
MTVGKRKKLDSQKNTVVKKIYKCGGKDNMYISKIRMINFRNFKNTEIEFNDGVNVIIGHNNAGKSNLIKALSLVLDSQVSRQLDIDDFNKYISLDELKADPPKISIAITINQSIDEDLNSDDLVTVGNWLTQLNEPYESLLTYEFFLPEKEKSNYLNIITTAIDLNMAWKIIKHDFIRLFAYKVWGGDPITQTVADSESLQKFDFQFLDAIRDVERDMLTGKNTLLRNVLDFFMDYEIKSDVTKSEEDKRKEIEKKKQDFSDHADALLLDLQERMKQGKDQILSYAKDTGASFNKAIPNFEGSISDVEMFSALKLIVEYETGIKIPATHNGLGYNNLIFMSLLLSKMQVNSDGKYLGSNAKVFPVLAIEEPEAHLHPAMQYQFLRFLKKNKTEEKVRQIFVTTHSTHITSSVLIDELICLHNEAGQTLVGYPAKVFPSDGKSKKYVQRFLDATKSDMLFAQKVILVEGLAEQLLLSILARYEGKSLEENHITVINVAGRYFDHFLHLFDSQKPYTINKKVVCLTDIDPERKNKDKGINFKKCYPFELNVDNTTYEYKTNTSLDKYQEGKHPNIASYTQDNMYGKTFEYDLIINNPTLDLLITESMSNREEIIGLMELYKSGKQISDYEKKLNGSDENQRIIASIRSNSLWGDDQKAKAIIASRYLNSVGKGENALELAYVLEENLANKGTAKYKEFIVPNYMKRAIAWICK

SEQ ID NO: 63351 - protein, 593 aa, Desulfitobacterium dichloroeliminans LMG P-21439
MISINSDTLIPIEQHFRVSAGPGAGKTYWMVNQIKNVLHTSKRLMKTRKIACVTYTNIAVETILKRLGTSASQVEVSTIHSFLYKHIVKPYASFLVADYGLDAAEIDGHDDSVLHLKKVVEWIENHPNANKLKHPYAVNQLTKLDTNKRALIGWLSSLSYKIDNSNNLRIVGDREKAFYLEERNGKIERRYLNKKCLDILETDLLGYKKLYWQEGFLDHNDVLFFSYQLIKKYPFILKVLQAKFPYFFVDEFQDTNPIQVAILKLIVEKETIVGIIGDEAQSIYSFQGADPKQFHSFELPYIVDYEMADNRRSTNLIIDVLNKIRVDIRQNKFRNVNGEKPIIIIGERVAALKKAKENSKNEAIYSLSRDNITSNLMKKEIGGTSFDDTLIDQLSDIDKSGSSNHYRSKVIIGCVKATELAHEGKYKDAIKELEQLFKEKNNKSERKKEGLKYLCLLLKKYDELKNNSLFDFYSFVKSEIKPDISSLRSGAPKTFYEDHSYLQLALCVRINEDISKNKTIHKAKGDEFDNVFVVLKNEKDFEFFLKTNLFGDEEHRIFYVAISRAVERLFINIPSLSKDDLPKLEGLFNIIEV

SEQ ID NO: 63352 - protein, 664 aa, Desulfitobacterium dehalogenans ATCC 51507
MNQPQICKIHIKNYRNFSSVGFDLSDRQVIIGENNVGKSNLLRAMQLILDPSLSDEDRRLEESDFFDGLEAPMENNQEILIELYIDNYFHIKNVLCQLSDATVDLDGRKVLKLSYKFFPQEDASGKVNYTYIIYKGDDETNFFTHGDRKYLNMRVIKAIRDVEAEMRNSRTSPLTRIIKQKYDIRKEDLIEISEALKSSGANMLNLPEINDLQTKISKLFNSIISYSEDEFGISLRTMDIDASRLLYALRPLIDKRESGNTSLGINNVLYITLTLLLIQDDTIKTYLSPTLYKKLTEQDGDEIVQRYYRGDDQTGYHLTYDLKDVDSQLYDFLYEHNSNTNGVTILAIEEPEAHLHPIFQRLLYKYVVLEANASLIITTHSTHISSVAPIKSIIHLVGNKSGTEVYTAANLNSPDKEISDLERYIDVKRGEIYLAKGIIFVEGIAEEYLVPSFAKRLGCDLDRLGVIVCNINSTNFWPYKQFADLLGIPNVIITDGDYYHTVNGEKIFGDLSDESHANFGYFGNERMEELYELFIDEDEFARFAELDITQQDEKLNKHGIFVGFYTFETDILNKIGKESDRAIICSVFNELTEGGQQQKDNFKANLVSKNYKKCLAQIESSHSNVGKGRFSQRLASICTRTMVPDYVKDAIEYICMEVRGELDE

SEQ ID NO: 63353 - protein, 604 aa, Desulfitobacterium dehalogenans ATCC 51507
MNEYFKIKLSQISDDEKQIEAYNSTGNTVVIAGPGSGKTTVLTLKVMRLLSEVITPPRGLACLTFSREASREFQERLKLLGLQRRGNVFLGTVHSFCLSEVLMPFAKLYPNYGIPYPIKIISDSKRKRLFQRIKKQIPDELTIEEMDKERTRDISGFSKVSIPSYDVALRVAVAFERELFSRGYIDYISMVKIATMLIQNEAYVQQALEAKFPWLVIDEYQDLGKPLHEMVLSLLQSTNIKIFAVGDADQSIYDFQGASPEYLVELSEWKSINQCIRLMNNYRSAKGIIEASETVLNIKRNYKARGALKDYPANIEFFVCEEGMDEQYQVATSIIEDCIAEGIPFHEIAILAGYNNQLKDLGKLCQSKGIPYYLAKQDFIRSDFIKWMENCAAWVSSSRKVLFDDIFEYWDFLLMQHRQSIDYDNGILAKRNLYTILDKSRHYANTLVQWFDFVLDSLQIETLLHDSEIYPDEIENLKKLNELLSDELYTDFSLGQFTNLGLPENQVVLSTRHGAKGLEFDIVIMLGMEEGSFPYYKNTSQREIDEAHRLCFVSVSRARKKCILVRSKTLIIPKKDGTWWNKPCEPSRFWNMLYSRHSQINGYS

SEQ ID NO: 63354 - protein, 668 aa, Leptonema illini DSM 21528
MLIKSARIKNYRLLKNLTLTFDERTTVIVGRNNSGKTSLAEIFRSFLGPSGPKLRYEDFTQTCLCGFENGLAAFKEEKSEAEIRKLIPTIELELLLDYTNDKDEYGVLGEFIIDLDETLFETKVLVAYQLKDGKIKDFFQPLSVENRRKYFSDLKALINQHFEAVIYAIEPTNSENRVRLDFSKFKKLILSGLINAQRGLDDETHSERDVLGKSLGKIFNSANSSGATAEFKEKSEEVRRVAEELQEKVDTDFQEKVKALLPALSIFGYPGLQDPNLNAVTELNVKSLLESNTKVFYQGEDYFTLPETYNGLGIRNLIFILFRIYEYFREFQSQTTPPKGHLIFIEEPEAHLHPQMQEVFIRQLDQIVQEFQQQLNDGKIWPVQFVVSTHSSHIANEADFRKVRYFLSKHGKETRVKDLGAAFKEDDVKDDKEFLHKYLTLTKCDLYFADRAILIEGPTERIILPEIIRKVDETQATKLRRKYLSVVEIGGAFAHHFYKFIDFLELKTLFITDLDSVRKTTEGKRTTYTASSVGEGTDSSNAGISKWYGIDGYGDLKKILAYDEKARVVGYRRIAYQIPEKKGGVCGRSFEDAFMLANADVFDLSRLKGKELEKAVFEKAQEIGKSSKANFAIEYSVDKTDWTVPKYIAEGLKWLDTDEEVVVGEGKE

SEQ ID NO: 63355 - protein, 585 aa, Leptonema illini DSM 21528
MTRQSPAEQASIEALKQLRSCIDNNQCFRLEAGAGAGKTYSLIETIKYLIEQRASEFLLNEQQIACITYTNVAKDEIKDRTDHHPVIFADTIHAFCWSILQNYQIKLRELLPSLGERWEERIKEAGGIAEQIVKYDLGYPRINNREISLHHDDVVFLMARILSYPKFQKLVKSKFPIILIDEYQDTDVHLAESVVTNLVDNESGVIIGLFGDHWQKIYGSAACGLISSKAGKIVEIGKKANFRSDKNIVACLNRMRPELPQAESNPQSQGAVRIFHSNLWVGTRRGGGHWTGDLPTANAKEHIEKVKELMVADGWDMSPTKTKILFLTNNLIATEQNFKNLADCFPYPDDYLKKGDKYIQFFIDIIEPTASAFERREYGELFQIGNKNHPSLQSQRDKKIWTDNLNRLMELRNTGSIGEVLDLLLESKTPRASAKVEESERKFNLLSDGAADSHSEEEKRFLEKIRSIRTVKYREVINLHEYIDEKTPFSTKHGVKGAEFDNVLVVFGRGWNQYNWNQMLEWMSDGYPADKRETFERNRNLFYVSCSRAKHNLTLLFTQELSQKALSMIQKIFETRNVIGDPFEQ

SEQ ID NO: 63356 - protein, 680 aa, Leptospira santarosai str. HAI1380
MYITEIEVKNFRLLKNVRISLQETSTIIVGRNNSGKTSLTEIFRRFFSDKKIHFYLEDFHLSSLALFKEALTVKQSGGSEEDIRKIIPKIELNFTINYEDDKADFGILSDYIIDLDENSTNVNIKISYEIADGKIGLLFEELSFENELDSFIRKMKERIPALFSTKIYTIDPTDPNNRTTIEYSKLKNLINVDFISAQRGLDDITQNEKNILGKALNNIFRTAATESAPPDMKKISQELEEIIQEIQVKVDTDFKEKVDSLIPSLNNFGHPALSDSKLSTETTLNIQSLLDTNTRIQYLKAEGISLPESYNGLGSRNLLYMIFQLFDYFRKNQSNSIQAKSHLIFIEEPEAHLHPQMQEVFIKQLEEVANDFSVKFNKNIKWPVQFIVTTHSTHIANQADFSSIRYFKTSTNKPLQTNIKDFGKEFNSEDAKEDREFIHKYLTLTRCDLFFADKAMLIEGATERIMMPIIVNKIDREENTSLFNQYYSVVEVGGAYAHHFYKFIDFLELRTLFITDLDSTKIGISSKGKKVHIACEVSDGTHSSNVGIKEWFKTKGEILDLKEIRRKEPTEKITGSRRLAFQIPEENSRACGRSFEDAFLLSNRELFDLADFEEDKVESEAFSQAEKIKKTNFAVKYSLELTDWNVPLYIKEGIIWLAEFENKGLTKRKGSKAKIKNEKN

SEQ ID NO: 63357 - protein, 584 aa, Leptospira santarosai str. HAI1380
MKRIRGKTAEEASNEALEKIIIAIEAEHCFRLEAGAGAGKTYSLLKVIEYIVNNKSNQMMKLGHRVACITYTNVAKDLIRTKTDNNPLIYAETIHAFAWNLISGLQKPIREYVPEISQKWAERISEIGGIQNQIVKYDFGFPKATVDEITLHHDDVIKIFSNLLKRDKFKKLIKSKYPIILIDEYQDTNKELITSIVENIIEDDFNILIGFFGDHWQTIFGSESCGFISAKEGKILEVSKNANFRSDRIIVEMLNRIRPELIQNAKIKDGNGEIKIFHTNDWEGQRRKENHWQEDLPADTASKMLKKVVQELKKNGWDFNSKETKILMLTNNVLANEQGYSNLISAFEDSEEYLKKSNPYIKYLIDTVEEVCDFYINREYGEMFKIIGSNRSGIKRMEEKVRWHTDLRELIELRQTGTIQDVLKLLMRTKKPRISSRVENAEIKYNEYLNIVDPVEKQKNEIFYKKVSTIKAAQYTELIALKQYLKDNTPFSTKHGVKGEEFENVLVVCGRGWNHYNWNQFLEWANSKVPNGKEETYKRNRNLFYVSCSRSKRKLTVLFTQYLSKEAMVTLNHWFDSKNIKSLI

SEQ ID NO: 63358 - protein, 656 aa, Coprobacillus sp. 8_2_54BFAA
MQLSKIRIKNYRLLIDAELDVDKKTTLIVGRNNTAKTSCIDCINTVLSGKNFSYDDYPLEKRKEFFELITKFMSKKISFTELCDNLSIISIEFLVDYSSDGIEDNLGALSPFIIDVDLDTTEAIIRVEYKIKTDEKILWTLLENSFYTDGVYSANIEEVHDEIVSSFTKIFELKIYAINPKNDEDKQLKTYNELAELFPFYSIPAERTLGEDGGQNNNTLSSLISSFFDVNEEDLDSNVATEVIKLRQIIGDANKGLQKQSNEILSSIVNSAIGFGYPNGEELQLGVTTQLKIDDEIKNKTMLSYTSGTLGESLPSTHNGLGYKNLIKMEFLLVAFSKDIEKHGEACIPLLFIEEPESHMHPQMQHSFASYLETFLERISNIHIQTFLTSHSAHIANTMDFSKIRYAQKTISGVIYKNLHSFAKSNADNMDFIKKYLTLSRCDLFFADKIIFVEGASERLLLPDVISKCEKAGLFDTQTYKLTAQYYALIEIGGAYAYKFIPFVNFLGVPCLILTDIDSMIDGRTKAVVSEGKTTSNSTLKWLMRKIKSLPEKDKSKIDLADIIALTAEQKTYGKCHIEFQTKENELCGRSLEEAIKNVNRNHYGLTGKVTEDLLKFEEKSKTDFALNLICNYPDYEIPQYIKDGLIWLNEQKVLE

SEQ ID NO: 63359 - protein, 584 aa, Coprobacillus sp. 8_2_54BFAA
MNDINKCVNYEIAKAEADKVDEQIITTLQEGYSFRVEAGAGSGKTYSLNKVIEWIQANKWADYSRKKQNVICITYTNAAVNVIEERLSKDSFILPSTIHSFAWNAIKQYQSTLLEYIEKNENLHADEGDFIKASEVKYNFGHRYKENGVHYLYHDDVLKIFCLFLDNEKFRRVFSNKYPLILIDEYQDSYKPIIDRFIEYFISVKQGPQFGFFGDAWQTIYQSNKACGVIVHDNIKEIKKVSNFRSAPRIVQFLNDIRPELPQQSAIDNFEGEVIVVTCDDYSGERRTDHNFKDDLPAKELKKRLDVLTNVIKSITPSDESLRVLMITHRVLAIQQGYERLLNILADGLRDKQDQFLLFFMNTVEPIYEALNKSNMQLLFDTLGVRRYPITKKAEKAKWKELEQLLAAARTKKAIDVLKEVIVSNLIPIPPQVEGWLRLYYDTPETIYGLDTSIQEFLELEYNEFLAAINFLYPQAEFSTEHGVKGEEYDNVIFVISKGWNQYQFDTYAPMINGSVAIPKGKELSFERNRNLFYVCCSRPKKRLIIFVTVPIGPSFRSFLTSLVGTNNIFTYIQFIDKLETKNN

SEQ ID NO: 63360 - protein, 614 aa, Saccharomonospora marina XMU15
MRVRRVSISNFRGISSGNVLLDSHSLLVGGNAAGKSTVCEALELVLGLERLYRRPVIDEYDFHRTHYRAADDSTEPTEVRIEVVLTDLSEEARRRFRGHLRPWSSDNNDFAPPAAEDAVDLVEGEWCLPVVFLGRFNAADDDFEGGTFFAHPRRPEGDYAEDDLGGALSPFRRDDKRYCGFLYLRPNRTGNRALSFGRGSLIDTIVRLESDRTGSLWTSALDALGEIDLAESTSAFSEIRAAVLSRVRNFLSMPASDSAIGVRPSDLTREHLREVLRMFIATQPGTYPVPFNRLSTGALNVLVFALLTYIADLRGPDSVIFAMEEPEIALPPHTQRRLVDFVTGTMGQAIVTSHSPYVIERFDPSQIVVLKRDDDGVLTSKPIELGNELKPKRYRQERRQFAEAVLARGVLVVEGATEVVTLLAIADALDADPATTYQHPDVAGLSLFNAGSDTNVPHYGPIFSAMGKTVFGVHDTPNTPLTPEQDTNTQSFAIHIDVGYPGIEDLLVTEIPPAVQRNFLTSVSTRSDYPAQCGQLPEQASDEQARDLAREVLKKRKGTESFAPLLIAECSRGELPTTLVTLLLDIHQHLSPLPHAENPPPPEDAPQSNDLGDA

SEQ ID NO: 63361 - protein, 574 aa, Saccharomonospora marina XMU15
MQLDDTRKQILAASGHLLIQGGPGSGKTTIALLKAARTLETLAAEQHVIFLSFSRAAVRQISDRVGEHLPLAIRPHLEVRTFHAFFLDFVRSHGHMLTGTSAVFLAPDGERQRQADHEGDWDTETIKLASRGIFVFDQLAATTATLLERSPALRALYSDRYPLVIVDEFQDTNVDQWRVIQALADTSTVICLADPDQRIYEGFVKGVDEERLQHAVTALRPTPFDLAGDNHRSAGNGILDYGNAVLRNSPAEQPASVQYVRYSFPHTPEVVTHHVIVHLQALLAKQLGREPTIVVLGPSSAFVAGISEAVSAEQTVNGTQLPAVDHELVWDPVLAAAAGYVVASILEWPTLPRDEAITTTLRRIADFYRVKFTDKQAKTARSSIKATNNAIQAFSDGKTPRTKTGKSVIVEVDNGIQLTGNPVTDWQLARARLRGSTELSEIFDKARMLRLLHATDALAWGLADAWDGQSSYPGATEIVRRVLADELVDGRPAEPRAVTLMNMHKSKGKEFDGVIIAEGVHTPKLIDPDWDEKRIIQQRRVIRVAITRARHKVFFVRPKNAFPLVPRSQHPPAS

SEQ ID NO: 63362 - protein, 687 aa, Staphylococcus epidermidis VCU041; identical to SEQ ID NO: 63306

SEQ ID NO: 63363 - protein, 582 aa, Staphylococcus epidermidis VCU041; identical to SEQ ID NO: 63307

SEQ ID NO: 63364 - protein, 665 aa, Pseudomonas aeruginosa MPAO1/P1; identical to SEQ ID NO: 62480

SEQ ID NO: 63365 - protein, 142 aa, Pseudomonas aeruginosa MPAO1/P1
MIIETAAPDFDESADVQIRACLNPAAPQSFFLYAGAGSGKTRSLKRALDTFREDHGATFRRTGKKIAVITYTNVAADEIAERVGEDPLFPISTIHSFCWRHIEAYHRDIQAWLLNRLPVELADLREKQAKGRSGTKAAQDRV

SEQ ID NO: 63366 - protein, 704 aa, Pseudomonas aeruginosa MPAO1/P2
MRIKFVEISNFRKLKSTHLDLDKNTTILVGANNSGKTSAMLALRIFLLSPTRLNLRDVTIANWTKIDLLGSEWEAGAEPTVDLDSLLPSLDVWLDVPLREIQHVVDILPTLDWSGGLLGVRLAFRIKNLDKLKSEYIAQRTAARDAAIVGPNGESIKIAVWPRNLTDFLERRLRAHLELLAYPLDPAAVVPPGRSGLATPQRLPASALAFEHPPFKKLIKIDEIAAQRDFADASSSDGGEDKGEANNRRFKRRLSDQLRSYYDRHLDPTKTPSDKDYEALGAIQAAERSFDARLEEGFSAAFQELEDLGYPGMSNPKLKISTLLRGTDGLKHGSSVQYQVADPSGDGSNTLQLPEDYSGLGYQNLIAMVFMLMGFRDEWMRVEKAGILEGADVSHEIQPLHLVLVEEPEAHLHAQVQQVFINKAYTLLRKHADLGVAENYCTQLIVSTHSSHVAHEADFANLRYFRRRPAASMGETPTTTVANLSYIFGDGDETKRFVKRYLKATHCDLFFADGVIFVEGQAERILVPHFIRHHFPELSRRYVTLLELGGSHVHSFRNLVDALGIATLIIGDLDATTAVKIIDKNMRETTRWKSARPEQGKAQQTANSVLKDWHPGKKLIDELVALPPDGHISTAGGDYELYVAYQKPVNVKGASEDSDLIIPRTFEDALILENLAVAGKIEGSITSAKVRGIVAQDLSGDEGR

SEQ ID NO: 63367 - protein, 142 aa, Pseudomonas aeruginosa MPAO1/P2; identical to SEQ ID NO: 63365

SEQ ID NO: 63368 - protein, 729 aa, Staphylococcus aureus subsp. aureus CIG1114; identical to SEQ ID NO: 62500

SEQ ID NO: 63369 - protein, 597 aa, Staphylococcus aureus subsp. aureus CIG1114; identical to SEQ ID NO: 62501

SEQ ID NO: 63370 - protein, 729 aa, Staphylococcus aureus subsp. aureus CIG1612; identical to SEQ ID NO: 62500

SEQ ID NO: 63371 - protein, 597 aa, Staphylococcus aureus subsp. aureus CIG1612; identical to SEQ ID NO: 62501

SEQ ID NO: 63372 - protein, 729 aa, Staphylococcus aureus subsp. aureus CIG1770; identical to SEQ ID NO: 62500

SEQ ID NO: 63373 - protein, 597 aa, Staphylococcus aureus subsp. aureus CIG1770; identical to SEQ ID NO: 62501

SEQ ID NO: 63374 - protein, 729 aa, Staphylococcus aureus subsp. aureus CIG2018; identical to SEQ ID NO: 62500

SEQ ID NO: 63375 - protein, 597 aa, Staphylococcus aureus subsp. aureus CIG2018; identical to SEQ ID NO: 62501

SEQ ID NO: 63376 - protein, 653 aa, Escherichia coli DEC1A; identical to SEQ ID NO: 63058

SEQ ID NO: 63377 - protein, 621 aa, Escherichia coli DEC1A; identical to SEQ ID NO: 63059

SEQ ID NO: 63378 - protein, 653 aa, Escherichia coli DEC1B; identical to SEQ ID NO: 63058

SEQ ID NO: 63379 - protein, 621 aa, Escherichia coli DEC1B; identical to SEQ ID NO: 63059

SEQ ID NO: 63380 - protein, 653 aa, Escherichia coli DEC1C; identical to SEQ ID NO: 63058

SEQ ID NO: 63381 - protein, 621 aa, Escherichia coli DEC1C; identical to SEQ ID NO: 63059

SEQ ID NO: 63382 - protein, 653 aa, Escherichia coli DEC1E; identical to SEQ ID NO: 63058

SEQ ID NO: 63383 - protein, 621 aa, Escherichia coli DEC1E
MTRVSRDDWVPQGVGGLEGRAWEALRETDSSILVTAGAGAGKTEFLAQKATYLLQTGICPAPKRILAISFKKDAAQNLAERVAKRCPRDQARRFDSMTFDAFTKGLLDRFRPALPEPFNAPGTYQIVNPFCRDYDDFIERHGYHGVSAQQLERRLLLTDLPIDLSNGSEVHRALADYWHEQFFGGDEISLSFPMINRLVKLLLQENSYIRRALQATYPIVFLDEYQDTTYAQYDMLLTAFDGSDAVFTAVGDDKQRIMGWAGAMNDAFDQFENDFAARRITLLSNWRSHVDLVRIQHEIARRIDDNVEEVQAQGTREIEGEVSAIWQFRSADDENNYLAEWVSREVQSERVAPHDVAILIRMRADQVEGEIAPSFAARGLRIRNAARSVGEIQIQDLLGEELTGIFVPLLRLGATERSPENWEQTQQNYLFLEAADPDNDLTQERLLVKLEAFVRKLRTELAHRQPSPDSAEEIAEMLLEFVGTPRLRQSFPAYQRARDFERVWSGFVTLLKECAEHSSSWTEALDEFEGIGQVALMTVHKSKGLEFHTMIFYGLDNQTWWSLTPQRGEELNTFFVAFTRAKQRAFFSQCVERGHAIGWIQQLLAPAGVETIDGTTILGTT

SEQ ID NO: 63384 - protein, 653 aa, Escherichia coli DEC2A; identical to SEQ ID NO: 63058

SEQ ID NO: 63385 - protein, 621 aa, Escherichia coli DEC2A; identical to SEQ ID NO: 63059

SEQ ID NO: 63386 - protein, 653 aa, Escherichia coli DEC2B; identical to SEQ ID NO: 63058

SEQ ID NO: 63387 - protein, 621 aa, Escherichia coli DEC2B; identical to SEQ ID NO: 63059

SEQ ID NO: 63388 - protein, 653 aa, Escherichia coli DEC2C; identical to SEQ ID NO: 63058

SEQ ID NO: 63389 - protein, 621 aa, Escherichia coli DEC2C; identical to SEQ ID NO: 63059

SEQ ID NO: 63390 - protein, 653 aa, Escherichia coli DEC2D; identical to SEQ ID NO: 63058

SEQ ID NO: 63391 - protein, 621 aa, Escherichia coli DEC2D; identical to SEQ ID NO: 63059

SEQ ID NO: 63392 - protein, 653 aa, Escherichia coli DEC2E; identical to SEQ ID NO: 63058

SEQ ID NO: 63393 - protein, 621 aa, Escherichia coli DEC2E; identical to SEQ ID NO: 63059

SEQ ID NO: 63394 - protein, 380 aa, Escherichia coli DEC6B
MSELSDGQRSLFHIALTAATLETEREAFSLPADDSSFEQDKLRRIHLTILAIEEPENSLSPFFLSRIIKQAREIGALPSAQVLLSSHSPSILSRIEPEEVRYFRMDRSARCSSIRELTLPEDDVEASVYVRLAVKAYPELYFARFVILGEGDSERVVIPKIAEEMGVSLDPSFVPVVPLGGRFVAHFWRLLNDLEIPHATLLDLDLGRRHGGANAMRSCLQNLAAIGSNLGSTNGANAAQLTDQQLYNEGLQGQWLQAFRREGVFFSYPIDLDFAMLLAFPTAYQVANPGGNGPQSSAAAIQAKKVSTLKTGGNPALYTAHYDDAFKWYPYLFLSRSKPETHLAAFSRIAGGGVTASAPVELRALIEYVTDKLNLSGENE

SEQ ID NO: 63395 - protein, 438 aa, Escherichia coli DEC6B
MTRVSRDDWVPQGVGGLEGRAWEALRETDSSILVTAGAGAGKTEFLAQKATYLLQTGICPAPKRILAISFKKDAAQNLAERVAKRCPRDQARRFDSMTFDAFTKGLLDRFRPALPEPFNAPGTYQIVNPFRRDYDDFIERHGYHGVSAQQLERRLLLTDLPIDLSNGSEVHRALADYWHEQFFGGDEISLSFPMINRLVKLLLQENSYIRRALQATYPIVFLDEYQDTTYAQYDMLLTAFDGSDAVFTAVGDDKQRIMGWAGAMNDAFDQFENDFAARRITLLSNWRSHVDLVRIQHEIARRIDDNVEEVQAQGTREIEGEVSAIWQFRSADDENNYLAEWVSREVQSERVAPHDVAILIRMRADQVEGEIAPSFAARGLRIRNAARSVGEIQIQDLLGEELTGIFVPLLRLGATERSPENWEQTQQNYLFLEAADPD

SEQ ID NO: 63396 - protein, 653 aa, Escherichia coli DEC9D; identical to SEQ ID NO: 63058

SEQ ID NO: 63397 - protein, 621 aa, Escherichia coli DEC9D; identical to SEQ ID NO: 63059

SEQ ID NO: 63398 - protein, 642 aa, Listeria monocytogenes FSL J1-208
MYLSSLKLRNFRSFGSASHEIKFNKGLTVLVGENDSGKSAILDAIRIVLGTTDFSWYRINDYDFYNEDSSLEIEISCKFTDLSSIEASAFLEYLTYEDDDKGKKIPSLYLNWKCRYMQSFKPPRPVSSMTTGKNGDGPVLSPESREILRVTYLRALRDAYSDMQSGRNSRLSQVVQNVPAISEGEADLEEGVELNELSLVGIFNLSNKLLAEYPALKTVKNQMTDILKNQMLLDGDNLATRFEVTGSDTADAKKLTSLLEKLDLTIDKDTASLKGIPGLGTSNIMSMACELLLRRSSQEACQLLLIEEPEAHIHAQRQMKLVKSLQREAEANSQQIILTTHSPLLASAVKLENIILIKNGNAYPLSKSETSLDENDYIFLERYLDATKANLFFARNVMIVEGPGEALLLPTLSRLLNRDFVDFGVSLVDVRSTGLRRYSKIFQRKNKDNSQYSDDWLNIKVACITDRDIMPNCAPRICLKKEYNDDNTSWPETNDRRWRAESDFSDTQKKVHLNDIKAKADGQNVKTFVSDRWTLEYDLAYYGLSSEDMKSSLIKAIVKTTYLQVNWKSKITEISTALDTRTNIEEKASYFYSFFAKGNTSKAEFSQQLALELEKDFSGNEKALKDSLPPYIVNAILFVTKN

SEQ ID NO: 63399 - protein, 635 aa, Listeria monocytogenes FSL J1-208
MNFIDEITITDIDIDWVEGILDGDIRFDQSRRNIIKNLESIDIQAFPGSGKTTILVAKLAILAKKWTAATSGICVLSHTNVAREEIEKRLGDTEIGAKLLRYPHFIGTVHSFFNSFVGLPWIRSKGNPIEIVDTDFVCANRWKSLPVQFHKTLLNRRKTYMDLCFKNELGKIDLGNLGENTLTYKTIKTIVKNSQEKGYFTFGETLLFAQEAVSNNPQIVGYIQKRFPLLFIDEAQDTNSFQWDLINSTFPASIQQGFGDENQAIYNYVGENETDSFPRNNPLVLPESKRFNSNISKIANPLAISNAEMIGMSTTFDCKNTIFLFATDKIDKVLEEYSKLVLLTFTDEELKKYQADGCHAIGMVHTKKEETVPDQLPKGVFDYWHNYNHKSISRKTAPDYLVEYFILGRNELDLTGEAHLQVEWVLKGLKILINKVADTIVIENKTSLVNSFLSKLDNEKQNIFREKLLLILNKTSFIETEWVEMQNVISSILSLFNLEIGTSDFMEWSNNIDIATSYDSGGLCPKNVFRYSDESNRSVDVTLGSIHSVKGQTHLSTLVLETFSYNHNINSILPFISGAPPKKKPGVRDRGRLKCHYVAMTRARGLLCLAIPKDKVDENSISNLELLGWNIRVIE

SEQ ID NO: 63400 - protein, 729 aa, Enterococcus faecium Aus0004; identical to SEQ ID NO: 62500

SEQ ID NO: 63401 - protein, 416 aa, Enterococcus faecium Aus0004
MTNIFEKIVNDLNLEQKDVVESEDNLYVNACPGSGKTRVLTRKIAYQAIKHDGSLKRIIAITYTNRAAEEIKERLSLLSIDDDINIWVGTIHQFCLEFIIYPFKMNLSRVSKGFTIIDDYTQRAYVSQINNMLNLNLKTYELNKIDLSLSHDFKINEVQYTQVSEMYHTMLEKNKEIDFDMILLVAYKILTVNSNVARNIASNIRAIYVDEFQDTRELQYNVIAKLLQNNPQIQSMFVGDIDQAIYGSLDGIAKSVEELEMLTSHTFQSKTLHGCYRSNQRLVDFYSNFQSCPYEIESRGNNKNDRGFISYDCKVTKEDLPNIIKNIIKEKIESGIHEKDICVLAPQHYPLFSLGEYLKKELPYCNFDAINISPIKVNNHSLFFKLAILYFTESGEKVRRRKLIANDILIIRRLYN

SEQ ID NO: 63402 - protein, 645 aa, Streptococcus pneumoniae GA05245
MKLTKMVINNFKSFGECQAINFNNQTVLIGNNSSGKTTVLQALSKLFSDKQSDRIIRKSDFHLPKGLRPGENTRNLFIETIFEFDELDGTVYGPAIPTFFEHFTVSQDGAKPFLRIRLESSWEDDGTVEGSIDTQIYYISSDEDTIRDEDKHRAPRKDLDKIRVLYVPASRTPEKELGNASGSMLSRLVNSINWTEDEIKEIKDKIDELNNTFLSENGALTQINNEIQKSWELYHEDNRFSQAELIINSSEMAAALRQIALKFSPTTTEEAFTVSDLGDGLRSIFYFSLVDSILDIELEITKDREENPDNPRFKLVPPILTILAIEEPENHIAPHHIGKLIKRFKQLGNNDNSQLILTSHSPVIVKRIDPEDLRYLRIENNDSVLQTIVSDIQLPQSNDESYKYIKGAIQAYPELYFAKLVVLGEGDSEELLLPKFFDLLGLEIDSSQISVVPLGGRHVNYFWKLLNALRIPHITLLDFDNERYGGGWGRIQYAIKQLILNGVAKEKLVTVTAESQKSRVLDDDEIDKIKDWKIDRPDNQLLEGWIKMLEKFNVFFSAPLDIDFLMLQYYKEHYLETLSTNEGPVVSYTDENSDNKKIKLTKMDRTNDYQLIGFKNRISEAIQATLKDKSGPGDSFTEEEKELMI

SEQ ID NO: 63403 - protein, 605 aa, Streptococcus pneumoniae GA05245; identical to SEQ ID NO: 63191

SEQ ID NO: 63404 - protein, 689 aa, Streptococcus pneumoniae GA47179; identical to SEQ ID NO: 62612

SEQ ID NO: 63405 - protein, 605 aa, Streptococcus pneumoniae GA47179; identical to SEQ ID NO: 62613

SEQ ID NO: 63406 - protein, 531 aa, Streptococcus pneumoniae GA47794
MDKIRVLYVPASRTPEKELGNASGSMLSRLVNSINWTEDEINEITDKIDELNNTFLSENGALTQINNEIQKSWELYHEDNRFSQAELIINSSEMAAALRQIALKFSPTTTEEAFTVSDLGDGLRSIFYFSLVDSILDIELEITKDREENPDNPRFKLIPPVLTILAIEEPENHIAPHHIGKLIKRFKQLGNNDNSQVILTSHSPAIVKRIDPEDLKYLRIENNDRVLQTIVSDIQLPPAIDESYKYIKGAIQAYPELYFAKLVVLGEGDSEELLLPKFFDLLGKEVDSSQISIVPLGGRHVNYFWKLLNALRIPHITLLDFDNERYGGGWGRIKYISQHLYELNTEFQEWFHTQRLDFNEIGSRGCESIGAQRLINWFNKLEEFNVYFSSPLDIDFLMLQHYKDNYLNTLSPIEGPVVSYNDSDGSSKKVKLSDLDCLDRLQLEGFNKRKEEAIRATLKDKSGHGDSFNEEEKELMIWYQYFFLGRGKPTTHMQFLSSISDDELTRNLPPVFEKIVNSAEELLGDIQHGKE

SEQ ID NO: 63407 - protein, 605 aa, Streptococcus pneumoniae GA47794; identical to SEQ ID NO: 62613

SEQ ID NO: 63408 - protein, 669 aa, Flavobacterium frigoris PS1
MLIMYIEKLTIKKFRSIEYLVVEFNKGLNIIVGENNVGKTTIIDAIRICLSLGRQWRDIGVKNPEDFYIDNLVISDVLEPIEFTIEFKIEEAEDRNLFHSLLWQDPAKKESPNLRLNFHYDIEKDIRGNEKLKWKVWGGHDTIVDMAELQQIYYSYLEPLRNAEQELRPYANNNKVTSLFRDMTSYEKADPAGKKTVSLTHDKKNELSQAIEKVLQNDDWTGLISTGQSYINEHLEKADIKKKSSKVHLKLLEYKYDNIVKGLLTRKPVYSQAVLGTDLHLQKYFDISQNGLGDNNIILASAVLGDLKSRRDQEIEHYYALLIEEPEAHLHPQRQNTFFNYLNTLQDLGVQIFITSHSPTITAKSNLDNLLILQKDELYKTSFFTTRKSILTGKNKDYLRKFLDVTKSQLFFASGCILVEGISEALLLPVFAKMTGKDYDLDKNGIEIVNINGVAFEPFANLFNAPDKEKRLATYCSLITDDDKSIIKSGNFISKGEGINKAQAVEVFKELKGLKIIDHSNRIVDFDVTKDLKITDFESNEVFIKAVLSNKYNKLSDRASKAQKLANKNLRVELANHTFEYELITADDYNARLIARIYNDMHSKKYVDVFANKHLLAADILKKLKSNKDKSVLAENLAYLLEQKPGMWRHFVIPKYLENSIRWVIDKKV

SEQ ID NO: 63409 - protein, 606 aa, Flavobacterium frigoris PS1
MYSKLSDGQRKILDYNQGTVVVKACPGSGKTYSLAARISRLLREPDLGKKGLAIISFTNIACREIEDKLLTDFSTPIPLSHPHFLGTIDSFINTFIFLPFGHLIMGCSSRPELVGEPHGPWSVKKFDMDYDQYFDKTTFDSNDILTRIAPYQAFHFKWVYNNISGGINGNITNIINSKWALFKKGYANQSDANYIALKVLEKYPIIAENIAKKFANFLIDECQDTNDIHMKIIDIFNSKGNNNIMLIGDRDQSIFEWNEARPELFDAKYDVWDKILLYENRRSSQHICDFIQNLSSFSEIKAVNERVKDSVLIPAISGYKMPKKATKKDITVITTEESHEAFGEILKDFLKECDNNGIIVNKENVAVLYRGTASSRYLGLSSDVHSFETIPWLKNHYHVKGIIKGKHMYEHGGLNKGYKLLEKSYFEALLRPADSRFYCSSQFISDKIAVLGIKNYRREIFRFIDSLPYTKDKTLNVWVKEANAALKSSGININLNIDSKYGDILIDDYFGEDLNSERLHPFYFGTVHSVKGKTFQAVLLLLGKKSVLKNYDTILNSDPKLLNPNDLEELRIVYVALSRPELFLKLVVPDSDVKLWTDKLLRQNNV

SEQ ID NO: 63410 - protein, 325 aa, Xenorhabdus nematophila ATCC 19061
MGTRSWASMLTIKSFVEILSHRHIAESEPLFPILTVEEPEAHLHPNAQKTLYRQLSDTNGQLILSTHSPFLAAMADLYQIRSLVKTKNGIVAHKISHPMTDDEKKSISRSILAKNGELLFAKCMLLCEGVTEEQVLPAMFEIYASATPWSVGLSCVNVGGKDKYIHFALLPFSFGIPTCIISDNDINPNSGTKTQDDVTQQIEKLSKKMCLSLTKDFYDIYFLDDGNDFEKELIDHGLRDEIIDAFVLLATTGNKNNEKFRDAKYNEFNQLTDEQLLEKMSKEKASYAGFLADVLLANKRIKSVDDLVPPNVRASFDCIKGWLAC

SEQ ID NO: 63411 - protein, 631 aa, Xenorhabdus nematophila ATCC 19061
MLNLSKGQEAVVHAEIGLPMQVLAAAGSGKTRVLTERVRYLIENTRKDGIIALTFSNKAAEEMQIRLADLDVLSERCWIATIHAVAQRILDQYGHTIGLPSELHIYERDLDRKTVFLQSLRESGIGIDDFLNAGDEKTRKNRERIIHNYLEQFSVVKRELLTEEEIKEKYTSNESFLSVFQAYQGALVRSGGLDFDDILVYAHRILMEQPWCANIYRAKYKHICVDEAQDLNKAQYEFIKVLCGDQIKSVMMVGDPNQMIYGFNGSSSDYLCKLFLQDFSAQVFELKENYRSSKAVISLANKLKPGSQVEADFVLDGQYEIHKCQNEEDEATWICNKVNELLCQKTNIEIEGDISLTNMVVIARNRFVFLKLEKGLGEKGIPYLLKKSERQAEPSSLFGRVLDLAIRVRLNPKDWIDGKKLCTALKISVPSVWGNDNLLLDMAAAVRHSAISFPDIQADLLEEIQGLDIEKPNIPKLYDRFNTIIQGLNDVNLPKEDNELERSLQELDDFRNCWTTFKRKGLGESLMSFRNAIALGQVAENYDPTGLTLSTIHTMKGLEKDIVFLMGMCEGVFPDYRANTKKELEEELNSAFVAITRAKRWIFVSYPLQRVMPWGSLKSQTVSRFVTMLQK

SEQ ID NO: 63412 - protein, 612 aa, Streptomyces venezuelae ATCC 10712
MQVRRVVLENFRGVKSGTILLDGHSLLVGSNSVGKSTVCEGLELVLGPERMFRRPVVDEYDFYGGCYQEREGKLPEVRIEVVLTNLSDAAERRFGSHLRRWSAQTSDFLDMVPAAIEDAETGEWCLPVVFLGRYDPQEDDFIGGTFFAHPESVPDGLDGEESGLGAGLKSFTREDKRHCGFLYLRPNRTGNRALTFQRGSLLDTIVRLEAELAGPLWEKALRDLEQVAVAAAESGFGKIRTEIRDRVDRFVSLGDTADPVDLQASELTREHLREVLRLFIATQPGPHAVPFNRLSTGSLNLLVFALLTYIAELKGDKSVIFAMEEPEIALPPHAQRRLIDFVVKRMGQVIVTSHSPYVIEKFEPSRIVVINRDSKGTLSSNRVVLPGDFKLKRYRDNRRQFAEAVLGRAVLVVEGAAEAALFPAVSDVLEADPSVAGYVPLDLAGVTIFDAQNDVSVPLFAPVFKGLGKPVYGIHDQPDKPLDPKVAAKTADFTHYTVLNYKSVEKLLVAEVPVDAQRRFLATAAQRTDYPSGCARPDPSATDTAVNTLTHEVLRARKGDGYAALLIAECTGRSQLPAVLADLLLQIDRDLGTSASGGETDDTAHSDETDGN

SEQ ID NO: 63413 - protein, 569 aa, Streptomyces venezuelae ATCC 10712
MEIDPVRQEILDASGHLLIVGGPGCGKTTIALLKAQARLAALEPEQRVLFLSFSRAAVHQITDRMSGVLDRASRQRLEVRTFHAFFLDVVRSHGRLLTGRPSSFITPDRERQIQADFDGDWMSERRRLATEEGRYVFDLLAETTATLLERSAALRALYSSIYPLVIVDEFQDTNTDQWRVIKAVSGASTVICLADPDQRIFDHLDGVEEQRLDDAVAHLAPTPFDLSKDNHRSPGGGLLDYANAVLNNTLHAEPANVHTWTYTPGYGVPWQTHVHHGVIAMRDYLTTQLAHTPTIAVLASVNSLLGQVSEALATDTITGNTTLPAVDHALQWDPELTAAAGYVVASIMEWPGLPRVEAVTRTMQALADFYRVKLTSGTAGARDKIKTMENGVSAFTSGKTVRSKTVKAVTAAYDAGISYLGQPVADWPSARDRLHGSNELEEVLKHARLLRLLNATDALAWGLSDSWDGDSAYKDAAATVRAVLAAETLTAAQQSPETVSLMSMHRSKGKEFDGVIIVEGRYTGTLLDPSWSPERLRAQRRLLRVAITRARTMVLFVRPQGSQQLTRTR

SEQ ID NO: 63414 - protein, 644 aa, Flavobacterium branchiophilum FL-15
MGILIDSVRILNYRAIKNLEVNLSKLTLLVGANNAGKTSFLKALNLALGIDRKTVNREDVHEDGTLDVYKKEIIIDIRIIAVDDTGIRIQDFDENWAESDRISGNIKTDAADYQFLGIRTKYKFDNLSQTFKQESYTLKQWLPFENWTLETNEDKKFQKPDTIPLIFVDAQRDIQADLKDRSSFLGKMTNKPDIKQDDIEPIEKQINTLNESIISKSSNLKTLKEKLKELNKTVLSATDEGVEIAPINKKISDIGRNLNINFNDSGTQSFPLEYHGMGTRSWASLLTLNAFISWQEEINNPYFPILALEEPEAHLHPNAQRQLYHQLKEITGQKIISTHSPFVAAQCDLMDLRHFYKDSDGLKVGQLEFSEPYEKRIAELQDQLKDPLTDSKIKQAINEEKQQLLIEKRGKINNEEKRKIERNIFNTRGEALFSKALVFFEGETEEQALPILFKEKFGCYPFEIGINFIGVGGKDNYKPFIIFAKFLNIKWYILSDGDNTTEVDVKRQITESFGSNYFEALFTLDELDFELYVLKYGYSNEIIAEINQHETKADFLSEYIQNHNYQPKGKDVEGKDIPRNYTSDADGGRSRALLDALHSNKTKYAPLIAQAILKKKDGNGKTIFPPKIDELFKKIASDLKIDLP

SEQ ID NO: 63415 - protein, 650 aa, Flavobacterium branchiophilum FL-15
MTIQEEIINHKEGALLVMASAGSGKTRVLTERIKELLKNESEKFHVLALTFTNKAAEELKERLSDVKNIEKRAFVGTFHSFCLEVIQSHGYAINKSVQPHIFEKNEDRTNLLIQVFEKPENWDLRKHYENKDAREKQLFISNALTYISKKKKQLKGIEKFDFLDGDNEKELIQKMYSEYNDLLILQNAMDFDDVLIYAYQIFSDRPAIAKLYRNQFKYLFIDEAQDLNFAQYELLKIICNGEHRNVMMVGDVKQSLYDFNGSDYVYMKNNFIKDFNAETKKLNTNFRSSKKIIEVANSVYADAMQGSDSIVTGKFKIFDNCEDEKAEANAIVEEIKKYLKQGKYQEDGFIGDTISYKDIAILARSRYLLKNVEDLLTQEGLPSYLKKGSDSLFFDSQLMKIFDLGLRILINPVDVLHFSEILEIYSITTNISNLNNLSGLEKLKSIHNFITEDDKVLYSLLLESWTILNNQNKFNLREALVPIMSLFEVENIFKVNEPYEEYEGKTIDENTAIRFDIEELEKYYSIYARNTPAELKSLTHFKTQLSLGLILPEKEENGIVLSTIHLAKGLEYEIVFVLGLDDGSLPFYKSKQSGGKALSEEKNIFYVAVTRAKRALYLSYPKSRTMPWNPYSIKTMTPSEFLNGLKELEN

SEQ ID NO: 63416 - protein, 748 aa, Streptococcus thermophilus JIM 8232
MYLKSLSTKNYRKYGEEVQTINFAHSKWPEMLGVDDESKKINITEEYISKSSSLIVGKNNSGKSTIVKLLNTLQNTKSGSRNIFKHTDFNLKMLSDWYQENIESKSEEEIKSIDKFPSMEFLLVLGIDDENDIISSFEDILILGGIDSDEVQENAEVAEVSINIKYEVADVVAFLEELVKIKTSYFDDREQRDGQYLVYKKEIRYRKFLGLFSSNYFILNCYPLGREEPAKEFSLSSLLKVETIEANTVKNDKTLSQAYNKIVSTYIKNNDIAAIDSLVGDINYRVKDMVDANIKDILQSAVSSIESTKNLQMNLHPDVTLEKIFANSIIYEYQEGNNNIPESQFGMGYTNLMVIIAKIVDYIELYSEKDINGSVNILCIEEPESFMHPQMQELFIKNVSKAIATLLGKKQQLDTFQILITTHSTHILNSKIQSGNTLNNISYLGQTGVNNFIKNISDDAIVSGIDIDKKAYKYIKKYFRLEVSDIFFADAVILVEGVSEETYLRYEIDRHPILKYHHIKVYRIDGAYAHQFISLLELLNIKTIIFTDLDLKRTEDEMTVDIKDNDVPNIIPSNISDLAGIYAIAESSLTTNGTLQYFIKKELSDENAEYSRINSKLIEMLTDKEELIVEYKNVSAHSQGKINGYYATSFEEAIILTNAVNNNDENLNKKSLIKLLQYVHPRMKYFGDIDETSEIADKSYMYQVKLSDGKSKFSTGIVFLSITDDTFNLKLPKYIESGLESLCDYFKE

SEQ ID NO: 63417 - protein, 671 aa, Streptococcus thermophilus JIM 8232
MTHTISPENRELELGIQQKINECLDNFESFCFNAGAGAGKTYALQKSIEHILKTKGENLKLSNQKILCITYTNAAKDEILNRLGKNSSSVVSTIHEFLWGFISIQQGLLTVEHNNKIKEELNKIEQKINANPLSGSVDLEVFHKEISDEEFLKIFYSTPITPASNFKDEIIGYNKYFSVYLGNVKNFTSLVKDVEKKCKLEETLKEIENKKSRKIVYNPIRNQDKLENYVISHDTLLLYCKNIITSHNLLKRLFSDRYPYILVDEYQDTDEKVVAIIDSVREYSNSKKNLVVGFFGDSLQNIYGSGVGVLPNKEEYKSIEKIFNRRSSKQIVELIEKIRNDNFGQQSIYSDFDNGSYNFYIAGKDFNLDTFLQENSLTNNTSCLLMKNDDISKARGFDELLSVLKKFPRFSGANYENVTNEFLQKNLQQMGWFLREILTFIDLIQKSRDNNSTVREIVQFVTPSKLMITFAEMKQFISSSREINLSTLTIDKCITEIANIQGRISGEDILRKIFSIDDTAENILLNIKNRAYDYFYYSQDSEEYEREVTVIDEFFNLDVSRFIKWYSYIFDDLNNKAICYYTLHGSKGLEFDNVVVVLQDNFARKRNYCKYFFENYNTLTDSDSQFQEVRNLLYVACSRAKINLHVIYIADIQEDIVDNIKNIFDDIKYLP

SEQ ID NO: 63418 - protein, 667 aa, Corallococcus coralloides DSM 2259
MLTKVSIRNFRLLRNVEMLFDEQSTLIIGRNNSGKTSLAELFRRLVEDGIPAFTLQDFSLDTHEEFWNAYLLSTQGQLDKARDTLPSIKVTLTLSYDQETLDLGHLADFIVDLNPECSEVQIEITYALIPEKAKPFFETPATTHEQPPPDKALFFRTLKERLPHHFRCTLASVDPNDATNRKHIEWSKLRLLVQGNFISAQRGLDDITHKENDTLGKILNSLFNTAESESAHQDDRKTTHDLRAAVSDIQAKLDTGFNEKLKNLLPAINMFGYPGLADPNILTETLLDVGLLLRNNTKIRYSGNNGVHLPESYNGLGTRNLIYILLKLLEAFKTFEAKPTTPSAHVIFIEEPEAHLHPQMQEVFIKQLALLSEMFTKKSNLTGKWPVQFVVSTHSSHITNKVSFEAMRYFLPASGIPGAPATTTKIKDLKKGLKEIPTKDQEFLHQYLTLTRCDLLFADKAVLIEGTAERLMMPRIIEKLDAQLAASQGLGRQYVSIVEVGGAYAHKFLGLLDFLELKTLIITDLDSVSASRSICPVSQGTLTSNACINHWFDKSYSPAELILKTAEEKTKGLVRLAYQVPEQPSGPCGRSFEDAFILANLAIFPGCQNDESHAMDEARQKKKSTFALTYAIHETNWHIPRYIAEGLNWLAASSTPVHPSAKIQVAA

SEQ ID NO: 63419 - protein, 585 aa, Corallococcus coralloides DSM 2259
MTVTTPIDPAAAAANEAISKIRDCIDLGKSFCLEAGAGSGKTHSLVSALTHIVEKRGRELVRKHQQVACISYTNAASKIISARTDEHPAVFASTIHSFCWSLIKDYQPYLRAELSNAPNWTERLTTIGGIGNRSVEYNLGHPVANKEEASVSLGHGDVLKLATKLLGNSKFRRLLASKHPIIFIDEYQDTDIDFIEAIKTHILEKSSGLVFGFFGDPWQRIYGRSCGAFDSSKIVSIQQGANFRSRPKIVETLNRIRPSLPQSVRPHEERGSVSAYHTNDWAGERQTGAQWKGDLPPNIARDHIRAMRSNLEAQGWDFSPKRTKILMLTHNVLAQEQGYSGIAQVFKGRNDDYASKEDDHIKFLVEVIEPACRAYEKKQYGDMFSALESTMPTVRSPSDKQSWTKDMDMLIALRTTATIGAVLDHIAATKRPPLPDVLEGKEREFKNTQVADDEATSWMTRLRALRQVPYREIVALANFLDASTLYSTKHGVKGDEFENVLVVVGRGWNLYDFNELLELSSSPNSINPKRADAYERNRNLLYVALSRAKVRLAVLFTQKLSNQATETLSSWFGGENVYSLKLQGT

SEQ ID NO: 63420 - protein, 696 aa, Ruminiclostridium thermocellum YS; identical to SEQ ID NO: 63018

SEQ ID NO: 63421 - protein, 580 aa, Ruminiclostridium thermocellum YS
MMIINSDTRIPIENHFRVSAGPGAGKTHWLVNHIKNVLQNSTRLSNARKIACITYTNIAVETILKRLGTAADQVEVSTIHSFLYRHVVKPYCSFIASDVGLNLEKFNGHNDTIVSNSRIKHWLENLPCKDQLKKPCECNQLLYSKVHRKALIKWLETLYYSFDNDKLYITGDSKKAYYGKLHLTNQCLKILESELFQYKKLYWKDGIVDHNDILYFSYKLIEKYPFIIQILRAKFPYFFIDEFQDTNPIQLSLIRKIGQKETIVGVIGDKAQSIYSFQGASMTQFEKFYLPNLIDYVMVDNRRSTNQIVDVLNLIRKDIQQNKFRKVEGDLPVILVGDRNKGYEKAKELCNNSEICTLTRDNATANSMKKEIDENISDKNLFLELKILDSNSKRCNVVYSCIQAVELANNGNYKEAIKKLEYLFTERNDKHAVKKMALSCLCLLINNYNSFKDKTLMDFYSFVKDKIFTDLSKFRKGNIKTFYEKHTYQQLAAYVNIVDDISYFKTIHKAKGDEFNNVLLILKEKDLDFLLKPNLLKNEEHRIYYVAISRAKEKLFICVDNLNPQNILKLNTLFNIVILN

SEQ ID NO: 63422 - protein, 696 aa, Ruminiclostridium thermocellum AD2; identical to SEQ ID NO: 63018

SEQ ID NO: 63423 - protein, 579 aa, Ruminiclostridium thermocellum AD2; identical to SEQ ID NO: 63019

SEQ ID NO: 63424 - protein, 583 aa, Escherichia coli KO11FL
MKPHHEKEFFTLKRDFKLEISSLKLKGFRNFKDAYINFNSNTLIIGANDVGKSNMLHSLRMLLDKSISDSEIEPNELDFHLENGNSCEEFEIIIHFKNINEDAVLSILKGNVSDSGESFIKYFAQKSDLSYKLFIGDSLESLQEINSRYYLKFVNLKYIQSQRDLERFIRKEKRQLLKIAQQSLNSDEREEDDYLLGEISSDLQLINDKISQLIYVERATKEVNDELKKLAHHYSEYSVQLDTGAIGINDFIDNLQLGANTNGSNVMLGGDGRNNQILLALWKAKSIKEHDVDNEVIFYVIEEPEAHLHPHQQRKLADYLIAELPGQTIISSHSPQIAVNFEPDSIIRLLDRGGHTVAASEGCSKGISDGWEDMSYRMSILPAESFFSNGVFLIEGPSEILFYHSLAKSLNIDLDYLNISLISVDGISFKIYAAILDALEIPWVMRTDNDISKLKGQEKWNYAGINRCLDIVGIEKFEHSDKKITSLDTLTNGDWQTVSEVINKSGVYLSKIDLETDLVEELSAPILDALDKKDNQSAIEYLQKKKAIRMRILLKKIKKDLHKLNAGDLVKPLNHLVKIVKGE

SEQ ID NO: 63425 - protein, 541 aa, Escherichia coli KO11FL; identical to SEQ ID NO: 62789

SEQ ID NO: 63426 - protein, 583 aa, Escherichia coli W; identical to SEQ ID NO: 63424

SEQ ID NO: 63427 - protein, 541 aa, Escherichia coli W; identical to SEQ ID NO: 62789

SEQ ID NO: 63428 - protein, 618 aa, Geobacillus thermoglucosidans TNO-09.020
MYISKISIKNYRNFGNKPFKMKLNKFTAIIGENNVGKTNLLDSIGLILSQDITMFKKRMLELEDINYESRKKFKYDVLNASIKPENVEFPEVEIQIILEGMNKKQLSVVGDWFCDTSLEKARLTYIFKPRSGFDRKEWVKEQRELIDKIRKEKGIENPDYLVKLIEFPIKQYEYTIYGGNDVTNRCDPYFLRMLKFELLDALRDSKRELIANGESKLLYKILNYRSEGAYEDIKEVLSSLDEKMQNNPRLKDIKETLVSQLNKLSLQEKEGYNNIDFHFSSPETGELLKKLSLIYGQDPITIERNGLGRNNLLYISLILSRLAEDKISEDICFRVVGIEEPEAHLHPHLQMHLATNIESINSDRDDLQIILTSHSSHITSSLNLDNIAILYKENNEIKAHYITHGFQSDKKGKNHRRYLEKYLDATKSNMFFARKIILVEGIAEQILIPKLFELHTGKTLERIGCNIVNVNGVAFSHFLEIIRNGYFIKCVVLTDGDLGTKTEERAEKLKEEYEDDYIKVEINKETFEKELIEANKTGEGKQILLRALKQTRIQKGPKYEEEIGDRALDTDSFFTLIEDYKSEFAFNLHEELKGLKQGEAASFNLPEYIRRAFDFLEG

SEQ ID NO: 63429 - protein, 514 aa, Geobacillus thermoglucosidans TNO-09.020
MSKKLKPILVIAGPGAGKTHYLVEKICESLPSLESHRFLAVITYTNTATSEIRERLSKKIEIPQNVFIGTIHSFLIRFILKPFGSIYGVLPNNPIYKEVNVNAKDKKEEHIIKSQIVKKGVVPYEKIISLSKNLMKDYEKVRVLVSERLQYLFVDEFQDIDSGQYEIFESIRKQQKTKMYFVGDPEQSIMTFRNNGRKKPLNKRPIYEAMQSKMIEKKFLYNNHRSSVTIIDFLNKFHTSLKQVKSNEEIDSQNKVVFIDAQDIRKIIEEFNRLCNDQKYCRNKPKSRFFLGFKGDTYTKVENEYGLIQKESNESNQPKFIEETSHFITKLLNTNQNNIISYMGIDDLQYRMLCLSVIDIIKQNPFISSKSLIDYIKVIFKGDPYKTIHNKIQHKPDELAEEFIKKINSELQGRFNLQKTEDYHLTIHKSKGLQADAVLVIARSKKELMKWLETDVEARLADKQDTCRVGYVAFSRAKEFLCIACLEKVDSELREHMIKLDIEIVPLAEKLLKV

SEQ ID NO: 63430 - protein, 707 aa, Vibrio tubiashii NCIMB 1337 = ATCC 19106
MFISELCIENFRCFGSGQDKLVMPLQLGLNTLVGENDAGKTAIIDAIRMLLGTRDQESIRPSIDDFHYSDSKDQSKSLSIAVTFLGLTLPERVSFAEYLTYQPENTENPVILKVTLRAVLQNDKVRTTIFSGNPTGSHGLREIDIETRDKLRSTYLRPLRDAEKEMDAGRSSRISKILKRQSAIDEGESILDISAVSEDKFGEVVEKLGVVGIARLVNQLLEGHPAVNSTTNELNVNFLKPLQMLGDNLQANLGIGPNADDEMLKRQMLEKIGIALDNVGGKRGLGSNNLLYIACEMLLLSESKDELALLIIEEPEAHLHPQRQLKLIQYLQDKVNKHKQDHEIHLQVLLSTHSPTLASKLPIKCMVMVHKGKVLPLSMAGSTDGDYTFLERFIDATKSNLFFCRGLMIVEGDAENLLLPSVAKILGLDFTENGVSIVNVGHTGLSRYANVFSGTSEYPNPGIKVACLHDLDLIPYQAARELNLESVKDKTELSDLWDSFNTSLKAGEQVDFELLNSQLPQNVISGFELNSFDQSKVTSANREYKGDFVNGFYSSPWTLEYSLAFHGLAKEVTIAACLAKAEPSKRYDQSNHEKIVSVAEDYYEYLNGTYSESEVLAGKVYELFLSSVNVSTHIENEHAGLVLSGKASKAAAGQHLGRLLEMMDQKLESDGYTQRDRIEHWKDLLPIAVVEAVEHVIPSMLLETESD

SEQ ID NO: 63431 - protein, 739 aa, Vibrio tubiashii NCIMB 1337 = ATCC 19106; identical to SEQ ID NO: 63251

SEQ ID NO: 63432 - protein, 709 aa, Streptococcus sp. SK643
MRIDKITIEGYRRFNKSTINLNHGNFAILAGANNSGKTSLIQLLDIVFNNKSRKSVDFNDFSISLKSLLDKKVKELDLSSDFNDEKFIEFINYINEHIKIKLQIVLSYDVEESIGLFANYLMDLEDDMRNFYFEYNYKLNTEVIKEEFIKQDIKSATILQEIIEQNTESIYFYADKDFNNKKIIEYKDFKKLFHFEYISADRELDDENLKNKKITTSIISSSDSTNRDSVWDSKFDELKNKIANDLAESEIDYSFQKETQKILSDLKGSLDNVSKNEIEALEAKFHFNEKNLLNLIKDSLLINYSHSTDEFLFSLTEESQGLGISNLIYMSLQIDRFSRTIQPTTVNLFVIEEPEAHMHIQMQKVLVSYIETIFSSKKNLQGIITTHSTEIVKNVDVNDIKVIRSENNFMNRIVDLHQFINDNGEKEFYETFFKLNFADLIFSDAVIFYEGDAERMYFESLINRKDSKYSNLARQYLSYCQCGGAYAHKYFPLLNELEIMACVFTDIDYDKEREELDGICRDKSSNTTLNSILSADNKDVADIYQQQRQDREKNIEIFTQTYRDGYARTLEDALLYKIISPTGEMKSVFEKFNKSEWDKFNESFELTLPNITSGKECSMKREEIYNRLDISKENRKIDYLRDNHPEEYAEYEKFKETCEPKRSIRDIVSIIDKTNFMYSIIFKDKVNEVLPNYIEEGLSWLNNKITSTK

SEQ ID NO: 63433 - protein, 658 aa, Streptococcus sp. SK643
MAQQQNNFYKINAPAGSGKTYFISKTINDILNNEPFVKILCITYTNRASQVMQERIVSPNVEISTIHSFLNKFLKPFFRNEKVIDYYLEIYKEEIETTLKEETKLNRYKERFQVEGEVSEETIKSNLYEIYYNERQYSSVLNGGLSHDDLLNFSFKLIDRFPKIGFKLREMYDYIFIDEVQDTNADILRFFYNSAKDSSTNVYFLGDKMQEIYNKYDGSFETEFREFDGNLSKTFTTNYRSSEEIVDLLNNLYQSSSRVKQVAYKGKKGQFPQLVFTDNIEKYLFDNREAYEKFYKLRTINKKRFQNINNSGKSAEEIYKIYQKIYPNNGRVSVMDVLVNSNYDENPDVLMSFLGLLFQVLSEYHSKNYGEMIRLLKNSKNNLSFGKSVPVFDSNILKIEFHQDKVKMKEKMDLFVKLLESKDLLGIVIQELVANKVISDDFYKFIFLYDKNGDFLYTDLFCSSIELFKLIDEYNRTPMVSTQHGVKGEGHKKILFVAENSSTPGIKIYEFLNLFSSFYTQNIVFNFDSFQQFYYDFNHDILSLEEKLGKKIRKIDVGDRERYFSDFQEIFNKYLDNDYFKFICLKENKLNFQKKTAIKKIQENIFNNNLVRSVLTAYKLFYVGCSRAEEELVVLIDANQIDNMEEFKNCFNQIGFQI

SEQ ID NO: 63434 - protein, 729 aa, Staphylococcus aureus subsp. aureus IS-125; identical to SEQ ID NO: 62500

SEQ ID NO: 63435 - protein, 597 aa, Staphylococcus aureus subsp. aureus IS-125; identical to SEQ ID NO: 62501

SEQ ID NO: 63436 - protein, 729 aa, Staphylococcus aureus subsp. aureus IS-157; identical to SEQ ID NO: 62500

SEQ ID NO: 63437 - protein, 597 aa, Staphylococcus aureus subsp. aureus IS-157; identical to SEQ ID NO: 62501

SEQ ID NO: 63438 - protein, 568 aa, Staphylococcus aureus subsp. aureus IS-189
MFISTLQIRNFRNYESEIFRFDNETNTIIGENDSGKTNALTALRILLDDSYYYSSKTLKESDFFHGIQNGWQGHWIIISATFEGISEEEFDNEICASISLNSESQTILEELISNADKGVGSISLFIRPNKAIRKQLFDISTELDSHQFNEFRNSIRLSDYEFYYTSKSNLNFCINENYDKLVGRLNDNIASNPEEDDEALLGSRIDMSDIFKHISVVYVDALRDVLREMKNNRNPVKRIMETIESKISSDNVESLKTIIQQLNETITSVPEIRKIGENINRQLNSIIGSVYSPNLLLSSTMSDDMGSLAKFLSMKPEQNIDLDLLGLGHLNMIYLALKIVEFEACRSRELLNIMLIEEPEAHIHHHIQKTLFEGLNLQKNYTQILMTTHSVHLAEVSEISRMNVLKSFNGKSIVMNPANNLNSFAKEKLKKNNLNLINAVERYLDVKRNGLLFSKGVILVEGDAEEILIPQIVKKLFGINLDELGIGLINVGSTSFEYIASLFDDDRIQRKCAIVTDLDEQAIPSEHRLYKSTAQEKGQARKENYPPFLMKTIGLIVFMLIQHLKLSF

SEQ ID NO: 63439 - protein, 597 aa, Staphylococcus aureus subsp. aureus IS-189; identical to SEQ ID NO: 62501

SEQ ID NO: 63440 - protein, 677 aa, Streptococcus infantis ATCC 700779; identical to SEQ ID NO: 63092

SEQ ID NO: 63441 - protein, 640 aa, Streptococcus infantis ATCC 700779; identical to SEQ ID NO: 63093

SEQ ID NO: 63442 - protein, 675 aa, Pectobacterium sp. SCC3193
MQLTKIFISGFKSISTDHPQTISFDKNITTFIGSNGTGKSTVMEALCKLFCVDHSLRGISANDFYNNSEGSENDKHLIIEAWFNFPEPNSGELCIPPLIEHLTFDDVTDELVFRIRLEATLSYELNPLGDIEENVWILNSSDEDPDENDMTKCSSAIRNSIQLSYVPANRDPLIQLKYSSKAVLGRLLKAIEWSDENRELLEEQANSLNQLTDTNPAFAEIAQAINKSWNSVYRGRYLSQAQLKFPISNIDEILKLLQLQFDPDELGSKVSVERLSDGQKSLVYFSLIKAMFDIDRNTRKLLSEGKDCNFNHEKMRLPIFNMICLEEPENHLSPHYLGRIISLVKEYGDNDFCQVIVSSHSPSILSRIEPEQIRHFRMDNENRSTVICKLALPDDADEHSKFVKEAVKAYPEIYFSKLVIFGEGDSEEVILPKLLEIYSRNMDSHSISVVPLGGRHVNHFWRLLKSLKIPYVTLLDFDIGRNGGGFGRMKYAVEQVIKVGGGTRFIKDSILKIIPSWNESCNPNKYKIKYIKDHPEPISKRVVESLEECNVYFSSPLDIDYSMISAFPYIFCNKDEAYGEQGPNKINENKEKQLIDAVLKSDNIGVQDGFGNDYINKFLWYRYRFLSNKSKPASHLRMFSLIEDKYSNDEIIEKLPPELIRLLDKVVKLSEETVE

SEQ ID NO: 63443 - protein, 409 aa, Pectobacterium sp. SCC3193
MRSLAIKIIKLNPDIAKVFSISYSHVFIDEFQDTRSDQYELIKLLFLNNKTILVAVGDINQSIMLWADACPTVFRDFQNDFLAKNKFLLKNYRSSKEIQDVLSCFISFIDSSHEPNMVKNKPENCSIHVYDNEYKEADDLVHKLKELIASGVNEKDICVLTKQQSSLYTSVLRDKLTQTGINNLDMTDLQDFLKEPLGRIFSSLFSIYTDKSHSSYREFCDLYLEVNNVSSGDEQEADLIRKLSYHLSESKSTLSVDSNADSIVSSINKTLKFIQIGKVVSKWGQYKSKSFRDKVWSNLEYHLRYTIDTTNSLSEASKMFRAENCVQLMNIHKCKGLEYKVVVFLGIEDQAFWKYSPENFEDKCAIYVALSRAKNKIIITTAKNREFRLNGRYDNRTSEYVKVKEIYNF

SEQ ID NO: 63444 - protein, 522 aa, Serratia plymuthica PRI-2C
MEAHIHVQYTDMDKTGRFKVRRWCGDHPEVSLTSDMMENLRGVYLPPLRDAAQGLRPNRNSQLARLLHLLTDDAGRDTINTALKQLDETLKQDKSIQSTHKAISTRHDSMMGAQLAQELAVGLSVTDFQRLSSRLTLTAEAMEIEKNGLGFNNLIFMAVVLSELAKNTDSAFRSLIIEEPEAHLHPQLQRVLLQYLAGIPTGEGEKPVQLFVTSHSPNFASNSKLDSLVCLIENEAGVETFFPRDIKFEKGKREKLERYLDVTRAELFFARRVIFVEGAAELMLIDALAKKMNFDLREYGVSLISVEGLNFDSFLPLFGEQGLRIPVAVVTDADPFEEEEVEAVAEGEQAEEEIDDLLSEAAYQEETDSPDDEEPAGDAEKKKKVKRKEVYPALGDQVRLSANTIKMKNLEDDFVKVFHGLKTLEYDLALLEANRDPMLTALADPHPKISKALRKIVDAQPDNTAKTKALFCGMFERKGNGNIQKGRFAQALAEQISKENGFEVPEYLKKAIQHVCQGVVKP

SEQ ID NO: 63445 - protein, 575 aa, Serratia plymuthica PRI-2C
MKLSKEQIDIIEAPLGPIAVTACAGSGKTATAIRRLIAIRQKMQNSRGRVVLLSFSNVAVNTFNAGYAELAAGLPDDANRRRVEVDTLDGFFTKHILRPHAYRTMAAPQAAYLVSGSEPFLARFKYWREGHPPLPLKDIKLIILDGDFVFYSDTRNDPEILDKGKVLKIIHDLGRLGAYTHEIGRYWVYRTLDSQPAVLRALAARYPQILVDESQDLGTLHKEILKLLITAGVQLTLIGDVNQGIYGFAGADGEFLNSYEDRAEVTGYKLTRNYRSLPPIINIANILCGRHDEPDRLEEQGGAYFIGYKDSELSKLTEAFKAHIDELGMQHQDAVILCRGADRAAVIAGKTAPSGQGMVKVLAEASLLRDQHSNYHGCFKLVCRAIINLLEDVPHGLSSGLQGLSHDDEMKGLKRLLWRFSRSADVGLPSSALIAKTDWHSKLLTNVRVLLAEIEKHYGYKVAGKVGTKLTKKLLPDQPLASAVSAQGHGLRVETVHQVKGESIDAVMYVAKKANIKALLSGTSDEEGRIGYVAITRAKNLFWLAVPQSCLKELKENLINAGFQERIKPAVIDPA

SEQ ID NO: 63446 - protein, 693 aa, Pseudomonas pseudoalcaligenes KF707
MPGKTAQLERSIINDLLPSLDFWLDVPLSEIQHVVHILPTLDWNGGLLGVRLKYQVELIAKLKADYVAQRSAALEAGAKAPGGQVGNIQVWPTCLTEFLERRLRTYIALEAFALDPAAHTPPVKGLATPQTLPENMLPLEKNPFKHLIKIDEIAAQRDFADAGERAPTGEDSQDMSTRRYKRRLSDQLRSYYDRHLDPAKTPSAEDYEALDAIQTAEQNFDKRLEVGFAAAFEELEDLGYPGISNPKLKITTQLRATDGLKHGSAVQYQVTDLAGEGLKPLQLPEDYSGLGYQNLIAMVFMLMGYRDEWMRVGKASADTDPGAQTQIQPLHLVLVEEPEANLHAQVQQVFIKKAYKLLRKHDELGDSTTFSTQLVVSTHSSHVAHEADFANLRYFRRLPATSSGETPTTTVANLSYIFGEGDETQRFVKRYLKATHCDLFFADGIIFVEGQAERILVPHFIRHHFDSLSRRYISLLDLGGSHAHSFKRLVDGLGLTTPIIADLDATVATKVQTQAGTEAIRWKATKPQRGADQKTGSPVLKDWHPSKEFIDELVALKSEEHESSSCEGYDLYVAYQKPLLIPSGDGSGVEIIPRTFEDALILENLEVLANITGSRTSDKIKAIVTDGLSGDELADELFQLLKTAEKAAFALDCLMLEDARAVIPPRYIHDGLTWFERAVGKDIAENEPTAVSV

SEQ ID NO: 63447 - protein, 355 aa, Pseudomonas pseudoalcaligenes KF707
MTVEVIALGSSDTDDADDADDADDAVDAEIGACLDPKAPKSFFLYAGAGSGKTRSLKSALQSFRERYGAGFRRAGKKVAVITYTNAAADEIASRVGQDALFPISTIHSFCWSQIGSYHADIQAWLLANLPRDLAELQEKQVKGRAGTKAALDRERGITAILKRIGWLHTPRRFTYNPNGDNFGSDSLSHSEVLKITADFIVSKPSMQAVLVSKFPFLLIDESQDTSKVLMDAFLALAAANTGRFALGLFGDTMQRICADGKPDLGRDVPEDWAKPVKRMNHRSPQRVIQLGNSLRSAVDGQRQLARDDSAAGIVRLFITSATTLDKPAVEQQIRERMAEICDTKAGRKGKQPSRP

SEQ ID NO: 63448 - protein, 578 aa, Xanthomonas citri pv. mangiferaeindicae LMG 941
MDVDTGDSIVIVGENKVGKSNFIRALQLILDPGLSERERQLGLEHFWDGLGADKIGETIEISVDLTDFTVDPRLMAHLNDCVIEAGPPMVARLTYRFQPKAGLAGAPDSLRDYEYVIFGGNDPDMRVGGSLRRMLPLDVQVALRDAEKDLASWRHSPLRPLIEDLAASLDEDAREEIQQQVDEAQQELAGHEEVIEAAERISERLIALAGNQHAVPLALGLAPTRVDALLRSLRLLIDNGARGIADASLGTANLIFLALKSLELDRLVSDGERDHTFFVVEEPEAHLHPHVQRLVYRYFLGTGIQGDEDMPPLTTILTTHSPHIASVAPIRSIVLLRHDAAEEKTVAVSTANAPFTTRDEEDLQRYIDVTRGEIFFSRGVILVEGDAERFLVPAFADALDIPLDMLGITVCSVGGTNFTPYVKLLGPQGLDIPHVILTDRDPIDGRPPRVRRRLANVLDAVEPGADHSGWDVDDVLERAEELGYFVNENTLEPELFAGGLAEAMQRVIRRELPLNQANRDALQEWVDDPDQLDEDALLLMIERIGKGRFAQALAVSVSDDTCPDYIRSALEHIRDAVV

SEQ ID NO: 63449 - protein, 606 aa, Xanthomonas citri pv. mangiferaeindicae LMG 941
MPSSSVSSAYLAYAADLAGNPGQLAAYNSQGHCVVLAGPGSGKTKTLVLKLARILAEDVRAPRGAACITYSQECARELTRRLESLGLREAPNLFIGTVHGFCLRHLVMPYGRLAGLPIPFPLAVATQRVNDRLLKQSGDALFGANHPYKAIDLGRHRRSVLDRTSAAWRSEEELAAWAIAYEAALRNEGLIDYDDMVVFGQRLIAEHDWVLPLVQAKFQVLAVDEYQDLGVALHRIVKRLAFDGGVRLFAVGDADQSIYGFTGADGGLLTELAARGDIEQVQLQLNYRSGTRIVNASELALGEARGYRANDPTRQASIAFVLRPGGLADQAAHAIAHIIPSALAAKPGRTLGDIAILYKDYRAGDVVAEAATSGGLDYIRVDNAAPYRKVGLTSWVEDCAAWCAGGWRTGRPQLRGLIDRYLAFHRAHLDESQAGREAQALTALLWSLRQDAQPAREFVAALRAGILDAVLAAEVALADQKEQLDRMSAALAEGGALASLDIVSLGGRDGSPAHLNLLTLHSAKGCEYDVVIMVGLDLGNLPWRNETPEKLRESRRLFYVGLTRARDEVHMLYSGFVDGHYGPMRLGRSPFLDDLEERMRIAGLQQ

SEQ ID NO: 63450 - protein, 580 aa, Cellvibrio sp. BR
MYLAQLNIFNFRKIFKAELHFQKGLNVLVGANNVGKTAVIDALRALLAGHEEPYPRLDTEDIHRPPSGKSVGDIVFNYIFKDLNADEEADFLAALKPGSAEKMEAHITIRYSEADKTGRLRAKRWCGDYEEVGLTADMMENLRGVYLPALRDAAQSLKPSRTSQLARLFHLLADDAGRDGINQALQSLDEELKKHQPIVTTHAAISGRHNSMLGPQMAQLLNLGLSGSDFQRLAARLSIMVDAFEIEQNGLGFNNLIFMAVVLSELTKNPESSYSGLIIEEPEAHLHPQLQAVLLSYLETIQSKEGERPVQLFVTSHSPNFASIANLDSLACLVDAGGKVETFFPRNIKFEKKKREKLERYLDVTRAEIFFAKRVIFVEGAAELMLISVLAEKAGVKLREHGVSLISVEGLNFDSFMPLFGEKALKIPVAIITDADPISQPTDGSKPQALYPTLTDVVTVSDNTAKMKKSEDAIVKVFHGVKTLEYDLALHANNRLAMLAALKELHPQIGTDLETIVAAATDDAAKAKALFRGMFERDQKNVQKGHFGQALAQIFSDGADCTVPNYILNAIKHACQIEAK

SEQ ID NO: 63451 - protein, 575 aa, Cellvibrio sp. BR
MMSENSQQQQDIIDAPLTSMSIIACAGSGKTHTAVRRLAEMRRQLGEHRGRVALLSFSNVAVDTFTKGYRELYAGTSVSSASNRVEIDTLDSFIIRNVIHPHAHRTMQSNKAPYLVTGGEQFLNGFTFWNGKFPVCISHMHVGISNNIENFYYSQNEKIVQLDRDYSLKLVQRLGCTGAYTHNLGRYWCYRTLRDQPGVLRALVTRYPYILIDEAQDIGTMHQSIIELLMTAGVRVSLIGDPNQGIYEFAGADGKFLSEFGNRQNVVYYPMTRNYRSVPLIMDVANRISARNDEAHRNAPDSPHGAFYIPYKTADREKMIESFRTAVIAAGLSIENSAVLCRGRELADKLAGRTAPDGQGLIKSFALASLNRDKHQDYLGAFKLVTKCIVGLLAEPPSDLVTMIIQPNRYPEIRQISRLIWGFTRDANIGLPSSNLRADKEWHPLLLARVKVLLITLDQKYGLKSAENLGNKLSKKGLTDAPLIDPNDLVTGQGARLRVDTVHQVKGESLDGVLYITTKEHITALLAGVNSELGRIGYVAITRARNLLWVGVPESSLKEFKPALEAHGFQLVGST

SEQ ID NO: 63452 - protein, 630 aa, Pseudomonas stutzeri TS44
MYLAELTIKNFRKLRDAKLEFQPGLNVLVGPNNVGKSAVVDALRTLLAGHEEPYPRLDIADRHRSTEGESEGDISFHFVFKDLSHDDEADFIAALQPSADNTMEAHIHVRYTDADQTGRFRVKRWCGDHQDIPLTSDMMENLRGVYLQPLRDAAQGLRPSRNSQLARLLHLLTDDEGREKINTALKELDEQLQQNEAIKSTHAAISTRHGSMMGEQLAQVLAVGLSATDFQRLSARLSLSAQSMEIEQNGLGFNNLIFMAVVLSELAKNPEAAYRSLIVEEPEAHLHPQLQRVLLRYLAGIPTREGEKPVQLFVTSHSPNFASNSKLESLVCLVENEAGVETFFPRDVQFAKGKREKLERYLDVTRAELFFARRVIFVEGAAELMLVDALAKVLGFDLREYGVSLISVEGLNFDSFLPLFGENGLRIPVSVITDADPFEEEEVSEPAAAERPDEEIQEELLAEAAYLDEAGAKNGDVAEQLADEGGESKKKKKLKAAYPSLGEAVRISSNTLKMKESEDQFVKVHHGVKTLEYDLALQAENRDAMLKALAELHPRISVALQKIVDGVPDNTAKAKALFCGMFERKDTNSNVQKGRFGQALAEQIALTPGFKVPEYLEQAIRHVCQGADKP

SEQ ID NO: 63453 - protein, 572 aa, Pseudomonas stutzeri TS44
MKLSDEQKAVIEASLEPMAVTACAGSGKTATAIRRLIAIRQKLADHRGRVVLLSFSNVAVNTFNMGYAELASDLPDDANRKRVEVDTLDGFFTQHVLRPHAYRTMGATQTSYLVSGSEAFLSSFQYWKSKTERPIPINDVQVGVEDGKLIFFIDTRGAVEKLDYGKAQVLIEKLGRTGAYTHDLGRYWVVRTLLQQPAILRALATRYPQVLVDESQDLGTMHKVTLEILIKAGVQVSLIGDVNQGIFAFAGADGMFLKTYADRSGVKDYKLTRNYRSLPPIIDIANRLCGRNDEPDRQPGQGGAFFVGYKDAELPKLISSFKARLGELGIEEKDAVILSRNADRAAKLAGKTEAPGQGVVNLFAEAALARDQQHRYQHAFRLVCNAVVSLIDDAPRGLSSALQGAPHEAWMLGLRRLLWAFTRNTETGLPSCSLLAKAQWHPKLVTNLRALLTQTDQLFGLKIASAFGNKMAKKRLEDVALSGAKADDQEAHGLRVETVHQVKGESISAVLYVATKANITALLAGTATEDGRIGYVALTRAKNLFWLAVPNSCLDAMRTELINAGFIEAAAQ

SEQ ID NO: 63454 - protein, 659 aa, Escherichia coli 541-1
MKITQMEIKGFKSFDNVGQTININSFTSLIGGNGTGKTAVLLALTRMFGVKSSDRIIQVDDFYVPPGDEIDTQDERELSVRVKFEFADLEDGEDNTVADFFKHLVSSEAAEIPYCTAKLKAKWTKTNLAEGDIESDLVWEIGEYEKNITAYERSKIHVHYVPAYRDPAQQLKQTAGTIMHRLINAVEWSEKMGSTVDEVAVSIGNQFQEEVGVKTITSSLGKNWKTLFSGGYFEELQIKPVVNGIEDVLKHIDTVFLPSPNTQPLPTERLSDGMKSLFYLSLVKSAFDIEDEIINSEGKELSISVEALDPPNLTIILIEEPENHLSPQYLGRIVKLCEEISENDRAQILLTTHAPSLLNRVEPENIRYFRLNDNKNTIVKEILLPSEEEDDADSVDTFTYVKEAVKAYPEIYFAKVVILGEGDSEEIVIPKIAQVNGIELDTSLITFAPLGGRYVNHFWKLLNELSIPHVTLLDYDLRRGGGGWGRIKYVIKQLIANGCDKNIILNTTKGMISDAELQEMHEWGEDENIEKSWIKFFEDYNVYFSYPYDLDWIMLNAFPTSYHSFIPDNGGPKILKKTDAKYIDKTKNAIASVLKKDAEDIDIKSFKDHEQYYWYRYLFLGRGKPLSHNYVLNKLDNDSLKNDAPIVLKELIKKVRGLL

SEQ ID NO: 63455 - protein, 615 aa, Escherichia coli 541-1
MPTIKDADWVLKDIQEVEDEAMKVIRNSTEHNLVLAGPGSGKTELLAQKACFLIETGKCSKKKIIALSFKKDAAKNLQDRVNSRLNLKFRSKFESTTFDAFCKSIVDRFKGTLPKFYRPSDDYEIISLNKKEFIAEIKREALGFEGLTSFELSKIKHSNFEEKYIVIPYKEEARHTINGRIRYFVWTHLLKGKSRISFKMINYLANRIIKKNSFLSNAINSTYEYAFIDEFQDTTSKQYEVFKSIFFDRAIKITVVGDTKQRIMGWAGALPNAFDLFRKDFAVEKHNELARNRRSLKNLISYQRLMEAFMNEAEKKAELILNKGEGLARLMQFDEVDQEACYISLLIKKWIDEGIDPRDICILSKSVAEQYSQKIISELDDSGVKCRIENDYQELLNEAIVQLVLQLLMFVCNRKSIECWGATMELLCNIRGVSKRGDVTRLEKELSNFIKANKEVKSDVVDYLKGLLTIFGIPELKSYFPQYMNGNGLEHNINILSKYLEALDIKNNMSNAIDMLSGNETVPFMTIHKSKGLEFKKVVIVGLEPDAYFGDEEGQIENQKTVFVGFSRAIDEVFMTRCKLRRDNFGNVSRQDFNKIPLITDMLTYCGIEAESYPG

SEQ ID NO: 63456 - protein, 688 aa, Sphingobium indicum B90A
MRINRAKIENFRLLRDVEIGFEEQTTLIVGRNNSGKTSIAELFRRLLSDRALSFRLEDFSLGCHECFWTSLVSFRAQQDSSETLGQLPAIKLVLDIGYDVDAADLGPLSECIIDLNPDCHEARLEFRFAPKANALQALFVDLTEPLEDPEADRARLYRELGNRIASAYAGSLEAVDPNDPTNRKTLEPKILSALVGGGFINAQRGLDDDTFRERDVLGKVVEVLFQSALTDELDPTRRSTAEQLKEAVDQIQGDLHIGFNAKLTSLLPTFDLFGYPGLVDPGLVTETSFDVDKLLSNHTRLRYRGVNGVTLPETYNGLGARNLVYMLLQLLRFFREFQGTPTAAGVHLIFIEEPEAHLHPQMQEVFIRQLEYIANAFVAQLNADRPWPVQFVVTTHSPHMANEARFESLRYFLSVTDGPGLRRSVVKDLRQGMGGAPEEDRNFLHQYLTLSRCDLFFADKAVLIEGTAERLLLPAMIRKTDAAAQGEPQLSSQYLTVMEVGGAYAHRFFGLLAFLELRTLIITDIDSVAPGAKNKRVAVRVAEGTFTSNACIKSWYEPDVSPAQLLDKSTEEKTDGGRRLAYQIPEQDGGPCARSFEDAFILANPELFDLGEGDQATLAYEHAAEQKKSSFALEHAIVNTEWRTPRYIGEGLRWLAQGNPAPTLGPDAIAAELVAEVIDAADGAQVDG

SEQ ID NO: 63457 - protein, 595 aa, Sphingobium indicum B90A
MGPRSMADEETAADAAGRLALERVYACFDAGQSFRLEAGAGAGKTYSLEKALRRLIELRGTELVRKRQQIGCITFTNVAKDEIIARVQAHPAVRPETIHGFCWSVLQDFQPQLRAIVPDLPGWGERLADAGVGGLGARKVNYDLGYPRVTPDEVSLKHEDVLTLMTELLARPKFRLVLAKRYPVLLIDEYQDTDAGFVEALKQHFLGTGTGPIIGLFGDHWQKIYGEGCGAVEHAALEVIDKNANFRSAEPIVAVLNRMRPDLEQIPSDPDAPGEARIFHTNAWPGQRRTGQGGGHWTGDTSPEAARAYLDHLKQRLSDEGWDFAVERTKILMLSHSVLAKEQGYPTIQSIYGQFNDAWLKKEDPHIKFLADQLEPACAAFQAKRYGEMFESLGAGRPCIRRHHDKVAWTQSLEQLIQLRATGTIGAVIDLIKGQAHMHLPEAVLDREQRLADAGPEPVEGESRRIAQLRRLRDVAYTELMAVDAFIDGHTPFATKHGVKGAEFENVLVIVGRGWNKYNFAQMLERLDPGPPADKVESFESNRNLFYVACSRPKRRLALLFTQILSELAMAKVTALFGEANVIPLPADPAGGAAP

SEQ ID NO: 63458 - protein, 540 aa, Mycobacterium chubuense NBB4
MRLTQFEVRGHRVLQDMTVDVRDHLVIIGANDVGKTWILRLLHALLGASVQQLFQTFTLTDIREGEDELSVVARLEDLDADELALFPFETSVEAGEPNYLVLQLEVRPSEEDPDNVAITRFFPDSGTRRGPSRNQLLAIGWRYLPATRSSGPEFMDGRTSPFRTMLDSADLGDEIEDFGALLQEFNNKLEENTALLELRKTIATHLSRSVPKTYTEDALAIRTSADPVDQPLQDVTIYLREGDRFKSLSEQSDGMRQLMALTFFDLAQVRSNIVAVDEPEIHLHASSQRTVAALFAESPKQRIVVTHSPYIVHRFEPKHVLVINPASEARQLAEENFSDVEKEMLHWWSPYLLESLTARRVLLVEGLADRILIEAAARALGIGLDRIGVSVLALDGADKFSHVLKILGRNGFRLPVCGLCDEDREQSWAGTLGLRPRALEQNGFFVARKDLEHEYVRAAGVKKVVDALIAAKVARTEGITQSTGAADIDSVTPDQLGTFLSSVDSRKVPAARAVAPILTPEIVAASPSLMGLISFLKADA

SEQ ID NO: 63459 - protein, 551 aa, Mycobacterium chubuense NBB4
MDTKKPRGRQQEAVESSANCLLVIAPPGCGKTEVLAMRAEHLLASGKIRPNRRILAITFTNRARDNLRSRLEEQLGGNRLRSSILVANFHELSARIVEAHHRTIGLAPGFTYPRPAWLRRALSELTSDRARHRQVKEILGSLKREPLTDGQLVERIRETGNSDVLALEERRLEANYIDFGDLLRHTQLLLRNKRVSHLFQLHFDAILVDEFQDLSLQQYEITQHMCSRNITYVGDPHQGIFGWAGADPVHVLQDIRSRADQTIDLDVNFRSSPAVLRVINSVSSSLGSAPLHAAEPEEWKSGDHAYAVQYATDSDEAAGIVSLTDYLAEKCPEDTVGVICRAEYRRSALNSAYENARYTPQFWDYALDNPRVTRLLKRHSKHVDAGLTFDQQVDELRERATGSFNPADVDAISEVHEACEQLMQHTDSNLPLSEFMNRLRDTTMSAISPGVHVLNAHVGKGQQFDWVVVMGLEEGHVPSSYSTTPAEVLEDQRILLVMLSRARKGVFLTCARSNRNQYGRLFHNEASRWWTDMESSCQPLSPSVAVAMRVM

SEQ ID NO: 63460 - protein, 689 aa, Streptococcus canis FSL Z3-227
MKLTKVIINNFRSFGESQIIELNNQTVLIGNNSSGKTTVLQALSKLFSDKQNDRIIKKSDFHLLKGSRPGENTKNLFIETIFEFDELDGTLCGPAIPSFFEHFTVSQDGAKPFLRIRLESSWEDDGTVEGSVDTQIYYISSDEDTIRDEDKHRAPRKDLDKIRVLYVPASRTPEKELGNASGSMLSRLVNSINWTEDEINEITDKIDELNNTFLSENGALTQINKEVQKSWKLYHEDNRFSQAELIINSSEMAAALRQIALKFSPTTTEEAFTVSDLGDGLRSIFYFSLVDSILDIELEITKDREENPDNPRFKLIPPVLTILAIEEPENHIAPHHIGKLIKRFKQLGNNDNSQVILTSHSPAIVKRIDPEDLRYLRIENNDRVLQTIVSDIQLPQAIDESYKYIKGAIQAYPELYFAKLVVLGEGDSEELLLPKFFDLLGKEVDSSQISIVPLGGRHVNYFWKLLNALRIPHITLLDFDNERYGGGWGRIKYISEYLYELNTEFREWFDTQGLDFSEIGEREFESIDAPRLNNWFNRLEEFSVYFSSPIDIDFLMLQHYKEHYLDMLSSKEGPVVSYADSGGNSKKVKLTDLDCIDKLQLEGLEKRIEEAKRATLKDKSGSGVSFTKEEKELMIWYQYFFLGRGKPTTHMQFLSSISDDKLKRNLPPVFEKIVRRAEELLGDIDYGEE

SEQ ID NO: 63461 - protein, 605 aa, Streptococcus canis FSL Z3-227
MVKSDDWFPKGVIKLEDAALEVVKDVTNSLVIAGPGAGKTELLAQKLDYLFSTNKCISPKKILALSFKTDAAANLKDRVKKRYGDEYASRFTSLTYSAFEKRILDQFRDVLPEDIRPSRDYLIEDWDTIKELLSMNGINVNGLRMSYIRNIVENIILNDGNTHKLKKDLLKGTQDNKPVLLYRQITKLSTQIIATNEYIRKALQMTYDFVFLDEFQDTTYAQYNLLKTCFLGSSCKLTAVGDNKQAIMRWAGAKPDIFPDYIRDFNSNEYQLLMNHRSVPKLVEFQKEVHQILNSNHSSIQTNNYPEFQEGEITLFEFENESLEAELIANDIESKIQGGIRPSEICILAKQKIDDYSSKLITTLSSKGIKARIENEYQELLKDSTCNLLLDLISCSQGKRDPLIWENISNFYGNINGIDEFTDELILAKSYKEIDNIVSDITYLISNFIPNEESMLNLIDCIIEKIDEKRIISNFSTYNGKSDLDIIVKNFSKLLYKEYSQTQGEWLDIVSSFKGENSIPIMTIHKSKGLEYEAVYFLGLEDSAFWNFNNQPEEDKSAFFVALSRAKSHLIFTYCKLRNNRAQNNRNINEIYSLLTQSNLVKVGN

SEQ ID NO: 63462 - protein, 713 aa, Lactococcus garvieae IPLA 31405
MILSKLQLVNFRNYRSTNFNFSEGANTIIGENDSGKSNAVTALRMLLDEEYYYSVKSLKESDFNREINGFKGHWIIISAEFDNISENEMNKEVIASLRNEMTNVNLEQGHVSLIIRPNFKKRQEMFEASTNELEFENVRSSIRLSDYEFIYRGKMITDFTDERVYKEIVGDFENFISPDPNDKQENAQVIGTKIDIKDITAHISIVFIDALRDVLRTMNSSSNPIKKIVGEIENKIQESDFIDVKNKIKDLNQTITGIKEIGNVRHDLNNKLVDILGLVYSPELSLTSNISDELKSLSKFLNIKPNDEDSIGSLGLGHLNMIFIALKIVEYNICSSREVLNIMLIEEPEAHIHHHIQRTLFQNLGIKEKTIQVVMTTHSPNIAESSEISRMNIVKSIDGKSVAMSPTSGLNTFGSEKLNIKIDLSKAIERYLDAKRSAILFSKGVLLVEGDAEEILIPNLIKKTLGVSLDEIGVGVVNIGSTAFEYIAPIFSKERINRKCAIITDLDKQAVSEKIIKKGEIVGNKLYKKNAEEKGNDRREKIENLFKDNDWVESFYAETTFEIEFAKSNPDNQIYLKTISDLYKSEGAITNWENKIYCKENLYHEGMLVASSEEIRSNGILSLAENIGKGWLATIMSENILSSQERFVIPHYIIKALSFISSESINEKIIKKMIVHSMGKEESIDNFLLNNDNAISYPCLYSFINEWKKEREK

SEQ ID NO: 63463 - protein, 588 aa, Lactococcus garvieae IPLA 31405
MNNNFPRILEGLSESQKNIITDTTNNLYVTACPGSGKTRTLTRKIAYTSNLYYKSLKKIIALTYTKRAANEIIDRLEKIGVTEDQIWVGTIHQFCLDFILRKFGQNLERTSRGIKIIDEYITDKYLKEGCKELNIKYNPYNPPNLKLDIKGNTEETNIENIKLVNNYHKRLKDNNEIDFDLILTLSLKILEENPVASTIISNNIRAVYVDEFQDTNEQQYKIISNLAKSDNTIKFLFMGDSDQAIFTSIGGVAKTKNELEKITGLSFISMELNGCYRSTQRIVNLYSQFQQKNYKITSLARYRNKPGVVKYDTHTHKDDLSNKISIIIQDLLNENIPEEEICIIAPNQFLLAPITSDLKDRLPNVSFRSQDVYPIKPDDLNIFYKMSFLVFTTSGQRVALRKKIASEIIDSLKRDYYVPLNEDFKGIDLLDKLNSIKSEEVNGLIYLHDKITRLFIELEIKKEEFKNLFKQMSEFFTKTEERINNTRLNLNTDIENFRNIYKTKKGINISTIHKVKGEEYEVVIAFGFLEDIVPHFKSKNRTEESKKILYVAISRAKQRIYIFSERGRKNGNYPEKKPTKVLQAAEIL

SEQ ID NO: 63464 - protein, 729 aa, Lactococcus garvieae IPLA 31405; identical to SEQ ID NO: 62500

SEQ ID NO: 63465 - protein, 597 aa, Lactococcus garvieae IPLA 31405; identical to SEQ ID NO: 62501

SEQ ID NO: 63466 - protein, 595 aa, Parascardovia denticolens IPLA 20019
MLLESVQIKGFRNFVDTVVHLDKSTLIVGGNDTGKTNLLYAIRILLDPTLSSKELELTESDFHVGDACEKIEITARLVEVTEPCLISTFAGSLSDDGVVYIAYSVTKDGDYKFATGCPVTGFTGAHADDKNFPDFEDLDECTSRYYLRHLSMEYVGSSRDLSGFLKRQQRTLLELARNNRTDAEETEDANSIQDIQTSLENLNADISDLHYIADSLKAVNNEMGSLSANNAGYEARLVAGNTDANKLVDNLRLAYLYEDAPLTFGGDGRSNQLYFATWMAERKISPTSAQEKVVLFAVEEPEAHLHPHQQRRLAQYISSGLNEQMLMTTHSPQIISNFYDGRILRLSALSGQSGTMARGCEATVDTALEHFGYRLNPITAELFFCSGVFLVEGVSEKIFYTALSGDLDIDLDRQNLSIISVEGVGFKKYVQVCITLGIPFVLRTDNDIFAIPKTSSYRYAGVQRAVDLLKILPTSPERDDAVKQSEKDAPSLEWNGANPGQENIDAGKRIIGKLKPCGIYLADKDLETDLANSAIANQLQSHYEISDITKLIAKMQQRKTENMHGFISEANGLDQLANSALAEPLYTLVAQVGRA

SEQ ID NO: 63467 - protein, 358 aa, Parascardovia denticolens IPLA 20019
MNIKIAELLQHELIMLLGRIGLRVVAVGDLDQAIYGWAGKSSAYLQKLVDDHSFSHFELTSNHRCHHSIIAYSLQLLGREDISIDDDKRVFLAHLNGDESAIADKISQLIPRIKSKYDILDSREIAVIARSNDTLDRIAESLTVPYKRYENYVLDNGFSKWKRVFGQLLQTYYSESRFFGDFLVQYFNEDVQAKKRQECAQLIKVFLDIDENLLGQSSQMAARIANLCEPNMGTPEDLQAYRDATADLDLLHANYRQPRRDEISLLTYHKAKGLEFDAVFCLDTYQYVMPPYKYEKMPYDAFSESLSMHYVGITRARKVCYIPIATYRHNNKGSRFKTVPSEYLNREGLRKLRFDVRW

SEQ ID NO: 63468 - protein, 686 aa, Pelosinus fermentans B4
MYIKKVEVKNFRLLKDVTLTLEEKTTVIVGRNNSGKTSLTEFFRRLLSDNSPSFALVDFPLVIQQEFWDAFVRKSEGVGESETVELLPTIEAKITIVYDPRAHDLGLLSDFIIDLDINSKEAIALISYKLKDGKINALFENLTYMPDSDLPRQKRDFFRSMKERIPKLYVASLSAVDPTDDSNQKSLDLLKLRSLLQAGFINAQRGLDDTTHKERDVLGKVFERLLTSASAETAAADERTIALALERAVQGIQSSIDSDFNEQLNGLLPAFSIFGYPGLNDPHLCTETILDVQRLLENNTRIRYANSNGVSLPETHNGLGSRNLIFILLQLYEFFKCYKGKQLAPGVHLIFIEEPEAHLHPQMQEVFIRKLSELANVFSELYNEGESWPVQFIVTTHSTHMANEAPFEAIRYFLSTRDDNKYTLIKDLRSGLRGESWEQDREFLHKYLTLTRCDLFFADKAIMIEGPTERLLMPKLIEKVEGSLSTEQKLSCQYVSIIEVGGAYAHHFFKLLDFLELRTLIITDMDSVKEGQSQSGRRTYPACKVAEGTRTSNACIKKWFQDDHVSPDTLIGKLDAEKIDGFRRIAYEVPESQEATACGRSFEDAFMLANRTLFHIQGINEAEVANDAWNKAENIDKTDFALKYAIESTAWNVPRYIKEGLIWLSECVSHPATAREVVGQEEVDHA

SEQ ID NO: 63469 - protein, 576 aa, Pelosinus fermentans B4
MPDTPNLNPAEIAAQESISQMIHCITQRNSFILEAGAGAGKTYSLIRALRFLIETKERELLRRNQKIACITYTNVARDEIEARTDRNPVVLSATIHAFCWSLIKDFQPALRCMLPQIGRWAERLVEHDDISRFSIEYDLGYPKINESEILLAHDDILPLTVMFMSYPKFRAIVTNRYPILFIDEYQDTDSAFVEALKRHFLDTGEGPFIGFFGDHWQKIYGNGCGKIEHEALTVIEKRANFRSVRTVVECLNRMRTELTQEVSDPEEEGFVSIFHTNDWVGERRTGAHWAGDLPVEEAHSALSIIKTRLSEQGWDFSPDNSKILMLTHNVLAEEQGYKNLAAVFSRTESYIKKEDPYIAYFAEILEPVCKAYENRRFGEMFAAVSTRTSVIRSHADKAQWIENMATLLRLRETGTIGSVIEQVKNTRRPRLSTRAESKERELEAATEEISDSLERLQRLKNVYYKEVIALTNFIEEKTPFATNHGVKGAEFENVLLVIGRGWSQYNFGQMLEWAGNGIPSGKHDSFVRNRNLFYVACSRPQKRLAILFTQKLSNTALSTLGEWFGESRIHNLDIYY

SEQ ID NO: 63470 - protein, 686 aa, Pelosinus fermentans A11; identical to SEQ ID NO: 63468

SEQ ID NO: 63471 - protein, 576 aa, Pelosinus fermentans A11; identical to SEQ ID NO: 63469

SEQ ID NO: 63472 - protein, 613 aa, Rhizobium leguminosarum bv. trifolii WSM597
MHLDRLRLTKFRSFEDGLIEFHPHLTAIVGENNGGKSNIIDALRLLFQPTNGRREIYCEESDGRRGLEDRSFRIKAKIGGLSPGQKGLLISAVPDPLKNEAVFGLDFSKVDDLRYKPKHWSGKFEAQPEVGSTDLIRYIYLPPLRDAQRALASGNPTRIAQLLRYFLDKDGEKEFRDDLQRSGTTAALTAVEGEIGRLLRDLTTGGREQKAALGFAGSEDLYDIARDLRFKLADVGIADPEELRHSGLGYANLLFMATVMVELQRSKDADLTLFLVEEPEAHLHPQLQMLVLDFLREKAKLSSQAKVEPGQPEGRIQVIVTTHSPNLTAWIEPENLLIMRSLEGGDGRQVSNAIAVKNLGLDKRDLTKISRYLDVTRSAMLFGGRVMLIEGMAEALLLPVFAERLLSRRHEAEHSDRQKWKRFQSASLVSIDGVDFIPYVSLLLAPSSGARIADKVVVITDRDPNAPGDRVEKLQTLAATYGAAVHLRVSVNEITLEQSLFCPSNEAVLKAAFLDIRPGSGKKWSERIEAQGEADRPAAFRSLFTEQSNPVRKGDFAQALSYILSPKDTDYIPDFLLKQHPEDKGAAKTAYKAIVDAFEVPSYLATAISEIVA

SEQ ID NO: 63473 - protein, 590 aa, Rhizobium leguminosarum bv. trifolii WSM597
MTTDEDRREAEVRQQTVISHPGECYVEACPGAGKTQTLVRRVILRAAELPPRRGLAVLSFTRSAVDEFKDRYAGESTSLSLGFPHFVGTFDAFLNQFIVLPFGVAGCRDRLTIVDNWENIDISHGRAKAKGRPISLKHFDAITGALHPNHLKRLSPEQVARQADYEAAARRCIQGLGKKGMLSAVSARQVAAEFLKDKERAGALGAALSDRFAEIIVDEAQDCNDDDVLVLEWLRSYGAKLVLVCDPDQAIYGFRKGAADTFPVFKAKLPSLALTGNFRSSKIICTAAATMRTRNNADLAVGDHRDFSSAVQILTYKNTVASKAAVAESFKELMKAAKIEIHAGIVLAHKRSLAERISANLPEPDGSGSRIGRLIDAVIGYHSSGATARQKSSAVRAVIRLLMEIEKFEESEISSLRPLAHDLSLSREFHRKAIEVLDRLSFSCVDQAAATAWLSEAREVISEQTGVGSIGSALPAKNGWAQKLIKTEPTIGIPYATVHEAKGRAYDAVCLAIDAEGDLLLEWRNRASATSEGLRVLYVGLTRARKLAVIAVHEDHKDTLEQILRGCEIAIHADKKTKSGMQKITETVVK

SEQ ID NO: 63474 - protein, 613 aa, Rhizobium leguminosarum bv. trifolii WSM597; identical to SEQ ID NO: 63472

SEQ ID NO: 63475 - protein, 590 aa, Rhizobium leguminosarum bv. trifolii WSM597; identical to SEQ ID NO: 63473

SEQ ID NO: 63476 - protein, 688 aa, Rhizobium leguminosarum bv. viciae WSM1455
MHIEKVNVVGFRLLEDAQIMFEPDSTVIVGRNNSGKTSLTDLFDRFLGDDARKFRLEDFSAGVRPKFMEAKALMDGGAAGDAVLAILPRISLTLTVRYAKDEKYGPLAPFVIDLDENTTTAIVSIEFAPSLNGLHALFDHPEKDGDGDDMHWFYKCLRDTVTKVYSIKLSAIDPTDLTNRREFDNLSQLSQLIQCNFIRAQRTLDHAKQGETEVIGKLLGGLYKTATSPTAAQSDKLLADELKKQVVAIEKDIQITFDQMVKGLLPALQAFGFPSLNDTELLPETSLNVESLLSGHTHIFYAGTHGVNLPEGYNGLGTRNLIYMLLELEAFHKGFRARPVSAGIHVIFIEEPEAHLHPQMQEVFISQLSSAIAALSKRYPEEAVWQVQFIVSTHASHVANTVNFEAIRYFLSTSEDGGTRHTKIKDFRKGLEKISPEDQAFLQQYMTLTKCDLYFADKAILIEGTTERLLMPRICKLIDKTLADEVKLGRQYITTVEVGGAYAEKFYVLLDFLELKSLFITDLDAVYLDESDPKKKKRWKKCPVSEGTRTSNVGIKGWFNVPEGEQISLEALAAKTADDKERGFCRIAYQIPEEGSNACARSYEDAFILANPIIFPIPADQDAGLYAWDEAQNMGKTETALLYAMREDDWNVPLYIKEGLKWLSEPPPAPAPPPPLDSAAPVDAVELA

SEQ ID NO: 63477 - protein, 577 aa, Rhizobium leguminosarum bv. viciae WSM1455
MNDEAMNPAEKAAAEAQARVTACLKEGRNFRLEAGAGAGKTYSLVEALKLLIKQRGAEMLRHGQKIACITYTEVARDEIVKDIEEHPAILVDTIHAFSWRLLSPFQKALRKCLTGMPDRQDKIAEGGGIGSKRIEYQFGFFGVEDDKVTLSHDDIPRFMAQLLAEKKFQSFLTQQHPIIFIDEYQDTDKGFMEALTNHFLRPKTGPLIGLFGDHWQTIYRGDFSLADFPNVEGIDKGSNFRSAPIIVDALNVLRPELKQAVSDPAAHGEVSFFHTNSYKGERISTAHSKEDLPDGISQQYTSALKANLTNAGWQFTADKTKILMLTHNALAAEQGYPTIATIFDRNEAFAKKEDALIEFLADELEPICRAYCAKRFGEMFRLLRTGPDLTCHDDKLLWRRDMDALLELRKIGTVGDVIDHLKKTNRPHLADKIIRREEDLARIGLVPVADEPRTVTRHRNIRTVAYTEIMALTKYLDGETAFATQHSVKGAQFENVLVVLGGGWNHYKWPQLLELLETNAISSKNTGGFHRARNLFYVAISRPKKRLAVICTQTLSKDALAAAHRMFGEANVHELEV

SEQ ID NO: 63478 - protein, 777 aa, Rhizobium leguminosarum bv. trifolii WSM2012
MHIETLRIRNFRRLKDARIDLASDISIFVGANNSGKTSATHALQLFTAASRERFSIHDFTSDCWDSIDGFGIGLPDAVLPTISMDIWFKVEPGNLHRVADLLPNLSFTGSTVGIRVEFAAIDAAALRHEFLAVHAAAVANARPAADGVPGYHPSPRTLCDYLRDEGGARLRKGFDLRYYVLDKARFDDDFCELPGYVPRLISSDKGRGGREILAGLVKVDFLHAQRHLSDSSGGTRSEELSRVLGRFYQRNLEQRAEDFEAQRALADSETMLNEHLGKVFGPTLDRLSQLGYPGLGNPRLLIKTALNPSAIMSSQDGTRVHYALGDADQHGALPTLPDRYNGLGFKNLIYMVVELLDLHARWMEVEESRPPVHLVFIEEPEAHLHVQLQQVFVRKVLDILKIEGPEAAHYTSQLVVSTHSSHILYERGFRPIRYFRRMPGASQNSQVLNLSVFYRDTKPKTRLFLERYLKLTHCDLFFADAAVLVEGNVERLLLPAMIAKAAPRLQTAYLSVLEIGGAFGHRFRKLVEFLGITTLVITDIDSVLPGAAPEPEDEDEEDTAPVAGGMFDGLLGDVEAAAEVVPAVAEDDEEDSEPGTSCMVGHSGAITSNQTLIKWLPGKTLIADLLAVGEDECIQARVAPHDALIRVSYQTVVQVSWKGEVAHIAGRTLEEAFALENLVWSQDKARRALRLKMNSTANLDLAAISERLNKKIAASGFRKTDFALALLEQDPNEWKVPTYITGGLQWLESEVTPAPPPVDDVGNAGPEPDTDDLGIFA

SEQ ID NO: 63479 - protein, 262 aa, Rhizobium leguminosarum bv. trifolii WSM2012
MTSRSGKPDTQADVELRNALSARPPTNFVMVAGAGSGKTTSLIKALGHVAETRGTELRMRGQQIACITYTEVAVNEIRSDVGNDPLCRISTIHSFLWSLIQPFQSDIREWVLVRIDEKIAEEEARQANPRTRAASRPKIEATLTRCRQQKEVVSSLEKFTYGTGSDYGHGILGHADILKLVPTLLEEKQLLRDLLAAKYPVLFVDESQDTMPAFIDALRTVTRTVKHEFCLGFFGDPMQKIFSTGAGAVTLEKGWIEIKKPE

SEQ ID NO: 63480 - protein, 216 aa, Rhizobium leguminosarum bv. trifolii WSM2012
VAGGMFDGLLGDVEAAAEVVPAVAEDDEEDSEPGTSCMVGHSGAITSNQTLIKWLPGKTLIADLLAVGEDECIQARVAPHDALIRVSYQTVVQVSWKGEVAHIAGRTLEEAFALENLVWSQDKARRALRLKMNSTANLDLAAISERLNKKIAASGFRKTDFALALLEQDPNEWKVPTYITGGLQWLESEVTPAPPPVDDVGNAGPEPDTDDLGIFA

SEQ ID NO: 63481 - protein, 626 aa, Rhizobium leguminosarum bv. trifolii WSM2012
MTSRSGKPDTQADVELRNALSARPPTNFVMVAGAGSGKTTSLIKALGHVAETRGTELRMRGQQIACITYTEVAVNEIRSDVGNDPLCRISTIHSFLWSLIQPFQSDIREWVLVRIDEKIAEEEARQANPRTRAASRPKIEATLTRCRQQKEVVSSLEKFTYGTGSDYGHGILGHADILKLVPTLLEEKQLLRDLLAAKYPVLFVDESQDTMPAFIDALRTVTRTVKHEFCLGFFGDPMQKIFSTGAGAVTLEKGWIEIKKPENFRCPQAVLKVINAVRAEDDRLVQTGGRTERSGNADLPVAGTARIFVLPADEHRTARIGLVREYLSRKNADPLWESDEKDADVRMLVLLHRAAASRLGFPSLYEALHDRSTESLKEGLADGTAWPLRPFLNYLMPLTNALRDGDEFEIVSILKGGNALPGQRVGESFVDILKRLHAATAELERLFSSPGVTVRQVLQHAVSTSLMTIDERMARHLAVPVAPDVEHDPEHPPLLAFLSCPAKEFWGYRKYLDDLSPFSTQQGVKGAQFDRVMVLLDDEEGEAMRSFSYGKYFGITDLSDTDLENIAVGKDSAIERTRRLFYVCCSRAVLDLAVVWFTPDVDVARAAVLGKGFFRPEDVLAEDVLA

SEQ ID NO: 63482 - protein, 662 aa, Alishewanella agri BL06
MKIKNVRIKNYRLLKDVSFSIDDKTTLIVGRNNTGKTSFAEAFRSFLNPSGPKVRYEDFNQSCLKGFEEALNAVRSGAEEDAVRPMLPTIELELQVNYRDNADEYGVLGDFIIDFDDKLFDTIILVSYQLKDGKIAEFFSQLDNENRKQYFSELRKRIERYYEAVVYAIEPTNLGNKIRVEFASFKKLLLSGLINAQRGLDDETHNERDVLGKSLGNIFKSSSSVGAPEAFKAQSNEINTVVEELQQRVDTDFQQKVQALLPTLNIFGYPGLHDPNLSAATDLNVKSLLESHTRVYYQRDDHFTLPETYNGLGMRNLIFILFRIYEYFREFQSYQTPPKGHVIFIEEPEAHLHPQMQEVFIRQLELIVGQFQRELNDQRVWPVQFIVSTHSSHIANEADFSKIRYFLSKNGDETRVKDLGIAFRSPEDANDKEFLHKYLTLTKCDLYFADRAILVEGATERILLPEMIKKVDSTTGTNLKQKYLSVVEIGGAYAHHFYKFIDFLELKTLFITDLDSVDSKQNHSGVMVSKGDRSSNVGISKWFGGDGYSDLAAIRARDSDSKIHGCRRIAYQINEDASGLCGRSFEDAFILANSQLFKLDNLTGDALESAVFKTAKEIGKKSKADFAIDYCIKSTDWLVPKYIQEGLAWLDQTPNVVEDVQP

SEQ ID NO: 63483 - protein, 583 aa, Alishewanella agri BL06
MTPLNPAQRASAETLENVRRCIEQGQCFRLEAGAGAGKTYSLIESIKYLISVRANEFAAVGKQVACITYTNVAKDEIKTRTDNNPMIFADTIHAFSWSILQNYQEKLRELIPTLGGKWHERISESVGIHRQTVKYDLGFASIKDNEISLHHDDVVALMARMLEFPKFQKLLKSKFPFIFIDEYQDTDTELAASIVHNLIDNDSGVVIGFFGDHWQKIYGSKACGLIVSPAGKITEIGKRANFRSDKNIVECLNRMRPELPQAESDPNSQGTIKIYHSNDWQGVRQTGGHWKDDLPEDESREFIQQTKSLMVEQGWDMYSSKTKILFLTNNLIAAEQKFINLANCFQYTDDYLKKNDKYIEFFVDVVESTAFAFQHRKYGELLQIKKKSRSYLTSQMDKTKWITNLSELMQRRANASIGDVLDLLMSTNVPRVPAKVSDTESRYKILSAKPAAELTADELSFVEKISKLRAVQYSEVSNLAEYINDKTPFSTKHGVKGAQFDNVLVVCGRGWNHYNWDQMLTWLQDGVPAGKQETFERSRNLFYVSCSRAKHNLTLLFTQKLSEKSISVLEQVFGNTNVIGSPF

SEQ ID NO: 63484 - protein, 668 aa, Bacteroides cellulosilyticus CL02T12C19
MCNFDKKMKIMHISKIKIHGFRCFNSEGASIEIDRRLNAFIGLNSSGKTAALEALRKLFGITNAERNISKQDFHVACEEGDEVRERSLSIEARLDFDESETDAIPHFFSSMVVDAEGENPYIRVLLESIWTKNDLAEEGDIDTKLYFINVPESEDSTDESKHAFPKHLRGLIQAFYVPAIRRPSEQMRYISGSILYRVLSSMKFSDEFKENYLTKITELNSLFQSIDEFSTIESTLSDIWSEFHKDERYKDVSLSFGTSEIESILQKLEISFSPTEIDRPYQIDELGEGYRSLFYFTLVCTLLKIEEEIDDEERVKPLLTILAIEEPENHIAPQLLGRVIKVLTSISKQDKAQVFLSSHTPAIIKRLDPESIFHFRINEDYATEINKIYLPKGDEDAYKYVKEAVKNYPEIYFARLVVIGEGDSEHLIFNRLMEVYDKDFDDNIISFAPLGHRFVNHIWKLLSSIHVPYITLLDLDVGREGGGWGRVKYALQQLINIGKSKKKLLEVDGGEVLSDEAFEKMHTWGHTDNKLDSLMGRVTFLKKYNIFYSSPLDLDFLMLEHYPEIYKKAIPKNGGPRIPEKDKEPDKFAAKVTNAVAATLKSEDAKGETYTEEQKELMIWYNYHFLGRGKPVTHMNALSLMDDEKIKEKTPPVLMEIFDKIDKILFKK

SEQ ID NO: 63485 - protein, 605 aa, Bacteroides cellulosilyticus CL02T12C19
MKYKAVDEWIPADGFVLEPNALDTVKSEQNTLVIAGPGAGKTELLAQRACFLLETNQCPYPKKILAISFKRDAAYNLKERVLKRCGSDLAVRFESMTFDAFAKNIVDRFRKGLPESYAVNSEYEIIFGERDILDVFEGIDRNYRSTHSDKQILDDYYSKLPLSPDSIHYKAWTHQLSGAKSFLTFKMMMRLAELIMDANPKLREYLKATYSHIFLDEFQDTTTLQYEFLTTCFGDSGSVLTAVGDDKQRIMLWAGALPEIFSKFIEDYDASQLSLQMNFRSAPNLVELQNYLITNLLRKEDTVICNPNWNKGDGEAYLWIFKNPQQEIEYLHSNVERWVNKDNINPRDICILVKQQLQKYAGELIDYFNEHGIAARDESKYQDLLTEEVILFIVNFLYLINSNKAIDSKSSVLNFLSNINSSYSDKEVFAEEIKLHKFIKTIRSVFQKDFTKCIEGIVNDIISFAGADKIKSSYPAYKNKKYFSETIGSFSQLLKEEAKGATNLKTILDTITGVGVIPIMTIHKSKGLEYHTVIFMGLEDGAFWSYDKQPDEDKCAFFVALSRAKERVAFTFSRNRNGRAQSLTKIEELFKSLEDSKKVAFQEIK

SEQ ID NO: 63486 - protein, 484 aa, Bacteroides dorei CL03T12C01
MYIKEIKISNFRNFKEASVPFHEGVNVIIGHNNTGKSNLLRAMGLVLGRSDGRRLDTSDLFYETDVATLQQQSPRIQITLVLCRSEGEALDSAEMGLFSGMMTNPALSEEAELRYEFKLADAQEDDYKADVASATTAKEIWKIIDHDYIRLYRSSRLGGSLAAGISTNDVLGQIDFQFLDAIRDVSHDLYAGYNPLLRDVLNFFIDYSVKNDVTKTEDKIKEQLKALRDDFVQQSRPLMQTLQDRLQEGKNVFLKYALDTGATFNGAVPDFDGEVTENEMFAVLRMIIKYAIGIEVPATYNGVGYNNLIYMSLLLAKMQADSSIIYMKRNAKVLSFLAVEECEAHLHPAMQYKFLQFLQDNKANGHVRQIFMTSHSTQIVSAVKLEDLICLTSPVLGQINVGYPRIIYREDNADDVASKQYVQRFLDATKADMFFANKLIFVEGIAEELLLPVFARYLNKNLTDEHVLVVNMGGRYFNTLPKVV

SEQ ID NO: 63487 - protein, 555 aa, Bacteroides dorei CL03T12C01
MAIIITSEQTVTIDEPFKVCAGPGAGKTHWLINHIKNVVSNSHKLDVVKKVACITYTNVGTDTIISRLNIGNDIVEVCTIHSFLYANVVKPYVHLVSKDFGLKLEDLVVIDDSNFKSEGTAVVVLNRMKKSWLDAKIYLKGLERAMWRYENHEYKHYKPDYPQIYNIKSGKRYVGNDWYMGFKKWLWSEGYMSFDDILYFSYILFSRFPNIYKLIKARYPYIFVDEFQDTIPFVVDFLTQLGNEGVIVGVVGDKAQSIYDFLGATVQQFDNFTVPGMQEYEIRGNKRSTKQIIDLLNIVRTDFSQDWLNGSERMIPELLVGDMLNCYQQSIEKCGTDEIQSLAFQNILANSMRKKNGAREVENILEMDFDSNAGRQMVIKALIKAVEYTRMNDLRNAWHQLDIIDRDRSITIVLLRRLLDGYKDYKDGSLMDFYNFLVNDLHVKMTKIIGKTIKDFYVNHTYVDAALGVKYGDSNDKHKTIHKSKGEEFDNVFVILKDEDDIEFLLSPDLYGNNVHRVYYVAASRAIKRLFINVPTLSDENRIKLESKPINIYKE

SEQ ID NO: 63488 - protein, 638 aa, Bacteroides fragilis CL05T12C13
MYLSSIHIQNFRGIKNLNVKFHSKYNVIIGCNGCYKTTLIDAIRLFYTWGDQQQNLYISADDFHQEIIKKDDGSLEVAKNNTIHIEYTFKDLNETQKGAYYQYLIADEGDLFARVTINYTLSEDGRVQTNFFMGKENGQKADYETYSLFISYYLGALRDSTRDLLNTRDNLLGRVIKRKVEKAKKEDIIKDIIKNANKQLLQQEEVQATQQGINNTLKRIEKTSGNVGLHIEQNRLEYIVNVIKPFLPHKNGEDYEGFRLSQNSLGYNNIIYIATVLSDLKERHEKEQEAHIVLLMEEPEAHLHPQLQVNLYNFLVGADDNPNSQIFITTHSPTLTSKVPLDKLVLLNDKAYCIADCLKDREQEQIIRDVKQKIKLDNAQCEVYRRMLQRYLDVTRSQLFFARGCLLVEGISESLLMQSFSEIIGYSLSDNQVELVDVDGTAFYQFMVLFNSAYENKRLPIKLAIVTDGDQFPDSKKAEYNIEHLTDNKFQKLEELREEIKRAQLCSRANNIISMANKQDNIFVAIGVKTLEYQICIANVFDTIQDTKAGSLYKYIKECILHKNFDAIDKYINEKIQDPNHITDDQKMDIAIMLWKCLPSKSEFAQNMAAYIDGHREDENFKFIVPEYLEQAIKHLAI

SEQ ID NO: 63489 - protein, 591 aa, Bacteroides fragilis CL05T12C13
MMEYRITDERRDYLEARGFTILTACPGSGKTTSITYKMKKVAEECLKNYGGHSGIICLSFTNSAVEEIHKYYYKLHGECLGYPHKIMTIDSFYSQYILMPFWYLLPQLKKRPMIVDDTSNINIYEVSYMKNGKKETAITSSLQTFRDLFYKKNPRDISLGKNGYLYKNHIIENEREKEYAKAVIQLRLETGIIGSLEMEYLSALILKKHPYIGKSLAKKFPYIIIDESQDASELQHYIFDLLKDYGVDNIEYVGDLYQSIYEWRNAKPILLYNKIQSGVWNIKHFSENRRSNQRIINLYSLIRKPEDPPIVSLDVPEKNIDIIIYRYDEGNEAILLKDFENTCISNKLVDCHVLVRGKEKLRSLSGNESKIECWKTKIPYLIIDAYDSYKSHKINIAFEKIRKLSARLVCGDNNYSQIKEYITSIKNDNAFNSKISYFFEHLPSFSLSVESWQIRTQELLAELLNLANPIDFSLKAKIKGYQMNIVRQMPVKNLFIPKAYNKESLLKFNTIHDAKGASYDAVLLFLNKPHINSLSVNLFSNDRELDERHRLIYVACSRAKHFLALAIPNTVIDDTIKAYLKVDYVIKKIEA

SEQ ID NO: 63490 - protein, 681 aa, Bacteroides fragilis CL05T12C13
MYIKEIKISNFRNFKVASVPFHEGVNVIIGHNNTGKSNLLRAMGLVLGYSDGHRLCTSDLFYETDVATLQLQSPRIQITLVLHRSEGEALDSAEMGLFSGMMTDPALSEEAELNYEFKLAEAQEENYKADVAGATTAKEIWKIIDHDYIRLYRSNRSGGNPAAGVNVNDALGQIDFQFLDAIRDVSHDLYAGYNPLLRDVLNFFIDYSVKNDSTKTEDDIKGELKALREAFAMQSGPLMKILQDRLQNGKNVFLKYALDTGATFNGAVPDFDGEVTENEMFAVLRMIIKYAVGIEVPATYNGLGYNNLIYMSLLLAKMQADSNITYMKRNAKVLSFLAVEECEAHLHPAMQYKFLQFLQDNKANGHVRQIFMTSHSTQIASAVKLDDLICLTSPVLGQINVGYPRVIYREDNADDMVSKQYVQRFLDATKADMFFANKLIFVEGVAEELLLPVFARYLNKSLTDEHVLVVNMGGRYFNHFLKLFDTNNPYTINKKIVCLTDVDPCRKKNGPDEEYEACYPYEYNIDTDNYDYKHHADAVVAKYATHPNIRFYRQDVTYGKTLEYDIMRENPDCELLLTNSVSNLKEIKTMMAEQDVNKMMSKMRNSEANTRIKTSIGASRWTDEEKRKALLASRYLNSVSKGSNALELNVALMANLEEPAADRKEFHVPQYIVDALTWLLS

SEQ ID NO: 63491 - protein, 553 aa, Bacteroides fragilis CL05T12C13
MAIIITSEQTIPIDEPFKVSAGPGAGKTHWLISHIKNVVSNSNKLDVVKKVACITYTNVGTDTITSRLDIGNDVVEVCTIHSFLYANVVKPYIHLVSKDFGLKLDDLVVIDDSNFKSEGTAAIVLKRIGKSWLDAKIYLKGLTKAMWRYENHEYKHYKPNYPQTYELKSGKRYVGNDWYMEFKRWLWSGGYMSFDDILYFSYILLSRYSNIFKLIKARYPYIFVDEFQDTIPFVVDFLAQLGNEGVIVGVAGDKAQSIYDFLGATVQQFNNFVVPGIQEYEIRGNRRSTKQIIKLLNTIRADFSQDWLNGSEGMVPELLVGDMLNCYQQSIEKSGTDEIQSLAFQNVLANSMRNKNGMREAEKILEMDFDSNVERQMVIKALIKAVEYTRMNDLRNAWHQLDIIDRERSLTIVLLRHLLNGYKDYKDGSMMDFYNFLVNDLHVKVPQIKKKTVKDFYMNHTYADAALGVKYGDSNDKHKTIHKSKGEEYDNVFVVLKEENDIEFLLTPDLNGNNAHRVYYVAASRAIKRLFINVPTLSAENRIKFEGKPINIS

SEQ ID NO: 63492 - protein, 734 aa, Bacteroides nordii CL02T12C05
MRISCLEIQNFRKLKSSRIDIADDRTIFVGANNSGKTSAMDCLILFFRDKKSFTTQDFTLSNWREINKIGNDYIVYSKESDLDENKLSISAWQPFVPQLDVWINVEENEIHYVNRIIPTLDWASGKLGIRLRFEPKDIKTLYTDYTTAKSTIEELTKDRSKKATKLWPIHLWDFLQKKLHTYFTVNAYILDPSKFGQGDTPQLLSEDNIPIDFDPFQGLVKIDIINAQRGFSDPNTPETGISNLSSQLREYYSKHINPTETIDATDLDALEAIEEANKAFDIRLEAGFSSSLDELRNLNYPGFGNPEISISTKVSPVDGLKHDSAVLFNVQKGETDEQCLRLSEKYNGLGYQNLISMIFKLIRFRDEWMKVGKIAKNSTHEIEPLHIILVEEPEAHLHAQVQQVFIRKAYDVLRNHARLKEKKDFCTQLIISTHSSHIAHECDFKSLRYFKRNITQNQIPTSTVINLSKTFGAEDETTKFAKRYLKTTHCDLFFADAAILIEGQAERMLLPFFINQEFPKLASAYISLLEIGGSHAHRLRPLIDDLGIITLIITDIDSVDPNAHRRSVRPEKGKNYVTNSSTLKQWTPAKESIEELVDLASTKKQSSNGLVRVAYQYGTKITFKNKVVTVYPYTFEEALVFDNIDLFKSMKGDGLIKKYSEALNESTIKECLRKMFEALDNAKKAEFSLNLLFIDDTKKIKTPTYISEGLKWLSEILEKNSSNCSMSVSSNAIK

SEQ ID NO: 63493 - protein, 632 aa, Bacteroides nordii CL02T12C05
MITDYDNCLDDKVDEELLACLNLQNPKSFFLFAGAGSGKTRSLVNVLEQIKDKYGDELKLRRKNVAIITYTNAACDEIIHRLKNDPTFAVSTIHSFAWELIRHYTADIKNWLRNTLNKEIDELEIEESKGRPGTKTSVDRKRKIENKKNRLSTLDRISKFAYNPNGDNIEDNSLSHTEVISISAFFLENKPLFQKILIQKYPILLVDESQDTKKELINALFMVQEKNKNFSLGLFGDTMQRIYTDGKENLGTNLPNDWYKPEKKLNHRCPKRVVTLINKIRSDADGIEQLPRTDKEDGFVRFFIIPSDVDNKIAIENAIKQKMAEITGDDLWINSSDEKAVKTLTLEHHMAAKRMGFDDLFASLYKVERYRIGLLDGSLPGIRFFTQFVLPLIEAKRNGDEFAVSRIVRLNSPMFKRENIKLHEKQTDVIKSANTAVNSLFSLWKNNDNPKLLDILNNIAKSKLFVIPDSLKVIAQRTDKDSVIVDDSSKDIDESIAAWDEALSTTFEKIIKYNDYISDKSMFGTHQGVKGLQFDRVLAILDDDEARGFLFSYEKLFGAKETSDTDKKSMKVGKETSIDRTRRLFYVICSRAMKSLAIVAYTNNVDAVKNTAIDNDWFTKDEILPLDLLAIK

SEQ ID NO: 63494 - protein, 668 aa, Bacteroides salyersiae CL02T12C01
MCNFDKKMKIMHISKIKIHGFRCFNSEGASIEIDRRLNAFIGLNSSGKTAALEALRKLFGITNAERNISKQDFHVACEEGDEVRERSLSIEARLDFDESETDAIPHFFSSMVVDAEGENPYIRVLLESMWTKNDLAEEGDIDTKLYFINVPESEDSTDESKHAFPKHLRGLIQAFYVPAIRRPSEQMRYISGSILYRVLSSMKFSDEFKENYLTKITELNSLFQSIDEFSTIESTLSDIWSEFHKDERYKDVSLSFGTSEIESILQKLEISFSPTEIDRPYQIDELGEGYRSLFYFTLVCTLLKIEEEIDDEERVKPLLTILAIEEPENHIAPQLLGRVIKVLTSISKQDKAQVFLSSHTPAIIKRLDPESIFHFRINEDYATEINKIDLPEGDEDAYKYVKEAVKNYPEIYFARLVVIGEGDSEHLIFNRLMEVYDKDFDDNIISFAPLGHRFVNHIWKLLSSIHVPYITLLDLDVGREGGGWGRVKYALQQLINIGKSKKKLLEVEGGEVLSDEAFEKMHTWGHTNNKLDSLMGWVGFLKKYNIFYSSPLDLDFLMLEHYPEIYKKAIPKNGGPRIPEKDKEPDKFAAKVTNAVAATLKSEDAKGETYTEEQKELMIWYNYHFLGRGKPVTHMNALSLMDDEKIKEKTPPVLMEIFDKIDKILFKK

SEQ ID NO: 63495 - protein, 605 aa, Bacteroides salyersiae CL02T12C01
MKYKAVDEWIPADGFVLEPNALDTVKSEQNTLVIAGPGAGKTELLAQRACFLLETNQCPYPKKILAISFKRDAAYNLKERVLKRCGSDLAVRFESMTFDAFAKNIVDRFRKGLPESYAVNSEYEIIFGERDILDVFEGIDRNYRSTHSDKQILDDYYSKLPLSPDSIHYKAWTHQLSGAKSFLTFKMMMRLAELIMDANPKLREYLKATYSHIFLDEFQDTTTLQYEFLTTCFGDSGSVLTAVGDDKQRIMLWAGALPEIFSKFIEDYDASQLSLQMNFRSAPNLVELQNYLITNLLRKEDTVICNPNWNKGDGEAHLWIFKNPQQEIEYLHSNVERWVNKDNINPRDICILVKQQLQKYAGELIDYFNEHGIAARDESKYQDLLTEEVILFIVNFLYLINSNKAIDSKSSVLNFLSNINSSYSDKEVFAEEIKLHKFIKTIRSAFQKDFTKCVEGIVNDIISFAGADKIKSSYPAYKNKKYFSETIGSFSQLLKEEAEGATNLKTILDTITGVGVIPIMTIHKSKGLEYHTVIFMGLEDGAFWSYDKQPDEDKCAFFVALSRAKERVAFTFSRNRNGRAQSLTKIEELFKSLEDSKKVAFQEIK

SEQ ID NO: 63496 - protein, 638 aa, Bacteroides fragilis CL05T00C42; identical to SEQ ID NO: 63488

SEQ ID NO: 63497 - protein, 591 aa, Bacteroides fragilis CL05T00C42; identical to SEQ ID NO: 63489

SEQ ID NO: 63498 - protein, 681 aa, Bacteroides fragilis CL05T00C42; identical to SEQ ID NO: 63490

SEQ ID NO: 63499 - protein, 553 aa, Bacteroides fragilis CL05T00C42; identical to SEQ ID NO: 63491

SEQ ID NO: 63500 - protein, 675 aa, Scardovia wiggsiae F0424
MVDLLRKPTGNSGKDRDITVYLKKVKIKNFQSFGSEQTINFNECTTFIGSNGSGKTAALVALSKIFSTDMRVRALVREDFHIDEDRDPSSVENIEMFIEAVFGFEQSSFKEDIPEYFDSFVIDKEEKEPILRVRLEATWSFGTSIEGDIDSKTYFVKNPENVKKEDERKEPAERTRLNRIRLIYIPAVRNPGDLLRSGSRNILQESIQQIGWSLDTKNIIEKKIKELNDTFMNEEDAKKLGNFITESWGGYENDPRYKEASLSFSTTDFASTVKSPQVTFSPGINNKDYTIDYFSDGQRSLLYFSLIGSAIDFEYQNKQKMFIRNKPTSCLTLIAVEEPENHVAPHLLGQLVNRLKQIAGQKACQVIITSHSSSIVKRVDPESICYFRLDKGSCTNCVPITLDHNSDAEDQKYVKEAIMAYPELYFADLVVLGEGDSEEIILPKVLESLGGNVDSQRISVVPLGGRHVNYFWKLLRRLNIPYVTLLDFDQERYGGGWGRIVYIVEQLQLLDNDFADADPVTGKIIELPELEARDSATAEDIEKWIGYLEKKYGVFFSAPLDIDFLMLEAYPEKYKSLARGLQGPRNTEGENAIRDAIRAVLHKKGGVGATYNSEQKKYMVWYRYLFLNRGKPATHIRVLSLLDEDTFQKNVPGVLKRLVSKVSEILKQNGEDTNA

SEQ ID NO: 63501 - protein, 588 aa, Scardovia wiggsiae F0424
MHSRDWETVGGIVLEQEAVKALRDFDHNVVVTAGPGAGKTEFLAQKACYLLQTELCPSPYRVLAISFKNSSADNLRARVSERCKNNEYRRFDSYTFDAFAKKLVDQFLNILPDKLRPSYNYKIIDDNKRRKDIDKALEQYMKDENTRQWERLWNKLLHPSDGSSSELTFRMIFYLAGSITGNTYVKWAIRATYPYVFVDEFQDTTSAQYNFLKKVFKDTDSRITAVGDVKQRIMLWAGAKQDAFECFEDDYSPNDYILLANYRSTETLVDFQRKFYPLLKQPCPKTGVMGDRNDTNICVLSSRNDDIESDEVAESIKKEINSGIAPENICILTRKKVREYTSKIQKKLDQFNIRSQDAAKLQMLLDDPFTRLVIDLIRLSINPSDPDDIRRNVENELMRICGLPDAREDDKQLEKLELVYSKCISICNEGRSYNSLKVLDKLDTALGGKAVLKKAYPQYEEEGVLESCRKKFIHCFKQELEISENDWSEAIDSLRGIGIVPIMTIHRSKGLEYEYVYLIGLEGNSWWDNKHTEGSILEAMSTFFVAISRAKRGLIITRVGERNGRSSGAGSSQVENMLANFLRKAGYL

SEQ ID NO: 63502 - protein, 534 aa, Scardovia wiggsiae F0424
MHLARVKVENHSRLQDLELEVRRHMVLIGPNDVGKSSLLRCLNLLLGASTAQLYNQITLDDLRDPGLPLSVEADLCGFSDDEKALFADEITVDPTGEAELTLTVRLEATFDDNETLSINRTVPNKNIGRQISREQLRAIGWTLLNANDRARTLDDDRRTLLDEVLAGVELGDEQDRFDNLLGAIGEQLQNSNVLSDLRGQMSSQLSTALPERIDRDDLTFIPGAIANDDVLNGVRLQVHGKSIGDQSDGKRALYAIALYDLVSNGANIVAIDEPEIHLHPSSQRSLARLLKDGDNQKIIATHSSDIVSAFDPELIVSVRDRGRVIQPTSRLLDDDQRAVLRWWVRNKLEPLTARHVVAVEGIADRIILERVAELTGRDLDRLGVSVIEAEGAGDMGVIWKLFGEDGFNAQLSVLIDRDAVEKTSKSIGVEERDFKKRSIWVSERDLEEEYSKAFDAEHLWDAMQHSGAFSKNELSNVKRTGANASPTGADLANFLRSKSKYKTQGAIMVANILDKTTASRITSIMNLLDDIESA

SEQ ID NO: 63503 - protein, 562 aa, Scardovia wiggsiae F0424
MVDTTSEQTQVRDYPELSLLVIAPAGCGKTETLALRVEGLLSRQDVKSPQRILVTTFTNRARDNMRDRLSRYLTPHQMREAVTVCNFHGLSARIIQAHGNVVGVDPALWTMPQSDWVAQQCRARNLKSLSADVQSKISSVKRHGFSDEQVLAELERSGNEYAVGIERQRQSERRLTYDDLPRLAELILANDEVTRLYQRHFGAVIVDEFQDLTPQQLRIVQRIGYGRTTYAGDMAQGIYSFAGARPELVMGQLQAECSKTIEFAESFRSSPAVLKAVNSLSDMTGGQTLTAANPGSWPSDGFAGCINFTDTEEEARYITQFCAGILSQERAPRQRIGISARTKYRRRFVDQAIRNSGLQYSLWDEGVLDRSIAQKIRSMLREITLDKFRNADDPPEFVRQAARLDEEQDPDERTALSNAIDWCVDLLRDNVTPDEVEKRIQIGDTDSLITQGGVHLLTGHAGKGQQFDWMIIVGLEEECLPNYHAVSNAEIAEEARTFAVMLSRARHGVLVTSSDVVPDDYNPKRPKQRSRFLENVAPTMMTSRQEIRDWLAAADWQAIAAK

SEQ ID NO: 63504 - protein, 593 aa, Saprospira grandis DSM 2844
MYLSNLKLWNFRKFGSNSPLDLEKPDLDLNFKKGVNVLIGENDSGKTAIIDSIKLALKTHSYEWLKLNWDDFYDDSDRLRIELQFNNLSDDEAKNFIEWLGVTGEKDDAESYLRLIYDARRNTNEQYIYPSEIKAGTDEGGHQLTAEAREYLKTTYLKPLRDAKSELIPRKNSRLTQILQGHEAFKGKDQDHLLVELFKDFNNEVLQYFEGKDKDGEALTGENLKGQELKKEIDKFIGAFYSEKKESNFGILGKSLKNILEKLDLSIKDEINPGLGTLNRLFMASELLHLQKKNWTGLRLGLIEELEAHLHPQAQMQIIEALKAEENIQLILTTHSPNLASKLKLQELIICNGKNAFPMGEEYTKLDSKSYRYLEKFLDTTKANLFFAKGIILVEGWAEEILLPSIAKAMGINLTEKGVSIVNIGNIGFSHYANIYLRKEKPHMDIPVAIITDADIKAYRKEKGSYIKEKTNVFSQETNKKIKSNNEKSEENVKYYTGAHWTLEYALYCSSLLGEKFKAACKNKHSRTDWDTNFEETLAEKLIDKTLKKTDIAYELALQIDNAVQDESFKISTEVNDDSISYLIQAIKYATKY

SEQ ID NO: 63505 - protein, 661 aa, Saprospira grandis DSM 2844
MPQNINISDQDIEYAEKILLPEGKVFDQERRDFIRCLKTIDLQAVPGSGKTTALLAKLLILERYMPFQDGHGVLVISHTNAAVDEIKERIGKHCPQLFSYPNFVGTIQSFVNRFLAVPFYMNSLKERPLRIDANLYNERLSEIINNPWAYKFGLSNENFNKVYRFIKRSERMFYKYRFGIDKDKIILKESLNGTQVQIKDKKNILTWLRKLKIHILCTEKILHYDDAYFLANRYIKKNPTITTLLQKRFKYVLVDEMQDMDIHQYNLIETIFKPDESTQSVVQRIGDKNQAIFNSDSSPTKDIWTQRKVMYLNGSHRLSSKIADLVQKFALTGNPITGNNPIEIKPIIFIYTDDTIELVIPKYADKIKELQKGGLIPESPRHKFTAIAWRKGQNTSAKDSRITLSTYWPHFKKSKPKEQIDFKVLEDYILYINKDVKTLRPIQNNIINLLLEILHIEKISHKKNNYYSKKRLLNFLKLRENNDYEELKSKLYEWSMGCIKEKKLDVIKNIKDYIPTFLSFFDREINLSTQFILGKSEISLASNENENDLEMNIFNSEGIKIEIGSVHSVKGQTHTATLYLETYFYKDGGKSYESQRLAGQFLGTPITKSAGKRVKQSAKMVYVGFSRPTHLLGIAIHQDRYKSYLSQIDGNCWDIVKVWGN

SEQ ID NO: 63506 - protein, 651 aa, Pseudomonas amygdali pv. tabaci str. 6605
MKLQFVRICGFQSFGAEPVTVDLADLTFLIGPNGSGKTATLQALCRLFSFDPNQRRLRKSDFFVPHDETQAPDQRALWIEAEFTFPELSDDENEHPTIPTHFGHMRVDTPDGEPRVRYRLDATIGIDDEIEQSLVYVLDVDEDDEPVDTAPVPRDERNFIQVHYLPARRDPADHIAYGANALLGRLLRAVNWSEQRETIQQLTTDISQSLTQNESVLSLSAGLTKTWKELHKGQFFTQPSVTFMANEIESLLRHLSVSFSPGHGEQLVDFSRLSDGQKSMLYLSLVLSSQAVGRAVLHGNDDSFDAEKLRPAVFTIVALEEPENSLSPHYLGRIVSSLKGLVGDSKFADAQALIATHAPSMLRRIDPSAIRYLRLDESRCTVVTKIRMPPNKKGEAYKFVREAVQAYPEVYFSRLVILGEGDSEEIVLPRLLAAKNLLVDEAAITIAPLGGRHINHFWRLLSGLKIPYVTLLDLDVARFGGGWGRIKYVATEMKKHRPGDVYLTDDQLKNLPVWNHPTHGILKVEKDPQYKSYVAELEPLGVFFSAPMDLDFSMLRAYPLAYGMAPEDLVVPKQGQTKSVLGDSHHDRFQYSLIERKHFVAYHKRFKLDSKPKSHIEALSNLTNDQLIAKMPASLNRLADFVIAKIEGLSE

SEQ ID NO: 63507 - protein, 556 aa, Pseudomonas amygdali pv. tabaci str. 6605
MISPEAWKPSEGIVLEPNAEVAVREVKRCVALTAGPGAGKSELLAQRADFLLTTGACRYPKRILAIAFKVDASNNLKERVWRRCGADYASRFDSYTFHGFAKRIIERFRPVLTGDDALDAGFRVVPKGKAHPVQTEFGLLIPLALKILDAYPMAVNAIRQTYSDVFLDEFQDCTDEQYALVSKIFGGTARRVTAVGDVKQKIMGWAGALDGVFGKFEADFAATHLNIYRNFRSQPQLLRLQNDLIKVLDPGSEMPAELLGGEGGEILLQSFNDCTDEAFSLADQINTWINVESVAPSEIAVLVRSYPEAYTVRLTSALDGLGIAYRNENQMQDITTEPIALVVVDFLLCLYGSREPKAWTRLLRRIIPADDDDHGGSVRNDWNRFIKEARKTAAEDLAAKNYAQRWTLLKEFLSMVGVSLLTGLSHDYESRDRLKEVIRDLKKYIDAALEQEPDLLKALSQLSDDQSIRILTVHKSKGLEFDSVILLGVEKEAYWGNDTHEVRCTFFVAISRAKRRLVVTTAKTRDKLADINSWKTVRRPHHEFLGYVEKWRAPER

SEQ ID NO: 63508 - protein, 634 aa, Pseudomonas amygdali pv. tabaci str. 6605
MYLRQLDVTGFKCFGEPFTIEFRDGLNVLVGENGAGKTGVVSAVRQLFNDSESGKRIISERDFYRGFEPGAVAAESIQIQATFSGLDDQDAIAFESWCGNHDEAKLTFEARNQESRGRFRHHTYAGHEHAKPFESETLDYIHCIYLPPLRDAENKLREGRQSRLARLMKALCRKELAEARKAQTLHPLEEHVGNFNRELSQSDEFAIKQANQRIGDNLKAALGLNLSQGTMIQFSEVSFSRIVEGLRLLYFPNLSEADTTQFRSLEENSLGYNNLLYIASILAELILEEEEDRGEETYLRLLLIEEPEAHLHPQLQLRLLRHLKTVAEERGIQVIITTHSTVISAAVSLDHLIHISNDARPVAIPLSACGLPEHSRRFVDRWLDVTKSNLLFSKGALLVEGIAEAMVLPELARIVLRPYGEGKNCLDDYGVSVINLGGIYFNHFMQLFCDVTGGQPGENVPIRCAGLTDNDPPKSIRSVAGDDGKEIPVPFLPHDDDLLVGDNPALALIGPISQSQFGRLFVGKYKTLEYDIAMEGNNLRLMSTAAATLWPVQGGEVVRELTRRAGLDYSTMSSGERAPYANDMLDRIETKEIGKGFYAQAFADALANVRDDFIVPEYIRLAVLWACGIEEQAE

SEQ ID NO: 63509 - protein, 583 aa, Pseudomonas amygdali pv. tabaci str. 6605
MNFTKEQLEYIAAPLDQHSYLKACPGSGKTEVVAAMVSQTIQVWSRSPSGIAVLTFSNSATDELRSRVHKYLGGPIGLPHSISTFDSFVLTRLVASIASELTGYPGKDGDFRIRILEKEANIFQTQQRICGRRISACRYNYDLEAGRFKFSTGDRALDHQLNAVEVTDNMHRDLVATKRRFWLGGYATHGDIDMLALMAFKDHQFDRYFSRVARRFPVVIVDECQDLSAEQLQIVSKLSGFGIKFHFVGDLNQSIYGFRKSNPANVNKLMGVLQFKQYELTTNWRSGQAIVDLCSNIVGTGKVSGNPEIASIQPKILEYESCPSELLPTIRNLTAAYNEVVLVARGHATLQRLRNGKTFEGIELLAVACIGASSGSLSDLKVSLRTFAQWLAGKLKLEVTKTGPYCPTSMESKLAWRKFIHQSLRFMVASGAGNSDQNWSAWVRCAKLALRQLPDQAFVPDEILNELQELRGLNLVTKRGQGDKPVSIRLSSQDIQDGESETLRYETIHQVKGETHDVTVVVSSRKRGKGESHWADWLQNRESEAARFAYVASSRPRHMLIWAVKTLKPRERPTLVNLGFQLP

SEQ ID NO: 63510 - protein, 710 aa, Staphylococcus epidermidis NIHLM088
MYISQLDLINFRNFENSKLKFNKGVNTIIGENSAGKSNVLYALRLLLDDNLPLSATKLIESDFNSLLSEKWKGHWIILKITFSDLDNDVTDSLITHNTQNIEQEDGKGTFTFYFRPKDAIRKELYSYSQQIEILKSSNQDVEEVQKSLNNFINQITLNDYEAVYTSRGSADFTIVEQYNEIVGDFERQIFPNPDNDDNEKIGNKISHITSIKKEVSCTYVKALRNVIYELKQRRKSPLLQLLRGSTNNIEIVDTQNIKKKIQDINSSISKLDEIHDLTEKLKSSLNRTLGLTYSPNVDIKSELPEEIETLFQSLTLWVADDSMSKQGKLDDLSLGGANLIYITLKLLEYEFYQDTEEKAAHFLLIEEPEAHIHTHVQKTLFDKYHFDNTQVIITTHSTHISSASNINSMNILIKKKGRTEICHPSNGLSPDKIKKIERYLDATRSTLLFAKGIILVEGDAEIILIPEMIKKVFGITLDELGISIINMSSAVFDNIAELFSNDRIRRRCAIITDLDTSLIKLPEDENEDTDEEKRERSAQNIGANRRRKLEEKYSDNPWVKMFYAEYTFEADYVLNNNEREIINILHKIYKNSHSVDNATEKLNDSSSKANEALRLANKVGKGWFALLLAEEINRNTNIPEYILSAVAFAANHITEQHIKMMAGYRILELYGEEYNQEDDKNLQEMLEILNSNGQDILVNFINKLRVYNEL

SEQ ID NO: 63511 - protein, 590 aa, Staphylococcus epidermidis NIHLM088
MNYKLDEFQKKAIDFEGNLLINAGPGSGKTKILTLKVIKELNRLKYRTSKIAALTFTNRAAEEISKRINFEIEDNSKFWSGTIHSFCLNWIIKPYSCYLSELKNGYIIIDESEVRKLKNKIKQRYEIPYKKDFITRRSSKGHYLNNKEEFNEAAKAYHEYLREHKLVDYDLILFYSYMIIKKFPLVSYNLSRIFNYFFIDEYQDTQDLQYHIIGQIVSSSKGKCQYFIVGDVDQAIYKSLGGEVKSSEEIEEIMGGYPLRQLNLKYNYRSTQRIVDFYNNFCCSGNLMYSLSNINSEEGVIEFDKNINVNRLTDRISCIIKENIEQGVLPEDICILAPQWQMLTKTIRNLRMNLPNLNFNMPGLTLIPRNSDNIWFKIARLILTYRLPDNYLIRIKWANEILEELKSILKSNSELENFTPKKFIKIVSTINIKNKIITEYLEESFLLVMSQLNIDHLKNEALNFKWETFFESITKRMENQEFRGVPNDAISTKEMFNVDRGINANTFHGVKGEEFETVIAFGLLNGYIPNWDIIINAPKYKDKESKQLLYVVCSRAKKNLYLFSEKGRKTRKQYSYKPNPHLASINFKDI

SEQ ID NO: 63512 - protein, 768 aa, Acidovorax sp. CF316
MPDTAAAPTNGDIKLRFLELCQFRRLGKVQLEIDQKTTILVGANNSGKTSILAALRHFLADGTSFGAFDISLSQWPKLRTLGKSWEALAEDPSTVASSEVQWKEQLQTLLEAMPTLDLWFDAEAGMYHYVAPFLSKFSWTGGAVGVRLRLEPAATVDELKQLAWTYQLARAPVKDMGADSLAWPIDLLDFWLREPGKLGQVRAYKLDADNNPLAGIAAYTTQALPEDASPIERKNLSKVIRVDFVAAQRGLGSEEADSRSASGPHRVGMFSNQLLKFARQHLNVASTGHGHRADLIKAVAEAQRDLDKKIHEAIADSVEEVKELGYPGLHDPQEIHFRTRIQTADLLDHGTAVQYSMHKESLEELLPEYSIGLGYQNLQSLSYQLVSFKTARLKPEKGSPAPVHLVMIEEPEAHLHVQVQRIFSEKAHKLISPTAKDESTLKSQLLISTHSSHLAHAESFDRLRYVRRIAKSASNPMPSTEVVNLGQVFGNDKKTRQFAERYFRVQHTDLLFANAAVFVEGVAERMLVPLFMERDFKALNSRYVSFLDIGGSHAHRLKPLVEKLRIPTVIITDIDPSEEREGKPKNGGEPTKKLVAVANTGQPGLQCGNPTLRGWHPKLQMLDDFKNPSDSQWVWQETADCLVRFAWQLPVAEAGENWPSTFEDSLVLTNIQWFKDLLQEKVDEAGMEIDQPTGALRSVATLVAKATSTAELLAALHALMHNSFNKGDFAASIFEKISSEEPVVCPKYIADALGWLQKQLDPSQEPTP

SEQ ID NO: 63513 - protein, 649 aa, Acidovorax sp. CF316
MIAVPHAMNDDRDSGVVEEICGYLTELPPRSYFLFAGAGSGKTRTLVEVLRRLTGVVKHEKGNHLAKQLRMYGRSIRVVTYTKNAVSVINGRLGENDLVKVSTIHSFCWELIAGFNDDIRAALIAVKEGQIAKETADALAKPRGITAAKQRDLDELKADIEAFRTTDVFIYHPDRNTYGPGALAHSQVLDATAWLLGNRHTLQTILKDRHPIVLIDESQDTMKSMLDAFMCLAEPRGSGLTLGLLGDHRQRIYNDGHADLPSLIPPSWATPELQMNHRSQRRVVDLINAIWEAELEGRTQPASGVEQHSRSGKAGGTVRLFVGDTSRSAEDKVVGERWCADQMRHASGYDDWSRGQYQLLALEHKLVATRGSFLDAFSAMVLLDANAAAPSGSGENKGPAVVQVLLNELGQLEACIGADGTVDEVKATDVFRRYGRLDGMPDSPTDRTRRVEDMRQALEAFAIARANPNSTVEQVLKPILAANLFDVDSRLTAAYEDKSPAPPEPGRGEDESKQNRMRRGWCALFSAPWNQLQKYRVYLTGDSVLATHQVVKGSEFPHVMVVMDDKLAAGNQISYDKIFGGVQLTKADRENIDKGKETSIDRTLRLLYVTCSRAQESLALVLWSSDPAAALLRVKDSGWFLEGEFDPIQ

SEQ ID NO: 63514 - protein, 558 aa, Clostridium sp. MSTE9
MKFENIEIKNFRNFEKINLNLTNKNIFFGLNDVGKTNFLYALRYVFDKDVRKLNLLDSDFHNKNLDKPIEILITLDISDTICTDCQKLRAQLKGALSSEHKKVYIKLQAEYDRKEMLALPILFWGGDKGKLQEMKQRGYLYELDYVFNVIYIDSYVDLHSLFKKNVNLLVKNESETDKDILSTIQSTVDQLNTHIASLSGIKDFESRIAPEYQKFRNEGISVSIKSEIAVKGLYSNIIPYIKQDDDDNLYPTAGEGRKKLLSYSIFDLLSDESAEKKINLFLVEEPENHLHKSMQIALSQILFTDSKYTYLFISTHSPFVLYEMDNVSLIRIYSERKITSASTFYKVPDAFEKNRKMLNRSLSEAIFADRVLLVEGPSEQLLFEKILSTINPFYEADGIYILPVGGIGFEAYINILDNLNILNVIKTDNDLRKVKGKDAYSVLGFSRCNNIIGQVLLPTDQISDNSIKAKLALYSENREILDKIRDEYQVHLSKSDLEHDLDEILHDRLVKHLGDEPVEYLQDAKHHHMVELIERLSDADCRIIYGHYNFACLKEVAE

SEQ ID NO: 63515 - protein, 500 aa, Clostridium sp. MSTE9
MKLSPIQEEIIGISGNLIVRASAGTGKTHTMVNKIAKDIEDNHTHKVVAAITFTIKAAQEIKDRLSVDIIQHFIGTNNSFAIEEIIKPFMKDVYGSDFDKDMSTDYAIKVETFQDGIDKINVDGVLCSYHDNKRNFIFDLAQEIVEKSSACKLYLQAKYFKIYIDEYQDCDKSMHKFFMYLCDELSTDTFVVGDEKQSIYIWRGAYPEAFKSIWDKPNFEKRFMGDNFRSCQQIQNYSNLLCEETRTLYNPLDNLDNIIWLTPTGTDWASQVISQMDADKKSALLRFSNDNARLGADGLTTAGIEHIYIPQTPIADITTDTAWLYSAVAKYMIIDKYSAYDVIAEIPVEGNESRKTVSTIRKLLNDIELSIDDEHSFYTAINELAEYLGYGTRADHLKKLFRTISDTSFHVAFEPEKYKHIAITFHSSKGLEFEQVIVFAEDYRLSDMPSIYNHYVAVTRAKSKLIIVKLNNYNANCFQTNLTKIFSESGLNLNDIVSYQ

SEQ ID NO: 63516 - protein, 465 aa, Xanthomonas vasicola pv. vasculorum NCPPB 1326
WVSLKLLLTLGRTLRAADWTAERTKANDLSEQLGEAVTENAGVAAFGKALTTGWGKLHKGKFFASPSIAFGTGGLAEVLKQVSVRFSPGHETPSVDFERLSDGQQSLLYISLVLAAHAVDVAALADEESPFDLARLRPAAFTLLAVEEPENSLSPQYLGRVIQSLRDLKEESGGQAIVATHSPAILRRATPDLIRHLRLDADRTTQVSQIALPDEAGEAGKFVRQAVMAYPEVYFAKLVVLGEGDSEDIVLHRMLSAMGVEADASSVCVAPLGGRHVNHFWRLLSSLRVPYVTLLDLDYGRFGGGWGRIKVAHGYLREFPNGNSVRTAAEVKALPGWKATCGGEDFFEELRFLKNAGVFFSLPIDLDFVMMRQFPGAYGATEHPIDDGDDLVTAVLGKSGIASHIGGEARSYFHDYHRLFKLGSKPAAHLQALAELSDEELIAGAPNTLKVLCQRVVKMLAEDAE

SEQ ID NO: 63517 - protein, 547 aa, Xanthomonas vasicola pv. vasculorum NCPPB 1326
MITPAQWSPVAIKLLEPGAKAAITAFHGNSMVIANPGSGKTELLAQRADFVLRTGTSRYPKKILAISFKTDAAHTLRRRVRDRSGFDHAHRLNSMTFDAFARRIIAIYRPLLKPKDRLDHGFKVGVNRVDTIQVAFKELVPLAQQLIEQHPMIKRSINMAYSHVFLDEFQDCTSAQYKLIHTLFKDTPTSITAVGDAKQKIMGWAGALDGVMGKFADEFPAVVLRLVQNWRSAPAIRRVQNRMISQMEPESAVAESDIVGEEGKVYLARFANEQAEATRIAEKIEEWIAEGIAPHEIAILHIRQSAMFNQAIDCELDRLNIPRRNEQELQDLVSEPVTEFVVNILRVLGHKPAPSAYTSLLYVLTAQDDGEQGDWVRLLSAARDRVAQGPAHDRAEIAFKQLQEVMALIPIATLLSLSAEYDAARIAEILGQVYEVLGRFIGQHHDLDQALARFLDEGSVRVMTIHKCKGMEFECVVLPCTEQETWWGDRDENRNAYFVGVSRAKQNLVVTYADRRSKPTQASSRWETTRRPQEEFIGYVQAGALPL

SEQ ID NO: 63518 - protein, 456 aa, Xanthomonas vasicola pv. vasculorum NCPPB 1381
LGRTLRAADWTAERTKANDLSEQLGEAVTENAGVAAFGKALTTGWGKLHKGKFFASPSIAFGTGGLAEVLKQVSVRFSPGHETPSVDFERLSDGQQSLLYISLVLAAHAVDVAALADEESPFDLARLRPAAFTLLAVEEPENSLSPQYLGRVIQSLRDLKEESGGQAIVATHSPAILRRATPDLIRHLRLDADRTTQVSQIALPDEAGEAGKFVRQAVMAYPEVYFAKLVVLGEGDSEDIVLHRMLSAMGVEADASSVCVAPLGGRHVNHFWRLLSSLRVPYVTLLDLDYGRFGGGWGRIKVAHGYLREFPNGNSVRTAAEVKALPGWKATCGGEDFFEELRFLKNAGVFFSLPIDLDFVMMRQFPGAYGATEHPIDDGDDLVTAVLGKSGIASHIGGEARSYFHDYHRLFKLGSKPAAHLQALAELSDEELIAGAPNTLKVLCQRVVKMLAEDAE

SEQ ID NO: 63519 - protein, 547 aa, Xanthomonas vasicola pv. vasculorum NCPPB 1381; identical to SEQ ID NO: 63517

SEQ ID NO: 63520 - protein, 626 aa, Xanthomonas vasicola pv. vasculorum NCPPB 206
MHLVRVRVRNFRGIAYGEVHLNGHTAFIGDNNAGKSTLLEAVDLVLGPERLSRRPVIDEHDFYAGTYVEPDKNEVVPIQIEVVVAGLSDEQLRHFRDHIEWWDSQAKTLLVGAPPEGTDAPHVGAAIRVFFNGWYDVEEDDFAGDTFYATPEMPDGSYLRFSAPDKRKCGFLYLRTLRTGARALSLERGSLLDVILRLKETRLTMWEDLLDQLRALPVGETEDIGELLVAVQDAVRHYVPSDWAEQPHMRVSDLTRDMLRRTLTVFMGTGAKRPDGSIYSAPYQHQGTGTINTLVLALLSIIAELKQSVIFAMEEPEIALPPHTQKRIINSLRQKSAQAIFTSHSPYVLEEFDPVQVVVLKRMAGVMTGVPATYPPAVKPKAYRTEFKARFCEALLARYVLVLEGRTEFDALPAAARRLAELDPTRFKSLENLGVAIVDARGETNVAPLGAFFRSLGKIVFAVFDKQSHEALATITASVDHAYESATKGFENLVLYGVSEVALRSYAAVVVAGGDWPQHLAAWTPTPATPLADLQAALSSYFSWAKGGGDAGDLLASCPTASDMPEYVRTTLAAIKNVIEPSPLPPLPPLPPQLAGVPPLPEAAAESPPLAPAYGKFQPSPPQPLA

SEQ ID NO: 63521 - protein, 570 aa, Xanthomonas vasicola pv. vasculorum NCPPB 206
MTKVWSDQKRDFLECARHALALGGPGAGKTHVALVKARNEIRSGILKPGQKVLFLSFARPTVARIIEKASELISREDLKQLEVSTYHGFAWSILRSHAYLLNGRPNLQLLPPPEAAAHLADIDKAQHENEKRRLFEQEGRLHFDLFASLASELLSRSDRLSAIFSDTYPIIILDEFQDTNSDEWALIQQLGKRSRLIALADPEQRIYEFRGADPRRVGDFLENFGAAHFDFAGENYRSSGTDITAYGNDLLTGANKGKTYQQVKITRYDFMYGKSLHFTAKAAVFSALDRLKKVPDKSIAILVPSRRLMLEFSDYLSSAADGLPALNHDVAMDAEPPALAAGVIATLLAGGTAGDVASRMLGALHSHIRGRRGGRSTPQTELDLAGALSGFLSSGKIRGSKRLLIVSEVQRISELRWQLQLTGDPAEDWLHLRGLLASSTAEALKQVATDARYLRLLHRGSVLRTNLGALWRTQGEYMGAEEAVRSALMQEHFAAAQKDWRGIHLMTIHKSKGKEFDEVIIYDGLYQRISKAPQDPKICAQDLLVLRVGVTRAIRRTTIVTPKRDPCPLL

SEQ ID NO: 63522 - protein, 271 aa, Xanthomonas vasicola pv. vasculorum NCPPB 890
RHLRLDADRTTQVSQIALPDEAGEAGKFVRQAVMAYPEVYFAKLVVLGEGDSEDIVLHRMLSAMGVEADASSVCVAPLGGRHVNHFWRLLSSLRVPYVTLLDLDYGRFGGGWGRIKVAHGYLREFPNGNSVRTAAEVKALPGWKATCGGEDFFEELRFLKNAGVFFSLPIDLDFVMMRQFPGAYGATEHPIDDGDDLVTAVLGKSGIASHIGGEARSYFHDYHRLFKLGSKPAAHLQALAELSDEELIAGAPNTLKVLCQRVVKMLAEDAE

SEQ ID NO: 63523 - protein, 547 aa, Xanthomonas vasicola pv. vasculorum NCPPB 890; identical to SEQ ID NO: 63517

SEQ ID NO: 63524 - protein, 800 aa, Xanthomonas vasicola pv. vasculorum NCPPB 895
MKLQAYRLHNYRRLRDVVIELDDEISIFVGANNSGKTSAVQGLYSMLRGDARKFELFDFSAALWAEIDAIGMSAPGDEEAPKRLPCILLDLWFRVGEDDLATAMSLLPSTDWDGKCVGIRVAFEPRDPRELVRRFHELHQKANNVAIEMAAKRKVASASVAEAGAGHEVEAAEASEYKPWPESLTKYLTKELSKEYTFRYYVLDERSFISYRASEADYEPLPLSKEPGGAAILKSLVKVDFLRAQRHLDDPDTGSSDRAESLSRRLSRFYHRNLEKRGDDHAALKALDTSEKKLNFHLEEVFGDTLKRLAKLGYPGVNNPEIVIRAALDPTTVLGQDAKVHYMVPGAASAQLPDSYNGLGFKNLVYMVVELLDLHEQWKAEEDKRAPLHLLFIEEPEAHLHAQIQQVFIRNILRLLEDANDHATFFHTQLVITTHSPHILYERGFSSIRYFRRVSDQLDHQTDVRNLSLFKTSEADAPARQFLQRYLKLTHCDLFFSDAVILVEGNVERLLLPAMIESAAKRLRSSALTILEVGGAFAHRFQELINFVGLTTLVVTDLDSVKVKSDDEKAAAQTAGVGDTVDDDDLKPFEVEDDDVTQPSGKKKSKQRGSTCHAHVEGAVTANQTLISWIPKKRSVAELWEVTAEQKTLSLAEGSSAAVRVAYQTKVSVTVGSATAQLCGRTLEEAFGLENADWCQAEANRAVGLKLKCAPNSPEELAEKLHDRVVGKNFDKTRFALEVLASGPLNGWRVPTYIAEGLAWLEAKVAHELEADAAIASEVATIEPTAASTVSVIAGAEQTA

SEQ ID NO: 63525 - protein, 503 aa, Xanthomonas vasicola pv. vasculorum NCPPB 895
MIRRVDSPDTDADREIHACITATPPQPFVVRAGAGSGKTTSLIKALDWVVSEHGANMRAKKQKVACITYTDLAANEILLDVNSSPLVHVSTIHSFYWAIAKTFQADIKIWLKSDIYRRISELEEEFKNYSSHVRQTTRDRNKADQERYARNLEALDGVKTFNYGVGSDYAKGILGHEDILQLADFLLQNRPLFRRVVALNYPFVFIDESQDTFPNVVKSFKEVEAQMRGKFCLGFFGDPMQSIFMRGAGEIPREDHWQAITKPENFRCAKQILDVANAVRAQGDGMEQVRGLHERVDGELKPVEGSARMFVLPNTLNRNETLARVRAWSAAADNDEGWTTPDLGVKILVIVHRMAASRLGFGGIYSALNDKTSEAMKQGMQDGTGWPVRPFLSFALPIVAAMNAGNEFAAMNLLREFSPRLTPGALTGRRAAGVLRELRTAVLRLVAMLDEAGTTVGDIAIHLRDSGLFDFDERYERVLEFVGDIGDMAQEAEAADAAPAKGR

SEQ ID NO: 63526 - protein, 713 aa, Flavobacterium sp. F52
MFISKVSLVNFRNFVNANFYFKKGINTIIGENGAGKTNLFRAIRLLLEDTSLPFAYKLTEGDFNRTLENGKWKGHWIIISVEFDDLNNEEAIQSLFIHGLGIAKKDYVKKASYNLFFRPKADIRKKLSELEEGDTASMETLLADITIQDNYETFFTGKSTVDFTDPDVYKELVGDFNNVIFPSTIDSSLFGAKIPHQLSVAKEVSFTFIQALRDVVSDFHNNRTNPLLALLKYKSGEIKEKDYEPINKLVKSLNESIEALPDVQHIRADIKSTIQDAVGLTYSPSSLSIRSSVPKEPDKLLQSLKLFIGEPGEGHEGGINELSLGGANLIFLTLKLLEFKYRKSKDSFANFLIIEEPEAHIHNHIQKTLFDKLDYEDTQIIYSTHSTQISEVSNVENINILVKKFNYAEAYQPSTGLQPENIEEIQRYLDAVRTNLLFAKGVILVEGDAEEILIPVMIKKAFGINLDELGISLINIRSTGFENVAQLFHDDRIRRKCAILTDLDDAICDTSEVVADSDAIKKYKKKVEGSKVKGLARKAKLDAFQAGNDWVKAFYAKYTFEVDFITEGNAWEVKKLIDTVYVDPPTRVLAESEIDNASVAVYGKRVLTMAKQEGKGWFAIMLGKHISYKTVVPGYILEAIFFAKELYSRDMIADMINYRIKMNLEDNNLLDFTGCRSELLRYRAGEINLEDLIFDFDLVIPNDQVFSLIEKFK

SEQ ID NO: 63527 - protein, 599 aa, Flavobacterium sp. F52
MFIWEEGSLNSEQEKAILEKESVLLIACPGSGKTRTLTFKIAYELGKLTSNKEFVIAITYTNRAADEIKERVELLGVKTDQLWIGTIHSFCMEWILKPYHLYSERLKNGFKVINSYDSEKILSELCVPYRREDITHYDCGILAKTDKFYLTCPDSNKYSSFKKIIAEYFRILKENHQIDFEQILFYAYKIIESKPVIADILYKMFPFILIDEYQDTKEIQYHIISKILKAGKGTSKTLIVGDPNQSIYDSLGGYPMPQVQLEKLLGFNLIPLSLDKNYRSSASIIGYFDYYKTFDTPIIPAGSEKDYSSVITFNSKVSVDGLIKEITRLIILNVDKGISPNEICIAAPQWIHIASITRRLMVELPDFSFDGPGMAPFSRDIENFWFKVSRIALTEPSPYMYVKRLRWSKEVLNELDSAGVDVSKITNKQFLKICNSLEINETDGLAYLRIFFTKICQHLKVLLTSFPVLDEHFNSFFASSEARIQRLVKEGNPFIGEIENFRKVFKQREGITVSTIHGTKGEEYDTVIGFGLLDGYVPHFKDSNGIHNSRKLLYVLASRARKNLHLISEVNRDVHWYHAPDGKLPCDHLLLYEYNYFKE

SEQ ID NO: 63528 - protein, 689 aa, Streptococcus pneumoniae GA52612; identical to SEQ ID NO: 62612

SEQ ID NO: 63529 - protein, 605 aa, Streptococcus pneumoniae GA52612; identical to SEQ ID NO: 62613

SEQ ID NO: 63530 - protein, 512 aa, Streptococcus mitis SPAR10
MLKVETIEANTVKNDKTLSQAYNKIVSTYIKNNDIATIDKLVGAINYQVKDMVDTNIKNILQSAVSSIESTKNLKMNLHPDVTLEKIFANSIIYEYQEGNNNIPESQFGMGYTNLMVIIAKIVDYIELYSKKDINGSVNILCIEEPESFMHPQMQELFIKNISKAIATLLGKKQQLDTFQIIITTHSTHILNSKIQSGNTLNNISYLGQAGVNNIIKNISDDAIVSGRNIDKKAYEYIKKYLRLEVSDIFFADAVVLVEGVSEETYLRYEIDKHPILKKHHIKVYRIDGAYAHQFISLLDLLEIKTVIFTDLDLKRSESEKKVDIKDNDDPDPDVIPQNISDLESKYAAATSSLSTNGTLQYFIKKELKDEEAKYGEINNKIIEKLNNNEELIIDYNNITMFSQGKINGYYATSFEEAVVLTNAGNEDENKYKKSLIKALQYVHPNMRCFGDIDETSEIADKSYMYQVKLSDGKSRFSTGIVYLSVTDDDFSLKQPQYIESGLNSLCSYFKE

SEQ ID NO: 63531 - protein, 249 aa, Streptococcus mitis SPAR10
MTYTISPENKQLELDIQKDINECLDNFESFCFDAGAGAGKTYALQKSIEHILKTEGENLKLRNQKILCITYTNAAKDEILSRLGKNSSVVVSTIHEFLWGFISIQQELLTREHKNKIIDELHLIQQKIDDSPLSSSLDQSEFQKNICDEGFLKIFYNTPSSPAKDFKEKIISYSKYFEQYLSSVEKFSSLVKNVNKKCKFEITLKEIEEKNHKRLFITQFKTEISLKVMSLAMIRYYDIVKISLLVRIY

SEQ ID NO: 63532 - protein, 689 aa, Streptococcus pneumoniae GA60132; identical to SEQ ID NO: 62612

SEQ ID NO: 63533 - protein, 605 aa, Streptococcus pneumoniae GA60132; identical to SEQ ID NO: 62783

SEQ ID NO: 63534 - protein, 670 aa, Streptomyces auratus AGR0001
MSVNFEQDVTVCVGRNNTGKTSLAEVLSKFLRSGEISLRVEDFSADSYVEFANAYRKFSSGDEAAAREILPEISVKVFLAYDSENYEYGNLGPIIVDLDPDCAQAIVAIRYALKPGAMREFFRDAPATITEEWGESLLLSLIGPRIPHLYERTAIAIDPTDAGNFRHISMNEVTRAIKVDFVKAQRGLDDEKERPKDQIGKILESLFMVAAKADDGSILKDFANSAETALEDIVAKLNDHLQNMYSKMAPTISDFGYPGLGNRNFSTRTTLDSKRLLSNFTSIKYPGSTGVELPESYSGLGSRNLLMILLTLFSYYREHSAQANRSCVHLVFIEEPEAHLHPQMQEMFIHQLGVFKKKFPIVDGEDGSWNAQFLVTTHSAHIANRAGFSAIRYFRLCEGYREATSSSVLNLAEAPGIDKEFLHKYLTLTRADLFFADKAILIEGTTERIFIPAAIAELDENQRNRKGSSLSRQYVSIMEVGGAYAHIFYPFIDFLGLQTLVITDMDSARPGSSKQLEACCVQEGTATTNEGIKKWFAENDMSPSDLLKQAADDLPVSGMRGLAYQIPESLEGPCGRTFEDAFILANPTLFGLSSEHGEDFLEAELKARELAKKYKKSDFALEFAIEQQNWKIPRYIKRGLDWLLAQMPPGEIDEESQGDDESPGGQVAVR

SEQ ID NO: 63535 - protein, 592 aa, Streptomyces auratus AGR0001
MTQDGADVTTAEQESKETLRRILAALDGRCNFKLEAGAGAGKTYSLIDTLHYVMRNRQKYLPGDGQRVACITYTNVARNEIIRRTDGSPYIFAATIHGFLWEAISRFRKPILQEIVAMPSWSSLLEGRTSLHGCDVSYDLGFRGIEENTIHLHHDDVPALAIRLFANQKFRYLVADRFPIILVDEYQDTPSGLAEAMLGNRSATSTESTYGFFGDHWQQIYDRTCGSIDHLPVEGIPKRANWRSSRAVINLLNNMRPELPQAPVADAKCGSVTVYHTNNWTGPRGVRSKKGQIPDHVLKQTLAWVTEDSCRRHGRGSGSSVQAKVLMLTHSSIANELGFGGIDKAFKRNEDYVRKNDDVVAFLLDILEPTCAYFADKKYGPMFDLLKRSRPRMRKRSDKSGWVELFDEINAARNKGSVGDVIDIVLNQKYFALPRSIVSRQRNWELAHKDLVDAQDISEPRRLVEYGKFRNVSYREVVALHRYVEENTPFSTQHGVKGAEYPSVLAVFGGWNLYNFPDMLANFPRRDALSDEDRKRFVRSRNLFYVACSRAQHDFALLFTTELSRGALQTLKEWIGESNIVDVQYSPEGAPI

SEQ ID NO: 63536 - protein, 774 aa, Rhizobium sp. CF142
MHIEFVEIGNFRKLLGVRIVLSKEKTVFVGANNSGKTSAMVALRHFLVERERNKFSLNDFTLSHWPIIDAMGQSWEDSKAADQELALPDWTPILPFVDLWLSVTKAEAHYVQKLIPTLDWDGGLLGVRLRFEPRDSLQLQKDYLAARDDAKTIQAVDTPPATTDSSAKAIMLWPKSLTEYLQRRLSKQFTVRAYILDPAKIADPKFGVAQPQIVPVTAEPVDGEPFKGLIRIDEISAQRGFGQSEGSKDPDDDNAATGASGTRRMSDQLRRYWNRHLDPYENPDAQDLQALKAIETAQKAFDDRLREGFAPALEEVQGLGYPGVTDPRLNISTRLKPVDGLNHEAAVQYMIQMVDGEHAFDLNLPEDSNGLGYQNLISMVFRLMSFRDAWMRVGKANSSSDLETDMLVPPLHLVLIEEPEAHLHTQVQQVFIRQAYKILRKHKELGSKSTLSTQMVVSTHSSHVAHECDFDALRYFRRLPSEMKSVPTSCVVNLGTVFGTDIETKRFVTRYLNVTHCDLFFADAAVLVEGPAERVLVPYFVSTQPELADLAECYVTWLEIGGSHAHRLRSLIEHLGLTTLVVTDLDAMTDARISVPPKRGAKQKSRNATLSGWWPASDDLDTLLDVKPEAKIKNYKDERFGMRVAYQSPVQVQFKGVASEAVANTLEDALVFQNLDYFATTTGKGLFARFKASIAASGSIGELGQKLFDDLKSGGKAEFALDLLEIEDPKALQAPHYIKEGLLWLSTQLRKQQQELGVATSALTPEPQNAKAAA

SEQ ID NO: 63537 - protein, 629 aa, Rhizobium sp. CF142
MIVEAIPASNVGIDDHVDDELATYLNPENPRNFFLFAGAGSGKTRSLVKALGHIRRNHGRYLAFRGQRVGVITYTNAACDEIKRRSDFSSLFYVSTIHSFAWELIQGFSSDIREWLRIDLAADIARLNLEESKGRAGTKASITRQSQIVSKTKRLSRLDEISSFVYSPTGENSEPNSLNHSEVISICAAFLTAKPLMQWILIGRFPFLLIDESQDTNKYLIDAFFATAAAHEDRFGLGLIGDVMQRIYADGKEKIEKSLPVSWKTPEKKLNHRCPKRVVELINQIRSVADKHAQVPRSDAIEGHVRLYIRSVGAENRQAVEDAIRTDMAIITSDEKWNVRNDCKILTLEHHMAARRLGFDAVLQPLLAVESWRTGLLDGSLPATRFFSQIVLPLVEFGQKDDKFAVARIVREKSPLVSRDALKEAADPTFLLRKANDAVKNLLKLWDDDEPTCGKVLDCIAESNLFEIPDVLKPVVALRLSKTVSKPADDDADPVSEKVTALQGFLEAPFGQISLYNQYVSGLASFDTHQGVKGLEFERVMVIIDDSEARGFMFGYNKLFGIEGASPTDIKNVKEGKETGVDRTRRLLYVTCSRAEKSLSVVLYTENPQAAKNQALAQGWFKENEIDYS

SEQ ID NO: 63538 - protein, 594 aa, Klebsiella pneumoniae subsp. pneumoniae DSM 30104
MRISRIRLINFANFSDVDVETGESIVIVGENKVGKSNFIRGLQLILDPGLSERDRQLGFEHFWDGLGEDKLGETIEISVDLTEFTDDPRLMAHLNDCVLNPGPPMVARLTYRFQPKTALNRAPESLKDYEYVIFGGADPDMHIGGAFRRMLPIDVQGALRDAEKDLSSWRNSPLRPLIEELSASLDDETREEIQTQVDEAQRELADHDEVAATAERISERLIAIAGEQHAVPVSLGLAPTRVDALLRSLRLLLDSGIRGIGDASLGTANLIFLALKSLELDRLVNDGERDHTFFVVEEPEAHLHPHVQRLVYRYFLGTDGDNGDEGTPLTTILTTHSPHIASVTPIRSIVLLRHDPEGGKTIAVSTANAPFTPRDEDDLQRYIDVTRGEIFFSRGVILVEGDAERFLVPAFADALNIPLDMLGITVCSIGGTNFTPYVKLLGPRGLNIPHVILTDRDPEEDGEPLVRKRFINILDVLESDVDHDDMTTEEVIARAGDFGCFVNETTLEPELFTGGLGEAMKLVIEQELSPRRATLNRIQAWVDDTDQLDNVRLLKLIERIGKGRFAQALAPSVSEDVCPDYIREALEYICDAVT

SEQ ID NO: 63539 - protein, 613 aa, Klebsiella pneumoniae subsp. pneumoniae DSM 30104
MKHWSISAMPSRSVSAAYLAQAAELAGNPGQLSAYHSQGHCVVLAGPGSGKTKTLVLKLARILAEDVQAPRGAACITYSQECARELTRRLEALGLREAPNLFIGTVHGFCLRHLLMPYGRLADLPIPFPLSVASQRESERLLRQSGDRLFGANHPYKAIDLGRHRRSVLNRNSVAWRTEEELAAWAEAYEAALRQQGLIDYDDMVIFGQRLIIEHDWVLPLVQAKFPILAVDEYQDLGVALHRMVKRLAFEGGVRLFAVGDADQSIYGFTGADGALLLELAGRRDVETVRLQLNYRSGADIVNASEMVLGEVRGYRANDPNRQTTIAFQLCPDGLGDQAVYAVEQIIPAALAAKPGRTLGDIAILYKDYRAGDVVADAVTASGFDYIRVDTAAPYRKVALTSWVEDCAAWCAGGWRIGRPQLRGLIDRYLAFHRARLDDACARSKGQELTRLLWALRADQHSASDFVASLRNGLVDSLLATEPTLSDQAEQLDRMTAALAEGGALAMLDITSLGGRDGSPEHLNLLTLHSAKGCEYDVVIMVGLDLGNLPWRNETPEKLRESRRLFYVGLTRARDEVHMLYSGFVDGRYGPMRLGRSPFLDELEERMRGAGLR

SEQ ID NO: 63540 - protein, 593 aa, Novosphingobium sp. AP12
MRLAKLSIRNFRNFQAIDVPLAGNVVLLGENRVGKSNLLFAVRLVLDPTLPDSARQLKLSDFWDGCDLAASPEIEVHLHFADFDDDAALVALLTDFRTAADPAVARLSYVYRKKPEVAGIPQSGEDCEFIVYGGGDESRAVSSRVRRRIALDMLDALRDAEGQLASWRNSPLRPLLEDAIASVSRADLDGVVADLEAATKRLENFPSVKALETALRSGILDLAGTAHDIDARLRFAPADPLRLFRAIALYIDNGRRGLAEASLGSANVALVALKLAEFAWRRAKNERNYSLLCIEEPEAHLHPQLQRAVFDKLFQSPDPAQALIVTSHSPTLAAAAPLRAIVQLRAAGGATRAYSLASLPVSPDELDDIEQYLTATRSELLFSRGVIFVEGDAEETLLPVFADAIGHNLDRLGISICNVAGIHFEPYVKLAASLGLPFSVITDWDPLDGAKPPLGKARTLGIWDAYCTVTGTAPLTPEQRAQWQAADFAGFSAGWRQAGIFLNDQTFEIAVANTPGLQAALLDILEEQGFGAIRKARIAAWRAGAPVDPAQLLAMVADIGKGRLSAKLKKKLAWNLAPPAYVAGAVGYVAARV

SEQ ID NO: 63541 - protein, 593 aa, Novosphingobium sp. AP12
MSNHLALVRALVDLAGNPEQADAVRERGHCVVLAGPGSGKTKTLTTAMARALVEDVVDPRGVACITYNNECAIELENRLAALGVLSSDRNFIGTVHSFALTQVIMPYARCFPGLLPADFRVATTAQRRAAVESAYLAVFNDRFDPHDRWSFAEEKRRRDVDRSLPAWRGINPELADFIEAYEAELRRRGLIDFDDMPLIAFGMIKAHRWIRAALQARFPVLFVDEYQDLGHALHELVLLLCFDGGMRLFAVGDGDQSIYGFTGANPKLLQSLAARPDVREIRLRFNYRSGARIIRASLGALGEERDYRGLDGAPEGELTFYPVMGGHDAQAAAIAETVLPALLARGHPPEQIAILYRAAWLGDKISHALNGRGVAHVRTDGNALIKRSSRLARFVEGCAGWVTGGWREADPPYGRLLAQALALVYGGRASDAEQETVSRQLIAFLRSSIDAGETTHTWLQRLCRELVAPWRVLARNPQQEWEICSEMVVKTDPAQDKDMPLNVFSGRIEGTGPLSLSTLHSAKGREFDAVILYGMNASDIPSNRDRKSAGALREARRLFYVGVTRPRKELAIVYQEGHHSPWVAELYQRSQQG

SEQ ID NO: 63542 - protein, 680 aa, Flavobacterium sp. CF136
MKIKTLEITNFRLLKHVVLSLEDHTTVIVGRNNSGKTSLTEIFRRLIGDKNPSFSIYDFSISAMDGFIKALHSKLEGKDDDIREEIPYIEIRITIEYPVDLEDLGILGDFIIDLDPASNIVIIAVKYSLKNGRIDSLFEGVADMGEESIKSFMKSLKERIPSLFETHITAVDPTDPENTALIEYSKFRSVLGASFINAQRGLDDVTHSEKDVLGKVLAQLFKTSQSNAAPDDMKSSSAALKVVVDDIQSKVDTDFNTQLNKLLPALGLFGYPGLSDPNLSTETTIDISNILESHTKIRYGQGNNLFLPETYNGLGSRNLIYILFQLFEFFRRYQSRQVSNSLDIIFIEEPEAHLHPQMQQIFIRKLYEIANEFSKTLNDGKAWPVQFVVTTHSTHMANEAEFEAIRYFLTSNGVARETIVKDLRKEFKAADLKQDKEFLHKYLTLTKCDLYFADKAILIEGPAERLMMPLLIAKRDELDLTKAQLGLQYVTTIEVGGAYAHHFYKFLDFLELQCLVITDLDSVLMTKGEKITYPGSFVKNGSHTSNAGIKNWFAKDSVGHYPLADCLVLTADNKVSGSRRIAFQIAEDGKVAIGRSFEEAFILANREHFGISEIEEDDVEASAETHAPENKKKTEFALKYSLEETKWNVPKYILEGLEWLAIKPVPAVIDPVEDVKEPTE

SEQ ID NO: 63543 - protein, 586 aa, Flavobacterium sp. CF136
MAENLEISPAENASIECLEKVFKAIDEKKHFLVEAGAGAGKTYTLIKALKHLIDKYDAEYFKTSRKIACITYTNVAKDEIRSRTDNHPIVLADTIHAFAWEAIQNFQKGLRDRMIELGDRWQERIAEAGGIRSQKVIYSLGYPKITAEEIFLHHNDVIKLFTSLLYDNKFKKIFTIRYPIILIDEYQDTNRGLADALVANFIEEKSNIILGFFGDHWQKIYGTESCGFIETTEGKMEIIGKQANFRSDKNIVSVLNKMRPELEQFEYDPESAGEIVVFHSNNWKGERRTGAHWNGDLPEAVAHDYLEWTKEELNKNHWDISTETTKILMLTNNVLASEQGYQNVANTFSDNDDYLKKNNDYMAFLMDTVEIGCEAFLNKKYGEMIQAFNVGAPKIRKHADKKVWFDDMTKLLALCQVGTVGEVLDLLKTTNKPKIPRKIEEKEQRFTQIEAVEEKDREEEDKSFASKIKSIRSIPYSEIANVSNYIDDKTLYSTKHGVKGAEFENVIIVLGRGWNQYNWNQFLEWMDSVKVPADKQDSFERNRNLFYVACSRPQKRLCLLFTQELTENAFQSLNKLFGNVVKEACT

SEQ ID NO: 63544 - protein, 630 aa, Pseudomonas sp. GM16
MYLRQLEVEGFKSFGRRFTVEFHEGLNVLVGENGAGKTGVINALRQLFQDSESGKRSVNERDFHKSFELDAAPASSFAITATFGDLSVFEKVALDSWCGDQDEAVLNLTVLNRELRGRYSQELWGGAIRTGAFNQQTLELIHCIYLPPLRDAEQKLREGRQSRLSRLMKALCKDQLQVCAKTKTLHPLEVKVADFNSQLAAEQDIKRANDLISSSLRAALGERLSQNTTIQFSESNFTRIVEGLRLLYFPNASSAELSQFRSLDENSLGYNNLLYIASILAELIVEDGEGPGERTLHKLLLIEEPEAHLHPQLQIRLLKHLQEVALNKNIQVVITTHSTVISSAVSINNIIHINGGGEPLAVPARFCGLAEQSRRFIDRWLDVTKSNLLFSKGVILVEGVAEAIALPELAKIVLANRGKGLNTLEDYGVSVINLNGIYFAHFMQLFCEVDGQLRSRNLPIPCAGLTDKDPAKTHKVRVQDQLVDVAIKPHPGNLAAGTNPALGLIPTIATSQYGRLFSGDLKTFEYDLAMTAGNLQLMLQVAYDNWPTDGPVKAAFQDMLAADFVALTEAQKAEYAYELLERIDSTNMGKGLYAQLLADKLEQGDYVFAVPRYIQQAICWACAIAEEGSE

SEQ ID NO: 63545 - protein, 585 aa, Pseudomonas sp. GM16
MTFPSDDQRGYLGSSIDDNIYLEACPGSGKTEVIAAKVAREIEGWQGYPGGIALLSFANSAANELKSRLIAHRQRAPVAYPHWVSTIDSFILNCLVAPVAHRLTGYAGKNGDFRLRLVDATSTVYIKTKYAIEHIRVPANQYDLDLATGKFVFRTGEPGLDRKLNAVVLADWQLRDLREAKTRFKGAGFATYRDVEHLAIQILQEEKLSTFCARLALRYPFLVIDECQDLSVEQLTILEGLLGLGVKMHIVGDLNQSIYGFRHADPARVMQFIRDHGFNGLQLCQNFRSSQAIVDLCSELVPGNKIHGNPTIQPAAPVIVEYDDCPSEAMPLFMSLSDSYANRVIVSRGHSTLSRFCSGANDLNDTERLALACALAGNDSAIAIQKSLALFGGWLASKLEYSAKPNSFHCPVDVESELEWRLFLHQALAFVTITGASVAGQHWRGWCKVAKARLNELPKQAFVIADIAVAIAPLTALGLRSPAGLGEQLVTQRLSLVTLQESSIRLATIHEIKGETHEATMLVSASRRGDQSHWADWIGDRNSEAARLAYVASSRPRNLLVWAVKKLKAAERTTLRGLGFHVAQR

SEQ ID NO: 63546 - protein, 675 aa, Pseudomonas sp. GM18
MLEGNSTVIVGRNNSGKTSFTDIFDRFTGETGARFRLEDFSVASRERFYNATTLRKQGAKPEDVLAALPTLSLTLTFRYDGAIPNLGPLSPFVIDLDVDSTAAIARVEYRPTLATLHTLLDIPSAPEGVEPRTHFFRSLRDTLPKAYSIHVCAIDPTDDTNRRNFEGTAAMAALLQCNFVRAQRTLDHAKHGDADVIGKLLSALFKTAAAPTAAAADQELAAKLKASVEDIERNVQGDFDEMLKKLLPAMEVLGFPSLNDTELRPETSLNVEALLSDHTKVVYTGTDGVHLPEGYNGLGTRNLIYMLLQLESYHKAYRAKATRPATHLIFIEEPEAHLHPQMQEVFISQLNAAIGKLSASYPKESAWNVQFVITTHSPHVANAASFEAVRYFLNESPNQASTRQTKVKDFKKGMSAISPEDQDFLHQYMTLTKCDLYFADKAIMVEGTTERLLMPRLCELVDRSLDDKHKLARQYVTCVEVGGAYAHIFYPLLDFLELKTLVVTDLDSTKPVEKQNKKGNTITSWEKCPVAEGQRTSNAAIKEWFRPEDSKDRDGWQITPAELIGKTAEEKQSGYRRIAYQIAEKPGTNMCARSYEDALVLANPDRFEWPKEEDEATEAWEIAKGLAKADTALRFAIREKEWAVPRYIQEGLAWLSEPPPQPAQNLEAPAKEEAA

SEQ ID NO: 63547 - protein, 577 aa, Pseudomonas sp. GM18
MTEPAENPALIAAQEAQRRIDEALDAGRSFRLEAGAGAGKTYSLVAALKRLIAERGPALVQAGQKVACITYTEVARNEIAQEIEDHPAILVDTIHGFSWAFLRQFQKSLRDLVGEMGDRHEKIEEGGGVGSKPVDYDFGFFGVDTDRITLSHDDIPEMMAKLLGKEKFRRILSQQFPVIFIDEYQDTHRQFMEAITEHFLMPNTGPIVGLFGDHWQTIYRSEYELAEYPIEEIGKGSNFRSVPAVVDVLNKLRPDLPQAVRAPEAKGEARFFHANAYKGQRTSDSHSKEDLPADLARSTREALMQRLQAEGWDLSKTKVLMLTHNVLAAEQGYPNIAEVFRGRTEQFTKKEDPAIKFFAEVVEPMCEAYGASRYGSMFRAFGSGPAITKHDDKACWRRDMDTLQKLRTEGTIGQLIDHLKTTRRPSPPERLLRRDEELIALDGAPIPEDASALQRYSKLRDIRYGEVIEVVKFIEKQTPFATQHSVKGAEFDNVLVVLGGGWNHYNWPQLLELIETNALNAKNTKGFYRARNLFYVSISRPMTRLAVLATQTMPDTALATVNHLFGSDSVEELAIVT

SEQ ID NO: 63548 - protein, 630 aa, Pseudomonas sp. GM24; identical to SEQ ID NO: 63544

SEQ ID NO: 63549 - protein, 585 aa, Pseudomonas sp. GM24; identical to SEQ ID NO: 63545

SEQ ID NO: 63550 - protein, 765 aa, Pseudomonas sp. GM48
MRIQHLELANFRKLKSVRIDLAAETTLLVGANNSGKSSAMLALRKFLVKPTTFRLQDLTLCHIAKLDAIGQEWEQADDGFVIPENNAWAEWLPTLDVWIQAAQGELHHIRDLIPNFSWSGGMVGMRFRLEPDDLPTLYSDYRKERARVATLLEEIQNQAADGQVRPALQLWPQNLHDYLNRRLVKAFKVRWYRLDPDKLSPPNAETRTANLQPLTDTAVPLERNPLLNLIRVHEINAQRGFGDSADEGQDESKPGSGRKLSEQLRTYYRRHLDPGDSPDVRDLEALRAIEAAQSAFDSRLTVSFAPALREVAGLGYPNNSDPSIKVATRLAPTDGLDHEAAVLFELDSVAGAPGEPRLSLPETSNGLGYQNLISMIFRLMAFRDDWLRKSRTPEERSAVNVEPIHLVLVEEPEAHLHVQVQQAFIKHAYHVLCNDPLLEEFPNLRTQLVVSSHSSHVAHEIEYEHLRYFRRLPSGMANIPIPVSTVSNLSTVFGQRGKTKEFVTRYLRAHHADLFFADAVILVEGAAERMILPHFLRQHFKFLDQCYITILDIGGSHAHRLRPLIDALGIATLVITDLDAGKAKAAQPVARGADQITNNPTVRHWMRVTGLGHDVDTLLDLPAEQKVEEIDALYSIRIAYQTPVSIRLPKSGAQAEALPNTFEDSLVLSNVERFTGKPRRGLMRAFSEAIQTADTAQELGAALFEKLRTGDKAEFALEILGDPEFGQLVVPSYIHEGLTWLQSKLELKRKDLLVVPPAIVEVTEE

SEQ ID NO: 63551 - protein, 624 aa, Pseudomonas sp. GM48
MSPAAPERDDHVRDADDVIRDCLDLDRPQSFFLYAGAGSGKTHSLVSAVRELKSRAQRRLTFEGRQVAIITYTNAACEEIARRLEHDPLVVVSTIHAFSWRMIQGFNDDIRDWLRTRLAESIEDLNDKLAKARDANNKTARANRASLESKTRRLAALDDVVSFTYSPTGENRGRQALNHAEVIQMAAAFIQRPPLLDVMADQYPVLLIDESQDTYGPLMDAFLTAQSLIPQRFCLGLLGDTMQRIYNDGKEHLEQAIPADWAIPEKPVNRRCPTRVVELINVIRSAADDHQQTPKPGAIRGAVRMFCTRQAAGGGFELESQIAQRMAQITGDEQWAAGSSERKTLILEHKMAGRRLGFEGIFTPLYTVEHLRTSLLDGTLPILKLFFDGVMPILEAANNSEFALMEAVRLRSPLLDSEYMKAAPDQLALLQQVGAGCRTLCGLVADNDPSLADVVLALAETGLLEIPDRLRAALAQGVTDEEPPETVDREALEVHAYRVLLGRPYSEMTAFAGYAQGLSPFDTHQGVKGLEFPRVMVILNDEEAGGFLFSYEKLLGVKAPSESDIKNQRAGKDDALSRTRRLLYVTCSRAEESLAIVVYTAQPETARERVVDAGWLAADEVEII

SEQ ID NO: 63552 - protein, 651 aa, Pseudomonas sp. GM79
MVLKQMRVCGFQSFGAKPVTIDFRKLTFLIGPNGSGKTATLQALCRLFSIDPNQRRLRKSDFFVAHDEEERPDSERTLWIEADFYFPEIADETKEHPTIPCNFGHMRLDNIHGVPRVRYRLDASLGLDDEIEQTLRYVSEVDEDGNPVATSPVPRDERNQIQVHYLPARRDPAEHIAYGTNALLGRLLRAVNWAEQREKISQLSADISESLSTNQSVINLGDGIAKVWGKLHKGKFFKDPSLTFVTHEIEALLRHLSVSFTPGHGEQQVDFSRLSDGQKSMLYLTLVLTSQAIGRAVLKGDDDSFDMDKLKPAVFTLIALEEPENSLSPHYLGRIVSSLKALVLAKGNSDAQAMIATHAPSMLRRVEPEQIRYLRLDDSRCTVVTKISMPPKAGEAYKFVREAVQAFPEIYFSRLVVLGEGDSEEIVLPRLLAAEGLMVDEAAVCIAPLGGRHVNHFWRLLSRLEIPYVTLLDLDVARHGGGWGRIHYVATQLNYHRPNQGYMPDDQLEKLPSWNNPKYKLLKVEKDRGFRSYIAELEPFEVFFSSPMDLDFAMLRAFPKAFGIEAKHLVTPKVGQVRSVLGDSFYDEKQYTVSERSYFAAYHKLFKVESKPKSHIEALSKLTDDDLREAMPPSLKRLVKHIIKVAKELHE

SEQ ID NO: 63553 - protein, 555 aa, Pseudomonas sp. GM79
MIKVEAWKPSDGIVLEPNAEIAAKEQKRCVALTAGPGSGKSELLAQRADFLLTTGVCRYPNRILAIAFKVDASNNLKERVRRRCGAAYAGRFDSYTFHGLAKRIVERFRPVLSGDDALNPGFKVVAKGKAHPVQTEFKELIPLAIKILDAYPAAVNAVRQTYSDVFLDEFQDCTDEQYELVTRLFKGSGRRVTAVGDVKQKIMGWAGALDGVFAEFVDDFEALHLNIYRNFRSLPHLLKLQNEIIKVLDPDSEMPAQLLAGEGGEVHVLSYADCEEEASDLAERIAHWVNVEGIDPAKIAILTRIQPEAYCMRLTAELDDWGISYRNENKAQDISTEPIAQVIVDYLLCIYGLREPKAWTRLTRRIIPVEDDAEGKLKSNWSRYIKEARKSASADLATKTFTQRWTLLEEFLAMVGPTLLAGLSHDYESRETLRDLIAEVKKYIDEALEREPDLLKALAQLSDDQSIRILTVHKSKGLEFDTVVLLGVEDQAYFGKDHHEVQCTFFVGVSRAERRLIVTTAHRRENLGQVNYWKSSRTAQEEFLGYVNLWKTYSN

SEQ ID NO: 63554 - protein, 594 aa, Pseudomonas sp. GM80
MRISRVVIQNLRSLQSVDVLLTDATTLVIGENNTGKSAFIHALRLCLDVGLSSSYRALLKDDIHSSIIQSFPFQVFVGIEFSGFEGNENEEALLHGTQIGPDRARIFYRFRPKKKFRELHSIGHLTNALTLEDFGWELFGGGNSAVDLTAISWNVENADFGATPVGLQYLQSYLVVFLPALRDVEAELQQNRRSLLTRLIESCGISDAEQQALINAVMAANAQIEASPTIQAVAEAIDNSLKSITGPAFSLDVDLGLSSPTFQAIVRNLIVLLSSSTFSQFEPRRNGLGLNNILYIAILIEHFRKRAAGGKSSGELILIEEPEAHLHPQMQATLVEALRELPFQVIATTHSTQVTSKAPLSSLVMFTHKPGLPPYVGTVRSIPALTPYDQLDLERYLDSTKSNLLFARRVMLVEGAAELLLLPPLIKQVLKIDLEREGITLVAIHGVHFGAFARLFSVGGLPKRCAIVADADLVPELLFPGDDPVINIHLSALHGPYVHSFAGATTFEREITLPGNLEMLAETIRDLGAPQALGAIEGQILVGGPIPDALKAQILRTAKRFGKARFAQTAARHAHLAGELPAYVIRAVEWLREI

SEQ ID NO: 63555 - protein, 586 aa, Pseudomonas sp. GM80
MSHLTVEQFAAIKHPGNLLLTACPGSGKTRTLIAKLVTEVEDVRDSPRALCCITYTNSAVQEIERRAREQLLAGDDRFFSISTIHSFCLNEIVRPYGWLMPGFKGTAKILTRENEDFESICRYAVAQAGGAGVTREDYDAFESIGVDADGQLIGMAAENRTVKAAAPHFWARCTELGYTDFGSIIYVAYQLLRDKPQIAKSLGARYKWFLVDEFQDTTSLQIEILKLLHASGRSSFFCVGDIAQSIFAFAGARPELVQPFGEHIGAETRLSLSENFRSSQRIVSHAEKLFPRFPPMVASGPNKDFALMPDLVRGGSVFDAITKVFLPRAAAAGIAIGDCTVLAKDWNSLYNLGRLLRAAHIPIVGPGARPYRRSRLFAHIAEQLCFALTSTSGKGSRQLERALFHTVQDLTGYGTDVFSHGGRVVLIRLLREAYRLSQVSNGAIAWLDQMSIRTGEILRDSEFVSDQQAKMLYASVQEMKADMQKQNADLSALTIDDLGIFADSSNALHLSTIHYAKGREYEAVAIIGMKKGTFPHFKATDIEAEKRQFYVGVTRAKKFLMYVCETDRFNNPPSPFLGSMGVQMLP

SEQ ID NO: 63556 - protein, 712 aa, Pseudomonas sp. GM102
MKVVRIEVNNFRLLKRFSLDLESNLSLVLGKNNSGKTSLLSALEKFINSSEKHKIVFDDFNVDLKAALIKLVSGADPIGPENAYIPLGITLKLYIEYDGIDNLSPVSQLIMSLDPDDNHIVLGFEYLVSYPQLTAMRNDYNDVKEKYDNDSSLFLKENQHIYFDQVRKKSFSYSDPDVFTDLTKENISLADVISFRSIGAKRSVTNKDNDKTLSSQTAIIYKKTSENQEQQEAVEGFKKQLRSTDKELSEIYQDMFSGLLGKVAKFGGSRLSETHIKIASTLQHRELLDGNTTVMYTHDTHDLPEHFNGLGYMNLISMIFEIEMLMTSFRRSSKENPAAINLLFIEEPEAHTHPQMQYTFIKNIKSLLKESRVREDGVEIHLQTIISTHSSHIVAECDFDDIKYLRKSPLANSVDAKNLKALKSEYSSDDVNDNAQAELHYKFLKQYLTLNRAELFFADKAILIEGDTEKILLPAMMRKFDQEIPDAGAIPLLSQNISIVEVGAHAQIFEKFIHFIGIKALILTDIDSGIKELLFEKDGVTPQLYKKGTQKIETIKCRPDDPAADHTANGSLIFYHGKVREDLGYFTSLNIEGKALSKVGGEWKVDVDGCIFLAYQTKDDGYHGRSFEDAFFSLNKALLGTDSEKFPSLTPKWFNKYINGECDAFEFAEKAVGKKPSLAIEILLNSIPDKKSDFSNWKTPHYIQEGLEWLRK

SEQ ID NO: 63557 - protein, 641 aa, Pseudomonas sp. GM102
MVAQMKNLEEVSDEAKKILDTISEGKSFLLSGGAGSGKTYSLVEVITNLVTLKPLARVACITYTNAAVREIEGRASHPNLHVSTIHDFLWGVIKHFQVELKEVLLALINDDEISGFKVLDGNGEPEKLDTIEGDVRYKEYVKFRDGVISHDEVIVLANEMFKRYDKLCRILKDCYPYIMVDEYQDTQAEVVDILLAQLTRVGDPNVIGFFGDAMQAIYDEGIGDLDAYKGEGVGQVREIKKEENRRNPKNVIDLANKLRNDGLFQVPSKDLNAPNMTNEGGVKDGHIQFLYSSNDDVNIVKEYLGWEFSESSGAKELNLTHNLIAAKAGFSELMRIYDGDKILEYVRRIKSYIKKKEPAFNSEGKTFGEVLAELKYKKTGKALKDVDPTDGMAIYIAEHQAIYDRALDFPYGELASLYVDKDQLIDDQKSDRSELGRGGGNRDDLIKHLFKIQKNVQLYLDGSFNEFLRVTEHAVTSKSDKVRLKERIVNLSKIDDKTVQQVIDEANVSGLVRVDDRLQSFMESKRYIYNQVAALPFSQFQKLFKYLEGFTPFSTQHKTKGREFPDVLVVLNNGRWNSYNFDYLFTDRMDKESVVNRTRKILYVCCTRAKSNLALFYHSPSDAVVEKAKDWFGHENVKDLD

SEQ ID NO: 63558 - protein, 808 aa, Phyllobacterium sp. YR531
MLEVSYRRAGGSRVHIEFLEIANFRKLLCTRVDLSSTTTLFVGANNSGKTSAMLALRRFLSPRRCPFEMHDFTLCHWPTIVALGESWIAARNAEEVVDLVVDPWISALPTLDLWLHVETGEMHHVRDLIPTLDWEGGRLGVRLRYEPKELALLYKEFMGAVSDAETMRAAAIAATAAENPEADPPAIPPKLTIWPENLVDFLSKRLSTHFTIRAYSLDPGQLVTPAKSLARPQVLSGGSRPIDGDPLGGLIRVHDIPAQRGFGEEQQAVEDDNAPAAATGSRLSDQLRSYYAKHLDPTKGPDPKDLGALQAIEAAQDAFDKRLTESFKAAFTEVEGMGYPGVTDPRPRVSTRLKAIDGLNHNAAISFEVDVIAGDGAMTPVLRLPEANNGLGYQNLISMIFRLMSFRDAWMRVGKASTGATVTTTEPLHLVLVEEPEAHLHAQVQQVFIKKAYAVLRAHDDLGENKKLRTQLVVSTHSSHVAHETSFSCLRYFRRLPAGMAANVPVSTVINLSEVFGPGSETERFVTRYLRAQHADLFFADAAILVEGPAERMLVPNFIRAHYDELNQCYITLLEIGGSHAHRLKPLIDHLGLLTLIITDLDTLDGTGGASVQPAKGAGQKTNNATLKTWVPKLDDVDELMRADGGTKTLYEDDDPLFAVRAAYQTPLGVTSPGFVGPEVAYPYTFEDALAFENLTLFSELDGTGLVRKFRDAIVDSGGAAAIGEKMYLALKNGKKAEFALDVMEVENFDTIVVPRYIAEGLEWLLAQLKKKQVEILPLVKEEPPPEEVEVNPPVAEDVGAEIEGVDA

SEQ ID NO: 63559 - protein, 635 aa, Phyllobacterium sp. YR531
MSAVDDKFDSEADETILACLNIEKPRSFFLYAGAGSGKTRSLVEAIRTVCKEQGRRLSLSGQKIGVITYTNAACDEIKQRLEFDPRVEVSTIHAFAWSLIAGYDGDIRGWLSTRLLADIAELEEAQAKGRANSKAASDRARSIESKRRRRENLAEITRFVYSPTGDNRTRDSLSHAEVIAMTADFLSAKPGLRRLLVTRFPILLIDESQDTSRRLMDALLSVEAGYHEAFCLGLFGDTMQRIYADGKERLAEAIPQAWARPRKRMNHRCPTRVITLINKIRRDEDGEEQEPRSDAGEGVVRLFVVSQAIADKSAAEATVAARMAELTGDPSWADGAEAVKTLALEHLMSARRFGFEQFFEPLYAVERIRTSFLQGTGAGIGLFTREILPLVAALRAGDRFAVAAVVRRTSPLLDRKALEAAGEKQVDILSKVKAACDGLLALVNKDEKPTARSVLRYVAETNLFTIPEVLVPFSAADAVVADGEIDADGDAGDQEEEVDVKSELGGWRLALEAPFDQIERYDRYVRGVSQFDTHQGVKGLEFPRVMVVVSDDEARGFMFAYDKLFETKAKSKTDLENEAAGKETTIDRTRRLFYVTCSRAEQSLAVVYYTADPTLARDAMIRQEWFEPGEIELIA

SEQ ID NO: 63560 - protein, 635 aa, Polaromonas sp. CF318
MNLTSIAIKDFRCIQSLRLPIRGNAVIIGENNAGKSAVLDAVKIALGRRWGKSGNTGFNEYDFRTTLPGADSKQEVIEVTLGFAEKVAHEWPENITGSLLDITQTDPKTALNAIEMRVRCKFAEVTKSVEPEWQFLNSVGDPYAGKGARNQNLSSFFDYVPCFSMGAMRDASVEFGGRSRFWGSLLKSIDIDKAKSDDLEGKFAALNTELLAADPKLESIKNTLRSISNVIAIGAAGNVDVRAVPINLWDIISRSELIVQGKAADPWLPIGRHGNGVQSLAVMFLFRAYIENMLEETYTADSTPILTLEEPEAHLHPQACRALWESVVTLPGQKIITTHSPYFVQNVPLKDLIILRRGAEGPKGYRIEQIFSTKLSNAAGLNAVVTKYPALLSYDEIQGVLTCQGVLEEATFRELLMCFVDPQNATENHAALRKLKDESINFVGDDEIGRLESWAKRIRGEIFFARKWILCEGQSEYAILGAIGEKLGVPLDAYGISVIDYQNNGSSGAFATLARAFGFEWAMICDGDQGGDDHIAQLLSKRFLPQQISDRVVQLPKGQDLEQYLIGSTFRPLMVAAIHELDGSVPDTDADLLAFAADHKEETAVRLARNIRLSGSDITIPPKFTELFKNLGEIA

SEQ ID NO: 63561 - protein, 640 aa, Polaromonas sp. CF318
MTEAEKRLGDLLASLTPVQRHAAGWGDGAFLLLAGPGSGKTRVLTARISKLLVESPQSRWRILALTFTNRAADEMRSRILEIIPDAEDRLFIGTFHSFACEVLRQSGSLIGLKTDFKIYSSMSDRLLMLNRALSVADVNPEIPREKILPMLDRLRDLLVSPDESERFFSSELQGIAISQAYKAYDDFLTTENAVDFPALIYKAHALFKVFPTVARKYSSNYKYLCLDEFQDANEGQYKLLRAFASTDYKNVFAVADDDQIIYQWNGASHQRLEQFQSDFDPERFQMPTNFRCPASVVQLANNLVTHNRLRAPGKSPLEVGRTDTAVAEEVRVLSFATDTDEAREIARDIASRHRAHLGSVALIARTKALLEKAREALHDEGIPAQIAQRRDSFASLPYAWLQGALNLANRRSDQRAFQVFAEASNKLLSLDIDLDSASAQASATHGDLLRSWATEAAQSTQLTLPGRAIVEAINSQLAERLDYRKFIRIIVSHFQEQKEVFEREYPLFDEDRRAWTELSKEIASSSGAGAGLDSFLQELEMRSKEPPLMNGVLPLLTIHGSKGNEFDHVYIVGLAEDILPSFQSKNKGNASPEMEEERRNCFVAITRCMKSLTLSYAGRYRGYAKSPSRFLTEMEVVSTS

SEQ ID NO: 63562 - protein, 654 aa, Marinobacter sp. BSs20148
MYISRIKIQNFRLLKDTTLNLKEDLSLLIGKNNTGKTSILVLLEHFFENKKFHYEDFSISLRKDINALTDDTDIDRLSIRLFLDIQYDEDDDLSTLSDFILDLDPEIKVAKILFECCIDKKSILKKISEVKTDDKLKFIQKNLSKYLITKIYAYNDNDYTGSEYIFKFRHKLIEKDLKNVNRLIGFEVIHARRNVASSEDRKKAPLSALTTSYFNSKHDSETPDENVSSINTLLSDMDEKLEAKYKPIFENFLKNAKDFLEIENLNVRSDIQSKALFDNSSVVTYGGVDDVLPEHLNGLGYMNILHLLLEVERRKDKFEKSGSSLNLLFIEEPEAHTHPQMQYVFAKNIKSILSDVKCLQTLITSHSPHIVSHSNFKDIRYLKAVDGVVEIKNFYSDLEKEYASEPKQFRFLEQYLNIQSAELFFANKVIFIEGTTEKMLLPLFIQQLDKKLILENAECLPLISQNISILEVGANAKAFGKFLNFLGVKTLIITDIDTTRKLGSSYSACSVNDGEYTSNYSLRHYLDSPSEYSDKDWPKWFKKLKESNLTCAFPDIRVSYQTEENGYHGRSFEDAFIHVNLTKLKDSIKESEDKIWGLKNTSKFNSESNIYELTKEVLDKKSDFAASLLFQSLSEGVVWNMPAYIEEGLKWIAK

SEQ ID NO: 63563 - protein, 684 aa, Marinobacter sp. BSs20148
MDSKVDPFGKIKDCISNNKNFVLQGGAGSGKTEFLKRTLEYLSTTYPSKKIACITHTNLAVDEIKSRVGEGYTISTIHSFLNDTIKYYKKNLHACIYDLFKLDSIERGSLGDYEDDEKEMKAGEHKKYKKIYEKYASSLYSVKGERAEKVTGKRDYDKDPEGYNSQLNGMITALNSEIKKKIDDKECDGVRYNDTRFNSFQDLTFGHDGLLDISSIVFSKYPTIAKILQDKFDCIFIDEYQDTNEKIVDIFLNKLPFQKRILIGFFGDSMQSIYSDGIGNVGHYVKGKVLEKIDKEDNYRCSQQVVDFINSLRDDSLEQKVALKRLEDGTYEALDKRQGTVEIYYSFAPEKPKGRLSPEENQEYKAAHIKAVDELVSRALNGDNSYRLLKLTNKSIASDAGFENLYEIFNARFTDNKEAIENNLSSLQLIELCELCIAFSPSEFSDLSPNYNLVISQLKKQKFEIRSIGDKARVKYMFDTILSSDLSLHEAIQKAIEIKLLKASEKYLGYLERRSSFLDGVLKDPDYIKFKGLYQDGKNTLARIRDDLPSLNQYEFDELDKKVKKEIFFHDLFSKKIPFQEVLNYYNYSNEFTQYITMHKTKGSGIENVLVVLDEYFWHNEYNFRSIYSDGFDATKKWKNQKLFYVACSRAIKNLKVVRLLSDADEEKDFTSMFQDPIYIALNS

SEQ ID NO: 63564 - protein, 663 aa, Ralstonia solanacearum PSI07
MVRASYKLNESDFHRGLGSWRGHWIVISVEFEDVSPDEAIQALFIHGTGVGLAGGVVARATYNLIFRPNKQIRMNLAALADFDIAGMRAILDQVTIDDYETLFTGRSVADFADPVVYRRIVGDFDNAVFSNEVEFPELGARIPGTLSVTKEVSFTFIQALRDVVSEFHSNRTNPLLTLLKSKSGQIDPAQFQPIVERAQQLNREIENLNDVRTVRSDIEETIYGAAGQTYSPSLLAIKSDLPDEADLLFQSLKLFVGEFDGDHEGSIQELSLGGANLIFLTLKLLEFKYQHDRQAIANFLLIEEPEAHLHTHVQKTLFDRIGYTGAQIIYSTHSTHISEVSNIESVNILGRNRVTCEAFQPSAGLATDQLGNVQRYLDAVRSNLLFAKSVLLVEGDAEEILIPLMVKQLLGVSLDELGISLVNIGSTGFDNVSVLFHEARIRRRCSIITDLDAAFMNPHPVPGDDPETLQLKSKLLRAQTSGAARKVVLDAQAAGTAWLRPFYAANTFEVDFVACGNAEKVVASVNEVYTQPATRAQSVAELNSGDPAQFGRRVLTMANYEGKGWFAILLGKQIDHRIVIPPYIRRAIIFAHGMFSTELIFSILKHRVTMNNPGGAATPPALRHYWERLLDYRAGLIDFNTVRAEAAIGLPDDPILAFLGDLA

SEQ ID NO: 63565 - protein, 600 aa, Ralstonia solanacearum PSI07
MTFAWTRTELNDEQSQVVREENSVFLVACPGSGKTRTLTYKIAYELSRLQSKRQFIVALTYTNRAADEIHERIEELGVDTSQLWTGTIHSFCLEWILKPYAIYEPALARGFRIMDSHEQEKLLEELCRAQRGITYWDCEYYFTDQGYVLGCTDQNKHERLHAVFAQYFRYLADNRQIDFEQILFYASRLIQGQPQIAKVLASIFSWILIDEYQDTKRIQYSIVAAITRAGAERTKLFVVGDPNQAIFGSLGGFAMPLAEFRQLSGIRLEERALTENYRSTDRLIRYFSNFTVQATGIRGAASDRAFPSNVSYNITVERDQLETELVRLIRLSTAQGFAAEQICILAPWWILLAGVTRRLAGALPEYQFDGPGMVPFSRDQENFWYRLSRIALTEASPTQYVRRLRWAAEVIRDLGNEGINTPGLSAKWLLRESNSIQLNQPDGLLYLREFFASLMERLGIDWQSHPLLLEHHQAFFDSSAAKIDRLRREGAEFIDGIDFFRKVFQHRSGITVNTIHGVKGAEFDVVIAFGLLQGMVPHFSEEAGADRGTDSAKKLLYVVGSRARKHLHLISERQRMRGGGRGPYAATNALAACVFDYDVV

SEQ ID NO: 63566 - protein, 599 aa, Ralstonia solanacearum PSI07
MKLSRIHISNFRNFHEADVELDGNVVIVGENRVGKSNLLYAMRLIFDPSLPDSARQLGQGDFWDGLGESIEDKTITVFVELQEFEDDLDLLAQLTDFRLDDDPHTVRLTYEFRPIPGLGRFPQSDDDYEFLCYGGEAETKRFGHEVRRRIAMDLLPALRDAEGDLSTWRRSPLRPLLERAFASVPVEDLEGVRGAVQAATEQLGDFPSVRGLEQALRGLFASMSGPKQDIEPSLGFGTTDLTRLFRNLRLLIDGGLRTIGEASLGSANVAFLSLKALELRQLMSENRRDHTLLAIEEPEAHLHPHLQRSVYRHLFEGLADEEGDQPLSLLLTTHSPHIASVAPLRSLVLLRDTEDDGSVATSAASIAFTDDEEEDLERYLDVTRAEMLFARGIILVEGDAEKFLLPVFAAAMGHDLDHLGITVCSVAGTNFTPYAKLLTALDIPFSIVTDWDPRPKGIALGFNRSWKLVETMERVRTGEVPGELIQELKDLGDSDDFCERCEQHGVFLNMYTLEVDLFNDADFTMSIIETLRETRWSEERKGWIDGWEADPKKLDVDNYLKLIEVVGKGRFAQRLASRVDGVAPPAYIAGAITYVVERV

SEQ ID NO: 63567 - protein, 545 aa, Ralstonia solanacearum PSI07
MLAEDVHEPRGVACITYNNECARELEDRLAALGVEPSVRVFVGTVHSFSLTQIILPYAKVAGLGLPEDFGVATRADRQAALTEALAHTVDEPGNFQDWDFRLGNYRRSILNRDSSEWRETDPELAGLVEAYETGLRQRGLIDFDDMPLLAVRALRANPWLQRALLAKYQVLVVDEYQDLGVALHRMVMGLCFSTGMRLFAVGDVDQSIYGFNGARPDLLRRLSEREDVETVRLRLNYRSGNRIVTASRVALGEERDYEAADATAQGMVFIHPMGGTYEQQAARLIGELLPQAIARNPGLGYRDVAVLYPAAWLGDAVASAAQAAGIPYVRTDVNALYSRSSRLLQWLEMCSQWCCGGWRMGRPRFTRIVKEGRRLFAAALHSDERITDFHRRLVAALWDSRDASLNLHRWLEGLRVQVIEPFAAECITLHDEMEMLASFSVRIAQGGDHADMALGELAGDGEFLDRLTLSTLHSAKGREFGVVFMFAMDSGRLPRNGVGRGQIAEARRLFYVGFTRAKAEVHLIHTARRSSPFVDEIAQHLTDER

SEQ ID NO: 63568 - protein, 688 aa, Sphingobium sp. SYK-6; identical to SEQ ID NO: 63456

SEQ ID NO: 63569 - protein, 590 aa, Sphingobium sp. SYK-6
MADEETAADAAGRLALERVYACFDAGQSFRLEAGAGAGKTYSLEKALRRLIELRGTELVRKRQQIGCITFTNVAKDEIIARVQAHPAVRPETIHGFCWSVLQDFQPQLRAIVPDLPGWGERLADAGVGGLGARKVNYDLGYPRVTPDEVSLKHEDVLTLMTELLARPKFRLVLAKRYPVLLIDEYQDTDAGFVEALKQHFLGTGTGPIIGLFGDHWQKIYGEGCGAVEHAALEVIDKNANFRSAEPIVAVLNRMRPDLEQIPSDPDAPGEARIFHTNAWPGQRRTGQGGGHWTGDTSPEAARAYLDHLKQRLSDEGWDFAVERTKILMLSHSVLAKEQGYPTIQSIYGQFNDAWLKKEDPHIKFLADQLEPACAAFQAKRYGEMFESLGAGRPCIRRHHDKVAWTQSLEQLIQLRATGTIGAVIDLIKGQAHMHLPEAVLDREQRLADAGPEPVEGESRRIAQLRRLRDVAYTELMAVDAFIDGHTPFATKHGVKGAEFENVLVIVGRGWNKYNFAQMLERLDPGPPADKVESFESNRNLFYVACSRPKRRLALLFTQILSELAMAKVTALFGEANVIPLPADPAGGAAP

SEQ ID NO: 63570 - protein, 708 aa, Pantoea ananatis LMG 5342
MYLKSIEINNFRKFGSKDNLIGFVKANSGDNKKSPVASSTTLIVGKNNAGKTTITKALEFIVDDGDKLVGSYFNFDYLNDLLNKYIEDDYSKTPELSFILDVILDNGDEDLTTNFGNFITIKDSKENKEIQSAKVKIVYEVKDKDLFKDNLKEGLDFLVLKKRDRVYKFKFLVDLISETQFRRVVKGLNGTVERNIRLKDIIDLKVISASNNIHDKRLLAKSFNKIIRYMYEVNGKSLRSINSLVEKNNISLTTQIRKTHQKGIESVLEKIISENALAFSLRADLTFEKLMTDLVTYEYIDGDHLVPEGQFGLGYTNLINILSEIIDFSYKCKYMKKQSKVQVLCIEEPELFMHPQMQVNFIRHIEEALSAILNFSKRDVAKLKSQIVITTHSSHILNSVIQESCSLDEINYTYPENGQSKNIIIKDSDISKGESDRDYFQFIKKHIKHQVPELFFSDAIILVEGITEERVINFFIERDVQLRRKKISVFRIDGAHGSVYIKLLSTLKIPSLIITDIDFKRSKKSLFKEVETKDSGKIKIPLYPQIEVIDETTLTTNKTLTSIHGSSNVNKFGNFFLQNNVRVSYQIEPIEFYSEGTLVNKFFATSFEEALILENFENLIFKGVLTEVIPSVMDELLVGENPDLSIIFKNSFMLQKSLSESKSKFCNSIIFSLVNSVDNLDSHIKLPKYIKDGIEWLSQYKFSDEVEL

SEQ ID NO: 63571 - protein, 685 aa, Pantoea ananatis LMG 5342
MIFEECQDIILEEKNVFNDLLQHVREKKSFYFLSGAGSGKTHALINLIKCLKGDEGENLSASGQRILCITYTNNARDEIVRRLGESELIYVSTIHQFLWDMIEHHMNALLEIHASHLNYLIDMLDSKLSCPDNYKPAYKAYRGLCESEIQEVKGFILQEDEKYYRLIDLDAKSFWIKLKEIIGDELGSKLDTNKSDIVDIFSYLRKINNYKSCLKKIHEGCEGFDTIKYSIKNSECLYKNRIGHDTLLLYAYKLMSGYPYFANIVIDKFPYIFIDEYQDTHDNVVAFFQLTLERLESSNSQCLIGLFGDPSQEIYNLGARTSVLTFNEIYKNINRRSHDQIIDCINNIRGRHQPIRQVSIFRNKNIGSVKCYIYPISKCNKENIEEIISSYQNRWSVSLSNQMACLVSKNEMLAEICNFSDLYSKVRDLFIAENKINYNKVNNEFIVNSIDKFGSFASILYEYCNPPYMLKLKSDAPIIELFPKLYLQECTVKDVGIAVSKLNALSYTTLGEYFYKLNWLFKTTRNKRVKSLIESLFPVKFDSDEAWKEQIVKDCGLRKVKFDDAVFQKLLEVDFDEVTHWMNYINSNKIDSPVNVMTCHSSKGLEFENVIVFLNDKMKKKQTYFSSLINSDLNVELSPDLEEVRRLLYVSTSRAVKNLRVVLFSDNKIEKDNIQKIFNDCVFNS

SEQ ID NO: 63572 - protein, 565 aa, Blastococcus saxobsidens DD2
MRLSRITVKNFRNLVDVDVPLSRHTVIVGENRSGKSNLLHAMRLVLDNTLSGDQRRLRPEDFWDGLTAASGDPTSTGEKIEVSLEVTDFDDEAPVVAALSDALVTGDPLTARLTYRWEPDPLIDDDVVYRARFYGGGDDDRPISSSDVRERLITVFMHALRDVESDVRSWRRSPLRALLEGASRDAAPADLDAVRDAMEDANASLNRLGPLVTLSKSISDSTRAAVGSNQGLETALAAAPPDPRRLIRAMQLFVDGDAQRQLTSTSLGALNVLYFSLLELRLKQRLESAEVAHVLLAIEEPEAHLHPHLQRLLFKHLQQDDASRSTVVTTHSPHIASATSARNLVMLRTTDSGTVARAAADAALTEVEWDDIDRYLDATRSELVFARRVLLVEGVAEQLMVPSLTQTVDIDLDQLGISVCAIGGTHFGAYVKLCMALGIPWAVLTDGDPTNRVTGARRKQLLEQNAGADPDAVFVGATTFEHDIIAKSDSNRSAIVEVLTELLGDDLEEHSDTLEGWRDDTPDVKDFLAVISTVGGKGRFAQRLASTRLDPPAHLAEALEYLLEQ

SEQ ID NO: 63573 - protein, 585 aa, Blastococcus saxobsidens DD2
MTSLRQAISELQTNPEQWEAFQHDGHCVVLAPPGSGKTKLLTTKAVWLANNAIAPGRGLACITLTNPAAAELRTRVRRLGQPVGRTVNIGTVHSFAWSNVIRPFANAAGFPEWSRYTLAPRQEANAAMREAIRRVFEPNEDTRYVNSTIMRNRKLCLTEQEWKTAGPNIREAALEYDRLLREKDYVDFDTVVAMAVHLVEEYPFVRTVLHARFPYLMVDEYQDLAPGLHRIVTSLSLDEGNSTLFAVGDPDQAIYGWTGTRPELLVELADLEAVHRVDLRINYRCGAVIAEAGRRILGAHGAEAVTMRGGGSVSARCEPAGLTAQAAYIAGRIFELQSEGVSLHEIAVLAPTNGDCDELVAVLRSRDIPVSWRADAYSPSPLTMTLEAFAAWVSHGREDSGYRLGDLLDQWQQLGDWSALRAGADRVVAALLAAAADTRAGEFVETIVTVLDSAGARAELRSDDANELERMRDALSPAGGMADYTVRDLGGLRLRGGRVEVLTMSSSKGLEFDHVFIAALEEGKLPFFASVRGSAEWTEDRRKFYVSFTRARDSVEVLYSGWYDTPRGRRHNGPSVFLRESGLVG

SEQ ID NO: 63574 - protein, 605 aa, Rubrivivax gelatinosus IL144
MKIVQIKVANFRGIAEGTVHFDGHSVLVGDNNAGKSTLLEAIDLVLGPERLSRRPVVDEHDFYAGQYLTADGQAIPLSVEVIVADLNDEQLRHFREHIEWWDTNAKVLLAGPPVEGTDAAGVGPALRVFFRGAYDAEEDDFLGNTFFALPAPIGAGEYPTFRASDKRKCGFLYLRTVRTGSRALSLERGSLLDVILRLQESRLKMWEELLVSLRTLPVAEKPELGVTTLLAAVQASIKKFVPSDWAEDPHMRVSDLTRETLRRTLTVFMGTGVKRPDGSSYAAPYQHQGTGTINTLVLALLSIIAELKQNVIFAMEEPETALPPHTQKRIVNSVREKSAQALFTSHSPFVLEEFEPAQIKVLKRVSGVLTSVPASLPPTIKPKTYKAEFRARFCEALLAKYVLIVEGRTEYDALPTAARRLSQTDPQYFKSLEALGVAIIDAKSDSQVAPLGNFFRGLGKTVFAVFDKQDETQLALIRAAVDYPYESHMKGFESLVLQGTSENAIRRYALGVVADGDWPQHLIPVTPRADSDSASIANALSQYFAWGKGSGQAADLLASCAGWQEMPEYISSCLHGVFRVVEPLPPAPPPSPAPPPAPPAEAAAA

SEQ ID NO: 63575 - protein, 569 aa, Rubrivivax gelatinosus IL144
MVWSPQKLAFLGCPGHALALAGPGAGKTHVALVKAQQQVAHGALNPGQKVLFLSFARPTVARILEKAAELISPEKLKRLEINTYHGFAWSILRSHGYLLNTARSITLLPPPEAAAHFADVDASVREQEMLRLFEQEGRLHFDLFARLVAQLFQRSARLAGIYCDAYPMVILDEFQDTNADEWAMIRQLGRHSRLIALGDPDQRIYEFRGADPRRLGEFVEAFQPGSFDFSGENHRSNGTDIAAFGNDLLTDRNRGRRYTHVKIVRYGFRRNQSPHFRAKAEVLAALRRLRDQPNTSVSVLVPSKAFMLQFSQYLSSDLDGLPALRHDVAMDAESPSLAANVIAVLLEGGDIAALASRLVATLHTHIRGRGGNKAPAQVEMDLAGAIGAYMSTGKIRGKNRKLVVMECQRIAAERADLCLSGNPEEDWSAVRALIAASAAPQVARVAEDARFLRLLHRGSALRTALSEMWRTQGDYLGAEEALRDALLQEHFVVAQKEWRGLHLMTIHKAKGKEFDEVVIYEGTYSGRIVAANADARRIAQSRLALRVAVTRAIRRTTIVTPQRDGCQFL

SEQ ID NO: 63576 - protein, 570 aa, Arcobacter butzleri ED-1
MLIEKVIVKGFRNFEEATVNFNNNSLIIGANDVGKTNFIYCLRVLLDKSLSERDIEPQETDFHIKNDGTQSEQFSIEIHFNKITEDAVLSILKGSVSDDNKTIFKFCATKSDLEYKFYVGSSINELEEVTSRFYLKYINLKYVKSRRDLQKFIEIEKKDLLKFSKKDCTTEESIQDNKQTNRISKRLHLINKRIADLNYIKASTQSVNTELEKLSYNFDGYTVHLDTGAIEVKQFIDKLQLVASNSGSKMLLGGDGRNNQILIALWKAKSEREFDSNHEVVFYCVEEPEAHLHPHQQRKLADYLNSELNGQTIITSHSPQITARYSPSSIIHLLNKNGRSYAAKNGCSNCINDSWDNLGYRMSILPAEAFFAKCVFLVEGPSEMLFYTVLAEKLSIDLDFYNISILAVDGIAFKVYTTILDAMEIDWVMRTDNDVSKVQNKELKNLAGINRCLDLANMQKLEHRDISTSQDSVILDGTWKRVSAQVNPKGIFLSKKDLENDLSLELPDSLKSFSNKTNLEDAVEYLQKEKAIRMRKFLASYSNNLISINNGELVKPLFKCKEIVESSRNA

SEQ ID NO: 63577 - protein, 552 aa, Arcobacter butzleri ED-1
MPRDYELTEEQLNAINSNENMVITACPGSGKTTVIVEKIRKELNELPSYQGVIGITFTQKSAKELKERCKKDSFDIKSTFLGTIDHFCLQEIIYPFISRLYGIRDSILECKSYRDIDHIFKVGLPDLNENEVVLRTSDYSALEEIFINHYNNGFILLEAVGIIANNLIGNSSSCKRYLKARYKTLYIDEYQDSSEVQHKLFLNIYELGLKAVAVGDINQSIYAWRGSNPQYIQELISKSDVFEHHIVNINHRCHISISNYANRLLDENCKIIDCDDLRVYQFQMIGTQVNVANELNTFIPQIMDVHRIENYSNVAILVKNNKSLEYLKENITLPYKVYDDDILLLINTSISKLLYELLVYRLNENILINDVLESLIGYDFSNKSTLKKDREKIREIRICLDVSLKTKLISLVSQLLNETPTDREIEILDEILASEELLNKYNFQEDNELQIMTLHKSKGLEFEIVIHLDLYEFILPFQQIIDDDWNNPIYPNLEQDLNLHYVGITRAKSACYLIYSNRRLNRSNQNRQGKPSYFLYKNGLNGLFNNLNLLQG

SEQ ID NO: 63578 - protein, 690 aa, Escherichia coli LF82; identical to SEQ ID NO: 62940

SEQ ID NO: 63579 - protein, 577 aa, Escherichia coli LF82; identical to SEQ ID NO: 62941

SEQ ID NO: 63580 - protein, 621 aa, Halobacillus halophilus DSM 2266
MISSLVRLFGQKNSERTLIKSDFHIPHNISPDDIEEINLFIEVRIEFPELVAEDESKTDSVPPFFRQMIVDRPGGIPYMRIRLEGKWIQGLTPEGDIEQDIYYITVPEGQPEEEAQQPIPVHQRNAIQLIYVPAMRDPMTQLKNASGTILWRILRNIEWPDTINEEIKEKMGPVMELFSEIPDVKSVKETLNKEWNSYHKDPRYSHTDLMFSSTDLTSILKKVEVHFSPNEDGNSSTIDRMGDGLRSLFYLTLVSSLLEIEQNMESDVKPALNILAVEEPENHVSPHLLGRVVSNLSNISNKENSQVVISSHSASIIKKIDPEQIRHMQIENHNSIVKGITLPDKQSESFTYIKEAVKAYPDLYFSKLVVLGEGDSEEIVMPKLLSAYDIYPDETSISIVPLGGRHVNHLWKLLNQLSIPHITLLDLDRERYGGGWGRIKYALKQLIENGHDPERLLSVIRNGDPYTYTVEQLEEFHERSNEEVENMECWISILESKNVFFSNPLDLDFSMLKSFEQQYKSTMTYGPRIPDETTDEYTEKKESSIQATLKSEKAKGVTYTEEEKKLMIWYNSLFLGRGKPSTHIAALSNLGKDEYLEKAPSELKSLAERVNELLVENRGSI

SEQ ID NO: 63581 - protein, 636 aa, Halobacillus halophilus DSM 2266
MSFIVPENWKPANNMVLEEAAYQSVKHEGNLSVAAGPGAGKTELLAQKAGFLLETGICKPPHKILAISFKVDAAKNLEDRVINRYGKSLAKRFESRTFDSFAKSLVDQFLFSLPTDYRPSSDYDLILRPQDLTNIIKENLTESNPYFPNWYYEFTPSVFQKKLVEELPKEVQEDDLYSWLVHRSWDLLIKGKSNLNSSLTFPMISLLADCLLNNNPMLIRAIRATYTHVFLDEFQDTTKLQYTLLKTLFEGSRNYITAVGDEKQRIMGWAGALPDAFGTFKTDFTSKEKRLVKNFRSAPKLVQIQNVLSQNLSPNNVNVEVSGEWDSMDGFCEIWNYENHIKEATSVARAINNWINIDNLEPRDFCIIVKQQEHIYCKQLMLSLEELNISSRLEKEFQDLLSEECVELMINFLKLSLPGSKPKVWLDTIDFISTVRGGEEKSNYDALYNLEQRTSEFVDRLSGELERIKIQNNLEEDIHSLLQNIISFVGSNRLKAYFPKYRKSRYLDEIVKDTANKLWQSLSKQRDWELAIRDFLGDFSVPIMTIHKSKGLEYNTVIFLGLEDGAFWSFGSQTESDKKAFFVALSRAKERVIFTFSKAREVLHYRELKYLPQGHQNISQLYDLLSEAGVPTVNFD

SEQ ID NO: 63582 - protein, 634 aa, Pseudomonas aeruginosa NCGM2.S1
MKLQTIRLSNFQSFGVQPTELGLDDITYLIGPNGSGKTAALQALCRLFAFDPSLRRILRSDFHVPFDEEIVPEERQLWIEADFLFPELAEDEDNSTVAPHFGHMRLDEADGIPRVRFRLSATMGPDGDIEETLVYVLDINADGSPLNTAQVPRSERNHIHVHYLPARRDPADHIAYGANALLGRMLRAVNWDAERDVIKGLTDQISDSLAANPSVDAFSTSLKAAWDTLHKGSFFTDPKITFVASEVEALLRHMSVSFSPGHDEQLVDFSRLSDGQKSMLYLSLVLSSQAIGRAVLAEEDKSFDVDKLRPPVFTLVAVEEPENSLSPHYLGRIVNSLNLMTGNGDAQALIATHAPSMLRRVAPERIRYLRLTEGRTSRVTHIQLPDTADEAHKFVREAVQAFPEVYFSRLVVLGEGDSEEIVLPRLLQAKGAPVDESAVSIAPLGGRHVNHFWRLLSALKIPYLTLLDLDVARHQAGWGRIKYVNDQLGKYRLDQQLPKDYGIPKWDSTENMVRDFDNYLEALEDRDVYFSYPMDLDFAMLLAYPDAYGVVREKPDESTIKAVLGKSHHDASQYSEDEQKLFGTYHRSFKLGSKPAAHIDALAKLSDEGLLANMPESLGRLADAVIAKLAELPE

SEQ ID NO: 63583 - protein, 558 aa, Pseudomonas aeruginosa NCGM2.S1; identical to SEQ ID NO: 62801

SEQ ID NO: 63584 - protein, 682 aa, Gluconobacter frateurii NBRC 101659
MHIEQIKIENFRLLQECCIDMREKTTLLVGKNNTGKTSFAVLLEKFLERPDTFSFTDFPLSLREAIFKINAETNIEELAIRMVLRISYTEADDLGILSEFMLDLDPERRHTSILLECTIDKKKLLRVLPADEKERKKFIENNLSGKFLDVKVYAFDDYGHVGEQAYYMSHRNQLEEKERTSLRALLNFQVIHARRNVASSEDAGRGSKPLSAISTKFFRKRDIEADADELSEEDASADKPGAGSIEKLRSILADIDTRLGEQYAEVFGSFLKNSRDFLDLGDLKVVSNIQSQSLIESSSQVIYGDTDNFLPEHYSGLGYLNILYLLLQIELCRDDFSRRNAPLNLLLIEEPEAHTHPQMQYVFADKIHGLVSAIPSLQALVTTHSSHIVSKSDFEDIRYLSRLSATGPVSIKNFHTDLSKEYDKLGADGKALFKFLKQYLTINSAELFFANKAIFIEGTTERILLPLFIERHDKENDEAAETGGLSSQNISVLEVGANARAFAPFLKFIGVRTLIITDIDTTKPIPNEKTGKPSYQAHKVEGSTHTSNETLKHFLSAPAIDNVEDYQKWHKRLLSGEVASNDGQIKLAYQMEENDYHARSFEDAFIAKNFEKIKNKKDDLEGLKNVQDIESFDGSDYYALTERILSKKSDFAGSLLYVALVEGETWETPEYIMDGLKWIHRN

SEQ ID NO: 63585 - protein, 694 aa, Gluconobacter frateurii NBRC 101659
MDSQKLNPVDRIAKLVLDGENFILQGGAGSGKTESLKRVVQKVLSVDQKLKIACITHTNKAADEMAERISADIKVSTIHSFLGGIISPYKRNIQYVFPTLFELSFFIGLGDEHYGGDEKLRKSEEHGRYKKAYEKLEIRRQTVLGELTPKVTGKRDYDKAPEACIAQMNQLIGELNQEIRAKLSSRKADEFFYNETKFDNFNEPSFGHDGLIAIACKMFDEFPVLGKIVSDRYDCIFIDEYQDTNADVIRVLLRCLPKPSRTIIGLFGDSEQAIYSDGIGNAREHIDAKEVVLVEKDDNYRCSQQVITFANQFRTDGLKQEVALKTLDDGTIETPESREGGVTLLYDFAPDKVDTGDRLQDRKTNSALVREALDDLVGRVSQDFPGYVQLKLTNKSIANDVGFGQLYQIFDDRYSEPRDRMRKTLDRLQFDEIVSLTRLHQSLPGDRRSYNRLITALRKRGFSISSVSDKTKLDEMLRAFTARDLSVHKALEFAAKVGLIRISESHAAFLMLRDKLLVRLKGDPVFEAFEALHSSGYRTKPQMLKEINTTPKENLDSDLIETEYDDRVNELKQKTFFTALFSDELRFDEVLSFYDYEENDGGFATMHKTKGTGIENVLLVIDEYGWTTEYDFVNCFMDEAPSTKRDIASRKLLYVAASRTKKNLVCVRLMNDQAEMDRISPYFPDAIQVKSGLS

SEQ ID NO: 63586 - protein, 625 aa, Burkholderia multivorans CF2
MKLARLRLCNFRSFGSDFAEIELDDMTFLLGPNGTGKTVVLQALACMFSLDPSQRKVSRSDFHIPVDEAPENAPDERKLWIEADFEFPELDEDDAGEHELPAVPGNFAHMQLLAEDGPVQVRFRLEATIDQDGDIEESFTYVTKVGEDGSPLEESRVSKQDRNAIQVHYLPARRDPADHISYSANALLGRALRSADWSTEREQISVLTGQISESLTGNAAIGGIAQALTSQWSDLHKGAYYASPSVSFARNEIENLLRHLTVRFSPGHGESIVDFSRLSDGQQSLLYVSLVLAMHSIGSKVLSGELGTAFDIDKLRPAVFTLIAIEEPENSLSPHYLGRVVRALTAFAGDQNAQALVATHSPALLRRVPPESVRYLRLDENRKTIVKRIELPEDESAQKFVREGVQAFPELYFSRLVVLGEGDSEEIVLPRLLAARGILVDDASVSVVPLGGRHVNHFWRLLHGLGIPHVTLLDLDLARYQGGWGRIRYAANQLLKYADVSGNDLTQEEIDGIPKWNDDQGILIDDDGWIERLENFGVFFSAPLDLDFLMMTTYPDAYLIEAGDLEKPDEETIKSVLGKKHDVLGGQYSEEEQSYFDAYHAKFKLGSKPTWHIRAMSSMDDQGKR

SEQ ID NO: 63587 - protein, 553 aa, Burkholderia multivorans CF2
MIRVDRWSPSDGLSLEPNALTAAKEIGRSLALTAGPGAGKTEMLAQRADFLLRTATCRYPKRILAISFKVDASQNLKARVRKRCGPELAARLDSHTFHAFAKRIIDRFRPVLTGRDALDSDYSIGPVRVQRRAITFGDMVPLAVTIVESSQVARNAIRQTYSHVFLDEFQDCTEVQYRLIKACFHGTQAKLTAVGDTKQRIMGWAGALEGIFHTYAHDFAARPLNLYQNFRSKPRLRRMQNAMVRVMDPPAALNDEDIAGEEGEIEILRFDDDDREAIYLADTCRDWIDEEGIAPSEIAVLVSKQQNLYCQKLRTALEARGVPFREEDSTQDLASDPVACLIIDFLLVASGSRQPAPYGRLLDLVVFNHGFDEEREYQARSRWDRFVADVSQRIADGRTNLAEEDQLAGIVDELIRVVGRDAVVALSPDYAHGDRLQQQIEAAISRAHHLLRDSDNVATALASFSGDRAVRIMSIHKSKGLEFDTVVVLGVERETFWGDEVAERSAYFVGISRAKRRLFLTVCERRECPDGARNWRTGRTEHDEFVGYAEPYL

SEQ ID NO: 63588 - protein, 556 aa, Acinetobacter baumannii Canada BC-5; identical to SEQ ID NO: 62630

SEQ ID NO: 63589 - protein, 593 aa, Acinetobacter baumannii Canada BC-5; identical to SEQ ID NO: 62631

SEQ ID NO: 63590 - protein, 769 aa, Stenotrophomonas maltophilia Ab55555
MPDAGPVIPVSGGITLRFLELCQFRRLGKVQLDVNKKTTILVGANNSGKTSVLTALRHFLAESSSFGSFDISLSQWPTLRALGKVWEALPEDPLTVPGDEEQWKQQLQALLSTMPTLDLWFDAEAGMYHYVAPFLSKFSWKGGAVGIRLRLEPASTVEELKQLAWIYRTARGPVKEMGADSLAWPIDLLDFWLREPSKLGQVRAYKLDAENNPITGFKTYASQALAENASRIDRKHLSKVIRVDFVAAQRGLGSEEAESRSASGPHRVGMFSNQLLKFARQHLNVASTGHGHRADLVKAVAEAQRDLDKKIHEAIADSVEEVKQLGYPGLHDPQEIRFRTRIQTADLLDHGTAVQYSMQKESLEELLPEHSIGLGYQNLQSLSYQLVSFKAARLKPDKGSPAPVHLVMIEEPEAHLHVQVQRIFPDKAHKLISPTGADASALKSQLLISTHSSHLAHAEDFDRLRYVRRVAKSAASPMPTTEVVNLGQVFGDDKKTRQFAERYFRVQHTDLLFANAAIFVEGVAERMLIPLFMERDFKELNSRYVSFLDIGGSHAHRLKPLVEKLRIPTVIITDVDPCEEQDGKPKKNGEPTKRLVAVANTGQAGLHCGNPTLRGWHPRLQMLDDLKNPTDAQLVWGEAAAGLVRFAWQLPVAEANGSWPSSFEDSLVLTNMPWFKALMEGKADDDGVEIEPPTGALGSVARAAAEAGSVAEMVKALHTVMHGSLRKGEFAASIFERLSSDEPVVCPKYIADALAWLQAQLEPSKEPMT

SEQ ID NO: 63591 - protein, 657 aa, Stenotrophomonas maltophilia Ab55555
MSALAVPGNNERDDGVVDEICGYLTEEPPRSYFLFAGAGSGKTRTLVEVLRRMTGVVEHEKGGRLARRLKIYGRSIRVVTYTKNAVAVIKGRLGDNDLVDVSTIHAFCWELISGFNDDIREALVAIKQAQLEKETAEAVAKPRGITAAKQRDLDEIKADIEAFRLTDVFIYNPDRETHGAGALAHKHVLDATAWLLQHKSTLQTILKDRHPIILIDESQDTMKGILDALMSFAEPRGFGLTLGLLGDHRQRIYTDGHSDLPSLVPVSWATPELKMNHRSQRRIVTLINRIWEAEIDGRTQPANGVEQHPRTEKAGGVVRLFVGDTSLSPEEKVASERWCADQMRQASGSDAWSQGHYQLLALEHKLVATRGGFLDAYSAMVLIDPNSAAPTGSGENKGPTAVQVLLNELAQLEACVGPDGAIDELMATEVLRCFGRLDNMPEQAAERARRSDEMLRAISAFATACQNPGATVEQVLTPILGANLFEVDHRLLDAFSDKSPAPPAPARGEEESKKDRIRRGWCALFDSPWSQLQKYRTYLAGNSVLATHQVVKGSEFAHVMVVMDDKLAGGNQISYDKIFGGVQLSKSDWDNVGKGKETTIDRTLRLLYVTCSRAKESLALVLWSSAPSVALNRVTASDWFSEGEFLAIPWPITKSHS

SEQ ID NO: 63592 - protein, 746 aa, Streptococcus agalactiae LMG 14838
MYLKSLSIKNYRKYGEEVQTINFAHSKWSEMSGAEDESEKINRTEEYISKSSSLIVGKNNSGKSTIVKLLNTLQNTKSGSRNIFKYTDFNLKMLSDWYRFNIDNKSKEDIESIDKSDFPKLEFQLILGIDDENDLISSFEDILILGGIETVGTHENQEVAEVTIDVKYEVADVQSFLEELVKIKSSPREKIEQYDQGYQKELRYRKFLSLFSSNYFVLNFYPIRRDEPAKEFSLSSLLKVATIEANTVKNDKTFSQAYNKIVSTYIKNNDIVEIDSLVGDINYQVKDMVDTNIKDILQSAVSSIESTKNLKMNLHPDVTLEKIFANSIIYEYQEGNNNIPESQFGMGYTNLMVIIAKIVDYIELYSEKDINGSVNILCIEEPESFMHPQMQELFIKNISKAIATLLGKKQQLDTFQIIITTHSTHILNSKIQSGNTLNNISYLGQVGVNNIIKNVSDDKIASGRDIDKKAYEYIKKYLRLEITDIFFADAVVLVEGVSEETYLRYEIDRHSILKNHHVKVYRIDGAYAHQFISLLDLLGVRTVIFTDLDLKRSESEKKVDIKDNAEPDVIPSNIPDLEEKYGGVASSLTTNGTIQYFVKKLLNDDKAKYDKINSKIIEILTDKEELVVEYNNISMYSQGKINKYYATSFEEAIVLTNAGNEDENKYKKSLIKALQYVHPNMRYFGDIDETSEIADKSYMYQVKLSDGKSKFSTGIVYLSITDKEFSLKRPQYVESGLNLLCGYFEE

SEQ ID NO: 63593 - protein, 672 aa, Streptococcus agalactiae LMG 14838
MTYTISTENKQLELDIQKDINECLDNFESFCFDAGAGAGKTYALQKSIEHILKTEGENLKLRNQKILCITYTNAAKDEILSRIGKNSAILASTIHEFLWGFISIQQELLTIEHEKKIKEELNGIEQKIIDNPLFGSVNLVDFHNAISDEEFLKVFYSTPISPAGDFKSMIKGYSEYFSPYLSNVNKFSSLVKNVDKKYKLEETLKEIKNKKSKKIIYNPIRNRDKLENYVISHDTLLLYCRNIITSQNLLKRLFSDRYPYVLVDEYQDTDEKVVDIIDSIRKFTICKKNFVVGFFGDTLQNIYSSGVGKLPNKEEYKSITKIFNRRSSNQIVELIEKIRNDNFGQQSIYTDFDNGSYNFYIADDDFDLDIFLQEKNLVSNTACLLMKNDDIARVRGFDVLLAIIKKFPRFGGNNFDNVNNEFLQKNLQHMGWFLREILTFIDFIQKSSDYNSTVKEIVQFIGPSKSTITFGEMKQFISSLRGINLSTLTIDECINKIANIQERISGEDILRKIFSIDDITENILLNIKNRAYDYFYYLQDSEEYSEREMIVIDNFFRLDVTQFIKWYKYIFDDLKNEEISYYTLHGSKGLEFDNVVVVLQDNFAGKRNYCKYFFENYNNLTDSDLQFQEVRNLLYVACSRAKIKLCVIYISDTLEDALKNIESIFGEIQYLA

SEQ ID NO: 63594 - protein, 689 aa, Streptococcus agalactiae LMG 14838
MKLTKVIINNFRSFGESQIIELNNQTVLIGNNSSGKTTVLQALSKLFSDKQNDRIIRKSDFHLPKGLRPGENSRTLFIETIFEFDELDGTAYSPAIPSFFEHFTVSQGDAKPFLRIRLESSWEDDGTVEGSIDTQIYYISSPEDIIKDEDKHRAPRKDLDKIRVLYVPASRTPEKELGNASGSMLSRLVNSINWTDDEIKEITNKIDELNNTFLSESGALTQINQEIQKSWKLYHEDNRFSQAELTINSSEMVGALRQIALKFSPTTTEEAFTVSDLGDGLRSIFYFSLVDSILDIELEITKDREENPDNPRFKLIPPVLTILAIEEPETHIAPHHIGKLIKRFKQLGNNDNSQVILTSHSPAIVKRIDPEDLRYLRIENNDRVLQTIVSDIQLPQAIDASYKYIKGAIQAYPELYFAKLVVLGEGDSEELLLPKFFDLLGKEVDSSQISIVPLGGRHVNYFWKLLNALRIPYITLLDFDNERYGGGWGRIKYISQHLYELNTEFQEWFNTQGLDFNEIGARECESMEDKRLINWFNKLEEFNVYFSSPLDIDFLMLQHYKEHYLDMLSSKEGPVVSYADSGGNNKKVKLTDLDCIDKLQLEGLEKRIEEAKIATLKDKSGPGDSFTREEKELMIWYQYFFLGRGKPTTHMQFLSSISDDELTRNLPPVFEKIVNRAEELLGDIEHGKE

SEQ ID NO: 63595 - protein, 605 aa, Streptococcus agalactiae LMG 14838; identical to SEQ ID NO: 63099

SEQ ID NO: 63596 - protein, 584 aa, Streptococcus agalactiae GB00984; identical to SEQ ID NO: 63244

SEQ ID NO: 63597 - protein, 513 aa, Streptococcus agalactiae GB00984
MSDIATRDETIKKELLEYQGNILILANAGSGKTTFLAEKLKSDSKKLDNYQKLAAITFTRNATEEIKQKLVEIPENVVVSTIDSFLDNEIILPFLDQRYKVATSLQFSFQQKYKFNNFDIGLSQIMQNGIFATYDNPTARQGKNFKCEVALDILKNIVSASEYLKYKFNSLYIDEFQDCDQSMNDLFMYLKDELGIRLFIVGDDKQSIYQWRGASPRYIKNLWENENDLKKERFIGNFRSLPKIVDFSLALTPEVKIDSINETGSILYIETKQFALKEDVIRSLVDNGDINLDEKNYFLIGNNQHIEETVTQLGGIFPNEFDYVRKNPFIECTNGRFLQSLAQYYFLESFSEYDVLNNLFPDYNDDFRKGLLKKLKILRQNPERLLIEDIASYLGVPITQFGDKLESQILLEVLIDVENRILFDTSSLKNNLLMTTHNSKGLAADTVIIFVEYLIDRYKNTLKFEDHYVAITRAKSKIILIDNKTNYVSEINRLLCNNNGNFSFDNFIERRNL

SEQ ID NO: 63598 - protein, 689 aa, Streptococcus agalactiae LMG 14608
MKLTKVIINNFRSFGDSQVIGFNDQTVLIGNNSSGKTTVLQALSKLFSDKQNDRIIRKSDFHLPKGLRPGENSRTLFIETIFEFDELDGTAYSPAIPSFFEHFTVSQGDAKPFLRIRLESSWEDDGTVEGSIDTQIYYISSAEDIIKDEDKHRAHRKDLDKIRVLYVPASRTPEKELGNASGSMLSRLVNSINWTDDEIKEITNKIDELNNTFLSESGALTQINQEIQKSWKLYHEDNRFSQAELTINSSEMAGALRQIALKFSPTTTEEAFTVSDLGDGLRSIFYFSLVDSILDIELKIIKDREENPDNPRFKLIPPILTILAIEEPENHIAPHHIGKLVKRFKQLSNNDNSQVVLTSHSPAIVKRIEPEDLRYLRIENNDRVLQTIVSGIQLPQAIDESYKYIKGAIQAYPELYFAKLVVLGEGDSEELLLPKFFDLLGKEIDSSQISIVPLGGRHVNYFWKLLNSLKIPYITLLDFDNERYGGGWGRIKYISQHLYELNTEFQEWFNTQGLDFNEIGARECESMEDKRLINWFYKLEEFNVYFSSPLDIDFLMLQHYKEHYLDMLSSKEGPVVSYADSGGNSKKVKLTDLDCIDKLQLEGLEKRIEEAKIATLKDKSGPGDSFTSKEKELMIWYQYFFLGRGKPTTHMQFLSSISDDELKRNLPHVFEKMVRRAEELLGDIDYGEE

SEQ ID NO: 63599 - protein, 604 aa, Streptococcus agalactiae LMG 14608
MVKSDDWFPKGVIKLEDAALEVVKDVTNCLVIAGPGAGKTELLAQKLDYLFSTNKCISPKKILALSFKTDAAANLKDRVKKRYGDEYASRFTSLTYSAFEKKILDQFRNVLPEEIRPSKDYLIEEMEVIKEVLDRNGLSTTGMWKNSIKEIAERIALSENDSTIKNDLLKGTQSNKPVLLYRQITKLSTQIIATNEYIREALQMTYDFVFLDEFQDTTYAQYNLLKTCFLGSSCKLTAVGDNKQAIMRWAGAKPDIFPDYIRDFNSNEYQLSMNHRSVPKLVEFQKEVHQILNSNHSSIQTNNYPEFQEGEITLFEFENESIEAESIADDIKSKIQGGIRPSEICILAKQKIYDYSSKLIAILSSKGIKARIENEYQELLKDPTCNLLLDLISCSQGKRDPLIWENISHFYGNINGIDEFTDELSLAKSYKEIDDVISDIASLISNFIPDKDSMLNLIEYIIENIGDERIISNFSIYNGKSDLTTIVKNFSKLLYIEYSQSPGLWIEIVSNFKGENSIPIMTIHKSKGLEYEAVYFLGLEDSAFWNFNNQPEEDKSAFFVALSRAKSHLIFTYCKLRNNRAQNNRNINEIYSLLTQSNLVKVVN

SEQ ID NO: 63600 - protein, 689 aa, Streptococcus agalactiae LMG 14609; identical to SEQ ID NO: 63594

SEQ ID NO: 63601 - protein, 605 aa, Streptococcus agalactiae LMG 14609; identical to SEQ ID NO: 63099

SEQ ID NO: 63602 - protein, 584 aa, Streptococcus agalactiae MRI Z1-213; identical to SEQ ID NO: 63244

SEQ ID NO: 63603 - protein, 421 aa, Streptococcus agalactiae MRI Z1-213
MSDIATRDETIKKELLEYQGNILILANAGSGKTTFLAEKLKSDSKKLDNYQKLAAITFTRNATEEIKQKLVEIPENVVVSTIDSFLDNEIILPFLDQRYKVATSLQFSFQQEYKFNNFDIGLSQIMQNGIFATYDNPTARQGKNFKCEVALDILKNIVSASEYLKYKFNSLYIDEFQDCDQSMNDLFMYLKDELGIRLFIVGDDKQSIYQWRGASPRYIKNLWENENDLKKERFIGNFRSLPKIVDFSLALTPEVKIDSINETGSILYIETKQFALKEDVIRSLVDNGDIILDEKNYFLIGNNQHIEETVTQLGGIFPNEFDYVRKNPFIECTNGRFLQSLAQYYFLESFSEYDVLNNLFPDYNDDFRKGLLKKLKILRQNPERLLIEDIASYLGVPITQFGDKLESQILLEVLIDVENRR

SEQ ID NO: 63604 - protein, 584 aa, Streptococcus agalactiae MRI Z1-214; identical to SEQ ID NO: 63244

SEQ ID NO: 63605 - protein, 421 aa, Streptococcus agalactiae MRI Z1-214; identical to SEQ ID NO: 63603

SEQ ID NO: 63606 - protein, 584 aa, Streptococcus agalactiae MRI Z1-216; identical to SEQ ID NO: 63244

SEQ ID NO: 63607 - protein, 421 aa, Streptococcus agalactiae MRI Z1-216; identical to SEQ ID NO: 63603

SEQ ID NO: 63608 - protein, 746 aa, Streptococcus agalactiae FSL F2-343; identical to SEQ ID NO: 63142

SEQ ID NO: 63609 - protein, 672 aa, Streptococcus agalactiae FSL F2-343; identical to SEQ ID NO: 63143

SEQ ID NO: 63610 - protein, 729 aa, Streptococcus agalactiae BSU108; identical to SEQ ID NO: 62500

SEQ ID NO: 63611 - protein, 597 aa, Streptococcus agalactiae BSU108; identical to SEQ ID NO: 62501

SEQ ID NO: 63612 - protein, 585 aa, Bacillus cereus VD200
MKLKSLKVENFRNFEDVEINLTNQNVIFGMNDVGKTNLMYALRFLLDREIRKNGFKETDYFKNDTSKVITITLGVEIADRDTNDDSKHIIAKVGGARSGTGSELDVFFFQIKGAYDESENIGVPKIYWGNKLDELEELAQSGIFSPLDSLFKIVYLDPTIDLDKTFSKNRKQLFDQTKLDESDIAISNEIKSLGMQLNDKISSMEVIQSFQTTITKEYKKLKKEDISIEMKSELSINRYFGNLIPYIKRDNDENIYPTSGDGRKKILAYSIFNHLIQEQEGNKIIIYLIEEPENSLHRSMQIALSKQLFESEVYTYFFLSTHSPELLYEMDNASLIRIYSKNKTNCESYIYHVEDNYKNVKKELNRSLATALFADKVLLVEGPSEKVLFEKILEEVHPTYELDGGYLLEVNGINFEPYVKVLKGLNITPIVKTDNDLKAKKGQPKNFDLIGINRCIKLINGTPKESVEIDYFVINDKGKEVENVKLKRELIFAEKNRIFKENAKEIQNLKENNIFLSKIDLEHDLYDVIGERLEEILGKSPIKYLQNHKLLNMIELTQELNSKDCKAIINHELFKALRELVSDVS

SEQ ID NO: 63613 - protein, 522 aa, Bacillus cereus VD200
MLVDQKQRDDILEDNDSIVVSASAGSGKTTIMVKKMGIEMEKIKDHRTIAAVTFTVKATGEIKKKAGNQIKNPFVVMTNDSFIENEIIRPFIIDAYGKDYRKDYSVEYGSRYKFEDFATGLEQLKSDNILGSFEDNKRNFNFRLAFNILEKSIAAQEYMKSKYVTIFIDEYQDSDYDMHRFFMKLKNDLNIKLFIVGDSKQAIYLWRGAMSNIFDLLKEESFNYYELVTNFRCDKEIENYANLFHNPKYFTAPNKVVENVVFKEYNSFNSFYERNNFSGFGDVFNALIKDNVIDLNKEITIIANFNKDAIKITDLLNAAGYNFVFIPKTPIDEGLPNGYLLKELALYTKNSTYSIYDFIERTDIDERKQTRIEINTIISCLKKAEYIIPEKISIVIKKLGDYLGILFTEEEVIKFCESMCNSDYDMAFRLTEEKYKVMTVFASKGLEFEQVLSFARYYKIYIEENVQNHYVCVTRAKSKFLMFIDNEDYYSHVVDVINANGITGIAYLTKIEENKDNLQHSN

SEQ ID NO: 63614 - protein, 747 aa, Bacillus cereus VD166
MISIEKIIIKNYRKFYNDSITLDRKITAIAGANNSGKTSLVELMSNLFIKEKKDSIKIEDMSSKSRLEDERMITEILKDANLDYEKKIEKLRKVHKDLNKIMIGLVIQYEDSDNIESFSSYLADVDINKRNFYFKIEYEYKSIKEEDIIEILDRGRDFKEVYSLLESKIYYCDENFENEIRIKEKAEFFNLFNYHCVYAIRKLSDTSDEKQNFLSKHLLKTVRNNVNWKENLNTLIEGINNILDQQNLSTRIDAITLKHIKTTLDNFSKTNGGNTGKLGVDFKLENRDIEKVLLDFIHIYFEQDEGIKIKEQKQGLGYSNLIYLLLEGQIFSDKIDERKINLLIFEEPEAHLHPQMENIFIRYISAIKKTKEIEHKENDLEEKLKEEDVQKELEDVVKELENVAKEGAVKEIVETVNQVAAGEVGEVIINAMTENQDVPFQMLITTHSSEMTKTIGLSNIRVLRSNGHTQSKVYDLNDFMTQHATDRNFYEKFFQFNMVEMVFADKLILFEGDAERLLFKYLISNMLKYEKLSSQYISYIQVGGAYAHKYLDLINFLEIKSLIFTDIDYEYKKEDVEINADVIKERIMKRVSSNETIKTMVRRSNISKILKESRLKKGLFLNNKNICLKFQTDVDGYARTLEDALLYKLIQFKNNTEKDMDVLENKLSYKKLNIETVFSHITKKNFKLFIEENKLLLSNTTKNKTSLRDRIDKLKNKTDFMYALIESGNINDSIPAYVEEGLDWLQD

SEQ ID NO: 63615 - protein, 648 aa, Bacillus cereus VD166
MASGLNLSQQFTLINAPAGSGKTTAVSNTVRKLLRQSNKKVLCITYTNRAAEQLREKIDSERVEIGTIHSFIGNFMVPFFRIKSVIEYFVQFYCSEIKKIIEGKDERSLIRLEKYRERNNLEIDFVVTEEVVLENISYIKYGETQFSSFLYGGLSHDDLLTFSRAVFEKFPKLNMALAQKYSFVFIDEYQDTSSEILDLFYTACLNNETRLVLLGDEMQQIYKERVEDFQEVINRNFIRENTLKSNWRSQANIVSVLNNIYFDSLYSQYAEKPAGNKAKIHVVNDLIDINLESDTLQLVLYNSELFKEIEAFNLYKVYNKIYAYHDKYSAKEILLNSNRDNPDDLIVLLIFIIEISELFDEQRFIQLIQKIGEFKFANKEIWRIKNHSDKVKVADQLNRLSQEVKSNKTLNELLCFLQEIEIIDSTFLEMVISQIEGNTDFRNELFDIRLNEFSNCYKQIKNPTFSTQHAVKGEGYDKVAFKISDGTNNINVRMYAFLKLFSKGQFDYKELMSMNEHAKKYISSLNATIEKKASNLNAKDFKQFEEPCKKCILEIKKIFIENKGLFLEIFGQDYLSFEGKPNVTNFKKCIKAINKIEGILLAYKLFYVGCSRAKEQLDVYVTNIEIQSFQKEFISKMESVGFEVSIEV

SEQ ID NO: 63616 - protein, 528 aa, Bacillus cereus VD078
MGNIENKNLIDTDSINKFAFQFLTAIRDVERDLFTGSNTLLKEVIDFFIDYEIKTDISMTDEEKKIKIREKKELFSKGAQSLIQSLQDRMREGKKHMLQYVENTGAAFDKMQPSFEGGILDTELYSALKLIVENETGIKLPAVNNGLGYNNLIYISLLLAKMQKDASGEYLGTNAKVYSILAIEEPEAHLHPNMQYKFLKFLKQNRETEVRQIFITSHSPSITAAVDLDDIIVLYKNKEETKVAYPGKVFNESPDDIKSKKYVKRFIDVTKADIFFARNLIFVEGLAEQLVIPEFATALGYDLTDTHTSVINIGGRYFEHFLKLFDTSKNPNAIEKRIACITDLDPVRKEKSVKGATWDSCSVLALNNDLDKYEYNACSNPFVNTYKSNSSNHIRIFTQKEKESCTFEYDLILHNITCEKLITDSTSNQNEIRNLMLAYKENKSINDMLAYMRNGKYKENMEIDLQNTPMVDGEKKKHIIADRYLMSISKGELAQELAHEISRMEPSDNMIVCPIYIKEAIKWICQPQ

SEQ ID NO: 63617 - protein, 571 aa, Bacillus cereus VD078
MDLSTAIKLKSSNNKIQIDNHFKLCAGPGAGKTSFLINHINNILSHSTRLSKTRRVACITYTNTGVETILSRLNNMTNEIEVSTIHSFLYNHIVKPYLWLLDDIIFPLDKLDGHDDIKPGYTLLKTYKEKSNQNWITDNQKLSKALNKLTWYINEQDVMELKFLKPYHGKLSEKASIKKDSYMLYKKLCWEQGLLSHDDVLYFSYLLIKRNKKIREIIRAKFPYFLIDEFQDTSPLQVAIIKLLAKKEMVVGVIGDPCQSIFSFQGANVSSFSQFYLENMSLYVLENNHRSTEQIISVLNYVRKDEHFVQHSPDNKLGNNPTILIGNARTSYYQFKQDCTDEEWCVLAYRNETTNGIEFGIEDLLVDDINDLLYKDGKRGKMIYFLIHGIEYGRQLKLKEALKFIKKAYKDEKGFLEKDAIKVLKNLLNEYEVFNSMSIKELYNTYIFNHYGVKKQIKSGNISDFYQNLKYINMAALVNIADDASLFKTIHKSKGDEFDNILLIIPESKRPTFLTFLLSPDMNKEEHRVYYVALSRAKKNLYVNIPKLTEEEMKLIKNFDKKVLSKELVFN

SEQ ID NO: 63618 - protein, 584 aa, Bacillus cereus VD048
MRISQVRVENYRNLKSVNIKLNRLVIFIGENNSGKSNLLKAITLPFLNDEIGSLSKNLGWQDISNLAKERYFKFIQENLDGIKNGELELENFIEVLPVVKVEVTFEPEDADEYYVHKWINSIDGESPHYAIRYQFYVENPKDLLTHVSKILSDTDEIENIKMNLLPIEMFKYSICVPSTEEQVAFNELANFKYNALAAERDEFSNKNTQLGSKALVNLLHNKLSEEQKVQVEQSYESFFANLKQISNLDSVFNWQEQSELENAKDFFEKITLLPNMPSMNSLLNNVRLGFGEEYLNTQGLGYRNLVYLLVMMNSLKINSDIALNILTIEEPEAHLCISNERLLASFINSIVSSSNQTQLFISTHSSEFLNKLELKNVTVVSEGSAFSLESEMKEEQLNYLAKKPNLDFLKFLFSRRCILVEGPTEEMLIKSYLSSQTHLLNEIEVISLHKGFTNMLDIWLRVNQNSSYRIGIIRDFDDQPRAQQNHEVYNNYDNIYVTTTTEYTLEPEFVKTGKNFEKLKSYFVANHNWSDITTPESLSDKWRKAKTNTMLKFCQDFGKGDLEEIELPQHINKVLKFLQSGIKE

SEQ ID NO: 63619 - protein, 460 aa, Bacillus cereus VD048
MKIVVAGAGAGKTTSMAQVVLDRLKEVTNGKIIYVITYTNAARNRIREKIIELNGSIPKQLFIETLHVFLLREFIFPFHHLLYEKQFTKASQIELPGKPIPRMRKVKELETNKIIHVTKVTETAKWIICKKTKDIKDTKEKRKKILDIVSRYLDSVFIDEAQDIDKHLIGIIELLDSKGINMCLVGDPKQDLRGRNAFKTLIDTNKQHVEYIAENHRCPISHVQLANSYISEEEVQLPQKALFGELGYVFERDTNIIDLVDITNWDYAYIYKKNERFTTHINDKNKAEQNLTYELKSIVKKLEINEQIVDKFVYDIKKMILKSLAEEDNSKIFLILEEALSIKLILQDKKKLEEVLDMNRETPTAKGVLVNSIDSIKGLEGDKCLFILTMDLAPYLFGEKSTQNKMLNYLYVGLTRAKQKLVFLVANEVEDRYGRENVNAYFKEIISVNTETRTSGSIFA

SEQ ID NO: 63620 - protein, 585 aa, Bacillus cereus HuA4-10
MKLKSLKVENFRNFEDVEINLTNQNVIFGMNDVGKTNLMYALRFLLDREIRKNGFKETDYFKNDTSKVITITLGVEIADRDTNDDSKHIIAKVGGARSGTGSELDVFFFQIKGAYDESENIGVPKIYWGNKLDELEELAQSGIFSPLDSLFKIVYLDPTIDLDKTFSKNRKQLFDQTKLDESDIAISNEIKNLGMQLNDKISSMEVIQSFQTTITKEYKKLKKEDISIEMKSELSINGYFGNLIPYIKRDNDENIYPTSGDGRKKILAYSIFNHLIQEQEGNKIIIYLIEEPENSLHRSMQIALSKQLFESEVYTYFFLSTHSPELLYEMDNASLIRIYSKNKTNCESYIYHVEDNYKNVKKELNRSLATALFADKVLLVEGPSEKVLFEKILEEVHPTYELDGGYLLDVNGINFEPYVKVLKGLNITPIVKTDNDLKAKKGQPKNFDLIGINRCIKLINGTPKESVEIDYFVINDKGKEVENVKLKRELIFAEKNRIFKENAKEIQNLKENNVFLSKIDLEHDLYDVIGERLEEILGKSPIKYLQNHKLLNMIELTQELNSKDCKAIINHELFKALRELVSDVS

SEQ ID NO: 63621 - protein, 522 aa, Bacillus cereus HuA4-10
MLVDQKQRDDILEDNDSIVVSASAGSGKTTIMVKKMGIEMEKIKDHRTIAAVTFTVKATGEIKKKAGNQIKNPFVVMTNDSFIENEIIRPFIIDAYGKDYRKDYSVEYGSRYKFEDFATGLEQLKTDNILGSFEDNKRNFNFRLAFNILEKSIAAQEYMKSKYVTIFIDEYQDSDYDMHRFFMKLKNDLNIKLFIVGDSKQAIYLWRGAMSNIFDLLKEESFNYYELVTNFRCDKEIENYANLFHNPKYFTAPNKVVENVVFKEYNSFNSFYERSNFSGFGDVFNALIKDNVIDLNKEITIIANFNKDAIKITDLLNAAGYNFVFIPKTPIDEGLPNGYLLKELALYTKNSTYSIYDFIERTDIDERKQTRIEINSIISCLKKAEYIIPEKISIVIKKLGDYLGILFTEEEVIKFCESMCNSDYDMAFRLTEEKYKVMTVFASKGLEFEQVLSFARYYKIYREENVQNHYVCVTRAKSKFLMFIDNEDYYSHVVDIINANGIKGIAYLTKIEENKDNLQHSN

SEQ ID NO: 63622 - protein, 633 aa, Bacillus cereus HuB4-10
MYISKLSVKNYRNFGEGKFSILLKPFTAIIGENNIGKSNLIDCIGLVLSQDITMFKKRFLDIDDINSITKENFKKSIVELLEIETIDESKIKFPDVRVELILDDLDEDQLAVVGDWFFEKTLTKAKLTYWFKPRGGFKRQEWVERQVSNLRELTSGDKVKKEELYKHVEFPIDQYEYVIYGGSNPTNKCDPYFLKMLKLEVLDALRDAKKELVANGEYKLLYRILNKNYENDFVEIQTVLGELNQKLSENKKLESIKKELTTYLDKVSLTNPSELNSIDFNFSSPEVNEILKKLSIVYGENPVSIERNGLGKNNLLFISLVLSHLASQTDDKTKLAFRVIGLEEPEAHLHPHLQTHLAKNLSKVNSAGNEKDDKKDTQIIVTSHSTNITTSIDLNNLVILYKDKGKINYHYILDGFSDKKEGKAHIKYLKKYLDATNSSMFYARRLILVEGISEQILVPLFFEIHYKKTLESIGANIINVNGVAFKHFLEIIKNGYFIKCGVLTDKDEGKKTEKRAEKLKEHYKINNNVIAVEINDDTFEKELIKYNNKGKGRALLLRVFKQLHPIKYNGVEKNWTELIDVDSYFENIENDKSDFAFALHEELLKDNEGFAIPNYIVSIFKFIMGEENEEKTT

SEQ ID NO: 63623 - protein, 525 aa, Bacillus cereus HuB4-10
MKRKLHNTLIIAAAGSGKTTELIKRITRKSRELPNDKYLAVITYTNSATNEILERLQKNVSVQPNIFVGTIHSFLIKFLIKPYGEVLGLVPNELIITDYEINVNKSSSNSFIEKNMIVDRLSKKGVLTYDYIVTLSKKILDNKDVKKRFCNRIRYLFVDEFQDSTNTQFEIFDTLRKGKNSEVILVGDPEQRIMNFRNKPRKGSTGTRKVPLHPIDSLQKKTTYTINKLKSNYRSSETIVNFINQFHSSIQQEWANKEISSKNPVTFIQSTKLKSIITDFNGLCINKDYCELIPKTRFFLAHENKVYNNYRKFNCDNKSKENMSLFTCIYEYLSAFYNIKKDFLHQTLEMEEIELRKKCLLVLYEINYNINIDLEYFSDFIETTFSRKRLETGEKVSFKIKEKTKRLVEELSNRIILENEDLSKELNEYRDSFLTIHKSKGLQADAALVVAKNEKELLMWFEDDKEKRLLNQQDKSRLGYVGFSRPKEFLCIACLTPISESTLKLLNKFNVNIYSPSEEQVPTTL

SEQ ID NO: 63624 - protein, 626 aa, Bacillus cereus HuB4-10
MYISDVKILNYRSFSEFNVSLNEGLSIIIGENNVGKSNFLEALSLIFNSNYSLRKRTLQQEDFWNGLKIQGTWPEITIEATLNGIETENELAITSRWLTRNPGEAKLTYKYKPKANISVSAPLDATPISKIQLPLHEYEWIIYGGERETLDTFDFNMLSKFGVEYVGALRDANAELKKSSGQLQRILKNFDLGEEELHKISGKIDELNEQIMQGREIQKVQSDINEHLGKITGTMRQRVKIQMGESDYDALLKDLKVLIGSNEDRVHSVDMNGLGYNNLLYISLLLTQYTAIKEKRNQNHDYVFPLLIVEEPEAHLHSHLQKFLANYFFNQKVLGQVIMTTHSSHVSSHAELDSLVVFYKGNNKTLSKRIGTIFDTNKKEESDYKRYLERWLDATKSDIFFGRKVLLVEGIAERLLIPKFFSMLQKGHAGEDKTLESEGISIISVDGVAFRPFLQLFGSKGLDMKCAVLTDSDPESVPVIDIHGDEVIGSDDKVVKEVAYPTKFGEFPICSRTAGLIKDFSTSSNIYISSNLKTFEYDLMMENNASFFRELIQTYDIGTKAERERVVTLDGHEFAKEAYEVISKEKGQFSQFILDELNKGKVLHIPAYIKQVFNFLTNEEEVRSDG

SEQ ID NO: 63625 - protein, 597 aa, Bacillus cereus HuB4-10
MVDNDDFRRSIACAPHTDSITVQAGPGSGKTTLLIERLKYIIENRINALSGLACITYTNAAKEEIMMRLQNEGVQLPTELFIGTIHSFLLEHVIKPYSHFKHKEGIPYKLASVGFARGYKDYIANMLGRPHYHINESIFKAFESLGRDEKGNPYCYRDKISPSDALTWKNFIKNRGYIDQQDVIYLSYLILKKYGHIRNAFSSRFKYILVDEYQDVTYYQEQLFSLLEHSSFFCVGDTNQSIYSFTGAKPEIFQAKWNNESYRNYMLTNNFRSTQHIVQFANYKTEIEQTGAGNNATRKQKVIFIKDIKEASEAIQLFQSICTDIECEEQKKPFMILARRNDYVKNINSLLKKQEVEASPFLKKLAKEHYRRFQILQNFILAISYKRRNEFDRAVERMSEAFSYLFFNEHPNYIALVEIGYSMFMWKKLQIFTLQFLDNLVLTETSVEELFVVLKKFLMEESKKLYGKSIGKKLNMLNYKWKNQVKASKSTMLSHLIEQVELQGHFSESEGSVLNIHDAKGQEAECVLVMAEYESQLKEWLGKNGEIEEARVGYVAFSRARKLLCVWAPSIQESNYMHLQQHVQFVDKTYTAEMESV

SEQ ID NO: 63626 - protein, 686 aa, Bacillus cereus HuB5-5
MYLKSLKIYNFRKFGTNNNKIEFVDAKSFQEQRNKKEVNIAPTTTLIVGKNNCGKTTIIKSLDNLINNNKDAFKANDFNFLYLKKLIEYYEQAIPKLDDELKEKIKTPYLQFNICIGIENNSNDLVTNIVRFMKLDDINNSELKIVIKVELENEEVFIRDVKKLLEKNDNSSLRFNSFLELINDSDFKINYYNTDNDKIDNFNIKNLIELRPIKANNIESEKCLSKAFSKIIEYRYKTLFEEESDNLNSTIININRTLTKLISEKHTVSINKSLEEIESNEKLQVLLRADLTFQNVMNNLIKYEYVERNMNIPENQFGLGYTNLMMIIADLIDYMEKYPENSFNSKVNLISIEEPETFMHPQMQELFIKNINEAIASLLKSKNKNVNSQLIITTHSSHILNSKIHSGNTFNNINYVTTKNNYTHVVNLHDDIIIPKSEKKAHKREQDLKFLKKHIKYKVSELFFSDAIIFVEGVTEETLLKYYIDDNNKLNKYYISVFNIDGAHGMVYHNLIEILQVPALIITDLDIERDDDEKKNFKQISDLTGKFTTNKTIKKYNDDSNSLEELQHEQLKINNMYIAYQGKIEEYYATSFEEAFILTNYKNELLNSVLKKMKPQIYENIMGEGDDFTKIKENSYKLQKKLSNDKSDFANELLYKFITEDITIPSLPKYIKSGLSWLAKKLEGEE

SEQ ID NO: 63627 - protein, 684 aa, Bacillus cereus HuB5-5
MSLSKIIPSNKKEEQKSINAIFNSIDKSEGIIFNSGAGAGKTYALIESLKYIIRNYEKSLKQHNQQIICITYTNVATKEVKERLGNTDLVLVSTIHERMWGLIKDYQKELVEIHKEKLEDEISSLKQKLEKGQGYEKFQELEEDLKGNFKKIMIENRELFFQNYSAKAAEVKKSFKILLNDYPNMLKNVGNFKRIVNAIYKLDQYSKCYENISLNKQGYKSVEYNSIYNNDQLYKMRISHDTLLDYGLKIIKKYDLLKQIIIDKYPFIFIDEYQDTDEKVILIMSYLEQYAKKIDHKIFIGYFGDTAQNIYDDGVGSEITKIHSGLKQIDKVFNRRSTKEVIEVINKIRNDSIEQISIYDDCEGGSVKFYKGTSGNVKDLIERYIYEWKITTENQLHCLVLTNKIVAEYSGFKNIYEAFKETDKYKGSNYNQLNTELLSNDLSKLGEIPKLLFNIVRLQNNLVDKTTSVIDITPKESLFDEMSIEGLRNLIKLLKQYQGKTLGEYIESISTVYSQVNDENYKKIIDWTFGFENITFELFKNHLIEKLFNNILDDDVDRATATIQKILEVDIVEYGLWYKFIMDKQEEKVIYHTYHGTKGREFDNVIIIMENAFGRNHNYFNFFFENFLHPDVLEGEKKLNFEKIKNLLYVSCSRAIKNLRVLYIDDVTDFESEIKEMFGEVYPF

SEQ ID NO: 63628 - protein, 678 aa, Bacillus cereus VD045
MYDSKSPYISRVKITNFRNFKDIDVNLNHKQIIIGENNVGKTNFLRALQIILDPKLSDEDRFLLDTDFFDGLSEPMKNREQIEISIEIQGYDHKKTILSTLDAATVSTSPKTLRLTYRYFPKIKEDGTHDYQFIIFQGENEEISFTHYHRRFLNINVIHAMRDVESEMKHIRKSPVNQLLKQYDIRKEELAEIASALKQKSDEVLSIDELTDLTNKISSRFSSIIGNQVDSTVSLETIDFNPNRILNTLKLMIGEKKRHTGDTSLGINNILYISLILLSLEDNTIPSIIKEDKFQQLLIEDSGAILNDCYEQNQKQNYILKAELSKEIQAALYTFMDTYYSSNNGCTILAIEEPESHLHPALQRVIYKDVINKDTSILMTTHSPHITSVAPIDSIVHLRHTSEGTSVNTTASLKLETRDRKDLERYIDIKRGEIYFGKGVILIEGVAEEYLIPSFANKMGMPLDKKGIICCNVNSTNFKPYVKFLDALDIPFVVITDGDYYLNVKEIEEVEKEGEIEEIEKIERKFGLLHEDSHDDFGFDGNDRMRALLIDLNKFTDEQIPENYDEQDTLFSSLGFFVGYHTMEIDIMSKIKDLSYEKNIINTIFCELTAGGAQQKKNFQIELEQGKYVSCLKKIESSHSAIGKGRFAQHLSIECTENHVPRYIRLAIESIYKRVDEL

SEQ ID NO: 63629 - protein, 608 aa, Bacillus cereus VD045
MELYQKKITQIKEDPEQLAAFNSNISTVVKAGPGSGKTTVLTLKILKLLNERIHVPRGLGCITYSKEAAKEFTSRLKKMGYQKRANVSLGTVHAFCISQIIMPYAHLFKDDFPLPIDLIADDDKYKLFFSILKDFNINTDNLKFQEMESERSHSVTGFSKVKIDKNHIAEKVAIEYERRLKQLGKTDFIEIVKYSNQLIIREEYVRKCLEAKFPWILIDEYQDFGKPLHEMVLSLINLTNIKIFAVGDPDQSIYGFNGAHPDYFLELYDSTELLSIDLKTNYRSNQDIIDASSITLNIDDREYKAGARIKEKGTFHFIQCENELDEQYKYVVDTIIPNSQKQGIPLEEICIIVKDKYVVEGLRKVMEGKGIPYYIAKFEFSKSEIVLWLKDCAIWLVNNLSGSFTSISDFWIQLLESHLGILSENERIIEKKKLYDTLIMSKKFNDSLNDWLTFIVARLNLHCILKHSEKFFEEAHLLEKLLQFATNGEFKSYSIKQFSQIGKPENQVTISTRHSSKGLEFEVIVILGMEQKIFPDFRNLKDTEKLNEERRVFYVCITRAKRECYLLMSKYYTKDTKKGTITFKQYPSMFWKELYTACRKKNLSHLTT

SEQ ID NO: 63630 - protein, 578 aa, Bacillus cereus VD045
MKFSNITIKNFRNFEKVNINLDNKNVIFGMNDIGKTNFLYALRFLLDKEIRKFGFNKSDYHKHDTSKKIEIILTLDLSNYEKDEDTKKLISVVKGARTSANADVFYIALESKYDDKELYGNIILKWGSELDNLIDIPGRGNINALDNVFKVIYINPLVDLDKLFAQNKKYIFEESQGNESDEGILNNIKSLTDQVNQQIGEMTIIKGFQQEITSEYRSLKKEEVSIELKSEMAIKGFFSDIIPYIKKDGDSNYYPTSGDGRRKMLSYSIYNYLAKKKYEDKIVIYLIEEPEISLHRSMQIALSKQLFEQSTYKYFFLSTHSPELLYEMDNTRLIRVHSTEKVVCSSHMYNVEEAYGSVKKKLNKALSSALFAERVLLIEGPSEKILFEKVLDEVEPEYELNGGFLLEVGGTYFNHYVCTLNDLGITHIIKTDNDLKSKKGKKGVYELLGLNRCLNLLGRENLDEITIDIPEDIKGKKKKERLNERKKEIFKQYKNEVGEFLGERIYLSEIDLENDLYSAIGESMKRIFENEDPVHYLQKSKLFNMVELVNNLSTKDCFDVFEHEKFACLKELVGSDRG

SEQ ID NO: 63631 - protein, 494 aa, Bacillus cereus VD045
MSREQIIKDGGNILVTAGAGSGKTTILVSKIEADLKENKTHYSIAAVTFTNKAAKEIEGRLGYSSRGNFIGTNDGFVESEIIRPFIKDAFGNDYPDNFTAEYFDNQFASYDKGLQVLKYQNILGTYSNPKKNFKFQLALDILKKSLVARQYIFSKYFKIFIDEYQDSDKDMHNLFMYLKDQLKIKLFIVGDPKQSIYIWRGAEPENFNGLIENSTDFNKYHLTSNFRCCQDIQNYSNLFNEETRSLIKEKNEVQNVISIADDMPISDILLKLTEEKQVLNIEAELVILVRRRNQAIEIMKELNEEGFNFIFIPQTPLDRATPNATLLKEVIKYVKNDRYSIYDLAAEIVGNLSSREIKEIQKIINELLVPNINQVLINQVLINLFAKLEITLDTREITAFTEVMMTNEFDIAFDTNEYLHKIFTVHSAKGLEFNQVIITASDYNVHYNRDTNEHYVATTRAKDKLIVIMDNKKYSDYIETLMKELKIKNIIKSI

SEQ ID NO: 63632 - protein, 584 aa, Bacillus cereus MSX-A12
MKISQIQIKNYRNLNDINIKVNRLVIFIGENNSGKSNLLKAITLPFFNDEIGSINKNLGWQDIGNSAKTKYFNFLQENLDSIKNGDISLESFIEALPVIKVEVNFEPEDADEYYVHKWINSIDGTSPHYAISYQFCVENPKDLLTHVSKILSDTDEIENIKMNLLPIEMFKYTIVVPFTQEQVAFNDLTKFKYNALAAERDEFSNKNTQLGSKALVNLLHNKLSEEQKVKVEQSYETFFTNLKEISNLESVFNWQEQSELENATDFFEKITLLPNMPSMNSLLNNVRLGFGEEYLNTQGLGYRNLVYLLVMMNSLKNTSDIALNILTIEEPEAHLCISNERLLASFINSIVNSSNQTQLFVSTHSSEFLNKLELKNVTVVSEGGAFSLESVLKPEQLNYLAKKPNLDFLKFLFSRRCILVEGPTEEMLIKSYLSLQTRSLNDIEVISLHKGFKIMLDIWLRVHQDSSNRIGIIRDFDDEPKAKESHEAYNIHDNIYVTTTTEYTLEPEFVKTGENFEKLKNYFISNHGWSDITTPEALSDKWRGAKANTMLKFCQDFGTGDLESIELPKHISSVLNFLQSGEKQ

SEQ ID NO: 63633 - protein, 459 aa, Bacillus cereus MSX-A12
MKIVVAGAGAGKTTSMAQLVLDKLEEVNTGKFIYVITYTNAARNRIREKIIELNGCIPNQLFIETIHVFLLREFIFPFHHLLYNQQFIKASQMKLPDNLIFKSRKIKELADNKIVHVEKVTEIAKWIICKKTKDTIQIKEKRRKLLDIVSRYLDSIFIDEAQDMDKHLLEVVQMLDRENIDLYLVGDPKQDLRGRNAFKTLIEKYRQSVEYLSENHRCPISHVQLANSYISADEQQLPQKALFGELGYVFESDIEINNFVNTINWDYAFIYKKNDRFITHINDRNWAKQNLAYELKSIINKSNINDQLVDKLIYDIQKIILKDLSQLNNFKVFSMLEKSLSINLTRQDKGKLADAINLNREIPTNEGILVNSIDSIKGLEGNECLFILSTDLAPYLFGENGNQNKMLNYLYVALTRAKQKLVFMITTEVEEKYSRKCINTYFQENLLIKEERTREVTLT

SEQ ID NO: 63634 - protein, 692 aa, Bacillus cereus VD014
MYISNINITNYKNFRTNSIDFNNGINVILGHNNAGKSNLLQALALIFNSNSKKHLSIDDFNKNIPIEELKEYPPSIKITATLKQDDCEDLMSDDLVTVSNWLTRLEEPYEAKLQYEFYLPTKFHEKYQSVINEAENIFEVWQVIQDEFLRLYTYKIWGGESTNQITADSESLQKFDFQFLDAIRDVERDMFSGKNTLLKNVLDFFMDYNIKSDKTLEKEQKEAEIKIKKKKFGESAGDLISLLNERMTEGKKHILSYAQDIGASYDKSTPNFDGSITDIELYSALKLIVEYKTGIKMPIINNGLGYNNLIFMSLLLAKMQVDASEDYLGSNAKVYPMLVIEEPEAHLHPTMQRQLLNFLKKNLKNKKVRQIFVTTHSTHIAGAVNLDELICIYKNKSETLIGYPGKTFGDNKKSKKYVQRFLDATKSNMLFAEKIIFVEGLAEQLLMYIFAEYLNVSLEDNHIAVINADGKYFDHFLHLFNISNPNAIRRKIACITDRDPEWKNLNPSDKSKKISFKKCYPFEMYIEETGYEYKRNEEKNGYPDNIRFFMQDENYGKTLEYDLVRFNPKFKGLVTESTTNRTEIFKLMDQYSEGKSLDTMLGSLNTSEENERIRKALADERLKWTDEDKKKALIASRYLNSVGKGENALELAYELEENLLKKNIAGEEESTKFKEFIVPDYIKEAIEWMCEE

SEQ ID NO: 63635 - protein, 580 aa, Bacillus cereus VD014
MILISSEDTIDIEQHFKVTAGPGAGKTHWLINHIKNTLKNSKRLEKTRKIACITYTNIAVETILNRLGTQSVSQVEVSTIHSFLYSHVVKPYLTHIAELFDIEIQKIKGHDTIEPKHNKVQFWLENHSMNDKLRHPYTINQLIKLPENKEALFDWLSSVKYSFNSELKLNLRGKDSKAKQLRKIVKILETDLFSYKKIYWKDGKIDHDDVLYFSYELITRYPFILSVLRAKFPYFFIDEFQDTNPIQAKIVSLLAEEETIVGVIGDPAQSIYSFQGASIEEYLKFKIENQSEYTITENRRSSNQIIDLLNEIRTDIDQTTTRNVDHDRPILFVGNSMEAYNEIQEKYGNGMFIQTLARDNPTANAMKFAVDNSKLNTKLLDELALKDNTKRFNIIKNSMEALEFAKHSDYKNAIKIMSANFIRYSEKEQFKKSVLVLQKLIQRQGTLLEEPLMEFYQLIREDIEMPGFRKGASQDFYNTYSYKEVALCITYKEDISQHRTIHKSKGDEFQNVLLIVDTIEFLTNPNLAEDEEQRIYYVGISRAMDRLFIVTPELSKVNRAIIESKFNFQIIDLEKEPQLI

SEQ ID NO: 63636 - protein, 692 aa, Bacillus cereus MSX-D12
MYISNINIINYKNFRANSINFNDGINVIIGHNNAGKSNLLRALALIFNTNSKKHLSIDDFNKNIPLDELKVYPPSIKITATLQQEDCEELMSDDLVTISNWLTRLEEPYEAKLQYEFYLPTRFHEKYQSAVKEAEDIVEVWQLVQDEFLRLYTYKIWGGNPINQVTADSEALKKFDFQFLDAIRDVERDMFSGKNTLLKNVLDFFMDYNIKSDGTLEKEQKEAEIKIKKKEFGESAGDLISLLNERMAEGKKHILSYAQDIGASYDKSTPNFDGSITDIELYSALKLIVEYETGIKMPIINNGLGYNNLIFMSLLLAKMQVDANEDYLGSNAKVYPMLVIEEPEAHLHPTMQRQLLNFLKKNLKNKKVRQIFVTTHSTHITGAVNLDELICIYKNGSETLIGYPGKTFGENKKSKKYVQRFLDATKSNMLFAEKIILVEGLAEQLLMYIFAEYMNISLEDNHIAVINADGKYFDHFLHLFNTSNPNAIRRKVACITDRDPERKNLTPSEKTEKKSFKKCYPFEMYIDEKGYEYKRNEEKNSYPDNIRFFLQDENYGKTLEYDLIRFNPNFKGLVTESTANREEIFKLMDQYSEGKSVDLMLGNLNASKENERIRQALEDKRLIWTDEDKKKALIASRYLNSVGKGENALELAYVLEENLLKKKVSGQKENIEFKVFNVPDYIKLAIEWMCKE

SEQ ID NO: 63637 - protein, 581 aa, Bacillus cereus MSX-D12
MIPISSQDTIDIERHFKVTAGPGAGKTHWLINHIRNVLGHSDRLEKTRKIACITYTNVAVENILNRLGSQSINQVEVSTIHSFLYVHILKPYINHIAELFGIDFQKIKGHDKIEPRYSKVKLWLENHSQVEKLKHPYTINQLLNRPQNKDALFNWLAGLKYRFNCDQNLDLSGEESDARQLRKVVKILETDLLNYKKIYWQEGKIDHDDVLYFSYELITRYPFILKVLRAKFPYFFIDEFQDTNPIQAKIISLLAEEETIVGVIGDPAQSIYSFQGASIEDYLKFKVDNLSEYTITENRRSSNQIIDLLNGIRADIEQTKIRNVDCDRPILFVGNSIEAFNKIQDMFGKGLFIQTLSRDNPTANSMKLGVDNSNLNTKLLGELASKDTNIQRYSIIKNSMEALEFAKHNDYKNAIKIMSANFNGYSEKEQFNKSVSMLQKLIQLKETFFEEPLMLFYQLIREAISMSGFRNGAIQDFYNTYSYKEIALCINYKEDISQHRTIHKSKGDEFQNVLLITDTIEFLTNPNLAEDEEQRIYYVGISRAMDRLFIVTPKLLKANRVIIESKLNFQIIDLKKEPQLI

SEQ ID NO: 63638 - protein, 596 aa, Pectobacterium wasabiae CFBP 3304
MRISRVRLINFANFSNVDVETGESIVIVGENKVGKSNFIRGLQLILDPGLSERDRQLGFEHFWDGLGEEKLGETIEISVDLTDFTDDPRLMAHLNDCVVNPGPPMVARLTYRFQPKTELNRAPESLKDYEYVIFGGTDPDMHIGGALRRMLPIDVQGALRDAEKDLSSWRNSPLRPLIEELTASLDDDAREEIQTQIDEAQRELAGHDDVVATAERISERLVAIAGDQHAVPVSLGLAPARVDALLRSLRLLLDNGIRGIGDASLGTANLIFLALKSLELDRLVDDGERDHTFFVVEEPEAHLHPHVQRLVYRYFLGTDGDNRDESTPLTTILTTHSPHIASVTPIRSIVLLRHDPEEEETIALSTVNAPFTQRDEDDLQRYIDVTRGEIFFSRGVVLVEGDAERFLVPAFADALGIPLDMLGITVCSVGGTNFTPYVKLLGPQGLDIPHVILTDRDPVNGRHPRVRRRFISLLELVEYEHYRDYENMDAEDVIGLANDYGYFVNENTLETELFESGLAEEMIDVIRQELPQLKQETLNTLQQWLDDGEVDQGRLLKLIERIGKGRFAHALASSVSEDVCPDYIREALEHIRDAVA

SEQ ID NO: 63639 - protein, 606 aa, Pectobacterium wasabiae CFBP 3304
MPSRSVSAAYLAQASELAGNPGQLAAYNSLGHCVVLAGPGSGKTKTLVLKLARILAEDVQAPRGAACITYSQECARELTRRLEALGLREAPNLFVGTVHGFCLRHLLMPYGRLADLPISFPLSVASQRVSDRLLRQSGDQLFGSGHPHKAIDLGRHRRSVLDRNSTAWRSEEELAAWTEAYESALRQDGLIDYDDMVVFGQRLIVEHDWVLPLVQAKFPVLAVDEYQDLGVALHRMVKRLVFEGGVRLFAVGDSDQSIYGFTGANGALLMELAGSEGVETVRLQLNYRSGAGIVSASEMALGEARGYRANDPNRQTTIEFVLCPEGMADQATHAIAQIIPAALAAKPGRTLGDIAILYRDYRAGDIVADAVTAGGFDYIRVDNAAPYRKVALTSWVEDCAAWCAGGWRVGRPQLRGLIDRYLAFHRTRLDDAQARREGQRLTALLWALRADQQPARDFVTSLRNGIVDSLLGTELVLADQAEQLNRMSAALAEGGALAALDIVSLGGRDGSPDHLNLLTLHSAKGCEYDVVIMVGLDLGNLPWRGETPEKLRESRRLFYVGLTRARDEVHMLYSGFVDGRYGSMRQGRSPFLDELEGRMREAGLRQ

SEQ ID NO: 63640 - protein, 700 aa, Bacillus alcalophilus ATCC 27647 = CGMCC 1.3604
MYLKSVSLSNFRQFGTVNKSEPAITVEFNPNFNILVGENDSGKTAIIDAIRYLLGSISDDIEKIKLEDFYRESIGTHSDSFYIEGTFSDLTDKEAGAFLEWLSFNNEDEYELRVSLRVEKKINENGQEYIERKVQAGEKIYESRLRSQAKEFLKTTYLKPLRDASNELKPGFRSRLAHILKAHPAFKESNDVEHSLVTTIQEANKKVEDFFQEEYKDGRSLVRDLELLLSDFHDVNDQSKSRSKFSVSQTDLTSILKRLSLDTEDINLGLGNLNLLFIATELLLLKNNSEENVIGPQITLIEEIEAHLHTQAQIRLIKYLEEELGRSKKRNQYILTSHSTNLVASIDPRSIIFMHNRVAYPLREEYTKLEHEDYAFLQRFLDSTKSNLFFAKGIIFVEGDSEMLLLPALANLLGYPLHKSGVSLVNVNGTSFERYIKLFSRSDLWKEPLDRPAIKTPISIITDIDVKPMVYYNIEGKTKAVYSIVDHSQLTDVLNLCDEQYDEVIPEHIGIEYSTLNKLSSDFGITLTEGNRPEIEKRVKKSISEQYIISSGLQKETSLMDKYSNYDANLEVCISPDWTLEYSLALSCLAPLLLESIQEVRYKKPFEGKKNEVFKTLKEKLIKTPKDPKLAYQVFKPINDKLVSKAEVAQCLAIKLNAVADDPEIQMEMKEQIFKDDKLNYIVRAIVHSSTIPNVLEEVK

SEQ ID NO: 63641 - protein, 608 aa, Bacillus alcalophilus ATCC 27647 = CGMCC 1.3604
MNILENLKIITPKILPSGCDFFDQQKEVISAEGSIDIVAGPGSGKTTVLTAKCGLLLNDTAQSDKGTCLITHTNVAVDEIRTGLKKLGINDIEYPNFIGTIQEFFNSFFAKKAFHIIIGEKTFNVVDDEEYQDKFEKLFDDRKPDWYLVNNPNVKKCNPQILFTDNLSYEIISDAKPSYRNALNESVRTLFSWGVVTNQQCLELSNWYINMHGPQLKKAMSNRFRYVLLDEAQDTSHLQFEMLNYLFSDSEISFQKFGDPYQALYNIFDGNIDTWIPTKQLETNYREISETSRFGTSIANIIKNVCVERYDTFTSLNIIDSFEPHYIIYKNEDDLISKYRDLIKYYELESDSFSKSIKKDAILSPFHNDLSCLFSIYTKPSTMQRNNQSPVKNIFHFLVDMICKEMGITYKGIIEMLEVDLTCRTLISKCILKLANKNLELNTVIKLFEDILINLSNSEKKEFSKVNLEGQVEYFRQVFFSSLKNVDEEETSKSDFYIGTVHSAKGETHRSTLLVLNTKFIDYDSNNELLMFDLLFEYLLGNYKNPEEILDTVEKNETVKSLKLAYVALSRPTHLMAIAIPESIIKDRNTIIKLDKFGWKNSGELLHV

SEQ ID NO: 63642 - protein, 666 aa, Bacillus cereus FRI-35
MLISELHINNFRSFGYKSQMIETTNLTALIGANSSGKTSLIMALLRLFGQKNTDRTLVKTDFHIPESADISKIKEIDLMIEAKITFPELMSQSPADVKTVPEYIKHLIIEETGADPYLRIRLKGKWVQGSTPEGNIEQELVYVKVPYGHEEKEEDLTRVQIHHQKLIQMMYIPAMRDPAKQLKNASGTLLWRIFDGVDWPKDLNDDIKSLTTPIETLFKEIPSIKEMQGILNTQWNKYHKDKRYSNSQFKFNGNSLEEFLKNAEILFNPTVDGNSVKIDSLGDGLKSLFYITLVSTLLEIENKQEKDDKPLLNILAIEEPENHISQHLLGRIVRNLKEISNKDNAQVILSSHNSSIIGKIDPEYIRHLQIKNSESIVKNITLPEKADDAHTYIKEAVKAYPDLYFSKLVILGEGDSEEIVLPKLLSADNIYLDDFNISVVPLGGRYVNHMWKLLNDLSIPHITLLDLDRERGGGDWGRIKYVLKQLDENNRCSEQLRTVVLTPSNKTRIYSMEDIEDFHKRESHRLKSLDTWIKKLEKEDVFFSYPLDLDFSMLKSFQQEYQNTMTRGPRIPQDVDLPEYDEKLQTSIQATLKNKKAIARTYSGEEKELMIWYNSLFLGRGKPGTHIAALKDIGDTEILKHAPEELLRLVKRVKEKVGLVGDNIDE

SEQ ID NO: 63643 - protein, 640 aa, Bacillus cereus FRI-35
MNNKVLEQDWKTSNDVTLEDSALLAIRASNHVAITAGPGAGKTELLAHKAGYLIQTGICPNPKKILAISFKTDAARNLQERVELRYGKNVENRFESKTFDAFAKGILDQFIYALPKDYQPKKDYEIILNEKSLNDIIKGYITNSNPYHPNWQHEYDLKKVLETMKETELPIVVFESDLYSWINERLWTVLLNGKGNLTSSLTFSMISILVEYLLKKNPLIVKVLQATYSHVFLDEFQDTTYNQYNLLKTIFLNSDTVITAVGDNKQRIMGWAGALHNAFGVFKSDFNATEHTLFNNFRSAPNLVSIQNIFSKTLNDTSIEVLPVGEWNENDGVCEIWNFKNHNTEAILLASHISEWMKAENLKPRDFCIIVKQQEHIYAAEIMKELSKINIKSRIEKDYQDLLSEELVLLIIRLLQLSYEEKSPELWLNVIDEIIDMKYRDVDPENIKYLIIENELVKMLDKVRKLYSDIDVTNFNSQFTEILQEIIVFLGEDSIKATYPKYKQANYFDEVIQKMLDKLKYQNRISMKELLQEFCGKDSIPIMTIHKSKGLEYHTVVFIGVEDAAFWSFSTQKEADKNAFFVALSRARQKMIFTISKKRNILKYGKEKNITQETENVSELIKTLMDAGVPLIEESDLANL

SEQ ID NO: 63644 - protein, 778 aa, Rhizobium sp. CCGE 510
MHIESIRLRNFRRLKDVRIDLASDISIFVGANNSGKTSATHALQLFTAASRERFSLHDFSSDCWIAIDAFGTGEVDELPTISMDIWFNVEPANLHRVVELLPSLAFTGSKVGIRVSFAASDPGALLQSFQTAHALAAANVQPAANGAGDYHPSPRTLCDYLRDDGGVRLRHGFELQYHVLDRACFDNDLREHADYVPRLISSDKGRNGKDILASLVKVDFLHAQRHLSDSAGGSRAEELSRVLGRFYQRNLEQSSADFEAQRALAASEMMLNDHLGRVFGPTLDRLSELGYPGLGNPRLLIKTALNPATIMSSQDGTKVHYALGDENEHGVLPTLPDRYNGLGFKNLIYMVVELLDLHGRWLDIEESRPPLHLVFIEEPEAHLHVQLQQVFVRKVLDILKIDGDDGLYYTSQLVVSTHSSHILYERGFRPIRYFRRMPGAAGQTSDVLNLSSFYEDTSPRNRNFLERYLKLTHCDLFFADAAVLVEGNVERLLLPQMIAMAAPRLRSAYLSVLEIGGAFGHRFKSLIEFLGITTLIITDIDSVLPGAPPEIEPEDDIAGQEGEPQPAVAENPAEAEAAAIVAEEEEPEDENEEPGPGTACLVSIDGAVTSNQTLIKWLPGKTLIADLLAADASDCTQTRAVEHGALVRVSYQTSTEVVWRDETRTLAGRTLEEAFALENLVWSQDKDRQSLKLRIRGAAKLDLFEISARLNRKIAGASFGKTNFALALLEQDPKDWSVPRYIFDGLRWLENEVMPPEDGGGDARGDAGELEPFGDIFE

SEQ ID NO: 63645 - protein, 627 aa, Rhizobium sp. CCGE 510
MTSRIGKPDTKADIELRTALDNRPPTNFVMVAGAGSGKTTSLIKALAHLSRTRGNELRMRGQQIACITYTDVAVNEIRSDVGNDLLCHVSTIHSFLWSLIHTFQTDIRDWVLSRIDEKITEGNDRLAKPGTRAATRPKIEAALARYQQQKEIVRRLQRFTYGTGSDYGHGVLGHPDIIKLVPALIEQKQLLRNLLAAQYPVLFVDESQDTTPAFIEALRKVAQTVEHPFCLGFFGDPMQKIYTAGAGVIDREQDWIEILKPENFRCPQRVLKVINAIRAEDDDLKQVRGRTIKVEDQDVPVDGTARIFLLPADEDRTRRVGEVRKYLGHVNDDPLWESDQKDADVRMLVVVHRMAAKRLGFPNLYASLNDEAPDSLKDGLVDGTAWPLRPFITYLLPLASAVRAGDDFEIVTILREKGPLRDPGAGQNVAGVLRQLHDATHELDRLFSEPATTIREILNFAINSSLIAVDERMSRHLAAPVNPADELDPEYLPMVEFLASPAIELWGYQKYIEDLSPFATQQGVKGAEFDRVLVLLDDEEGKGQNLFSYGKYFGITELSDTDERNIAERKDSVIDRTRRLFYVCCSRAVQDLAVVMFVPDVTAARAAILNKGFFRPEDILEEGSLAG

SEQ ID NO: 63646 - protein, 675 aa, Bacillus thuringiensis HD-789; identical to SEQ ID NO: 62958

SEQ ID NO: 63647 - protein, 653 aa, Bacillus thuringiensis HD-789
MATEIVENMFCVNAPAGSGKTTKIKSMIVNHKIKHPIDNILCITYTKRAAEELNKDFNEEGIHISTIHSFLHKFLKIYFCKTEMKDLYFEMFEDLIKESIENKEEKEHIVTRNQKYIEKHGCLSVESIKANIDAIYYNESSNNHLYTGGLAHDSLLLFAEKVFDKFPKIKMRLTQKYQSIFIDEYQDSAASVLRMFYKACLNTKSNLYFLGDKMQQIYKNYDGSFEEELKTLNTDIKLDINHRSIPDIVSVLNNIYNDKGFKQNPSKKNLDIKPDHPPRIIMCDNIQERLKRECSIYPDALLLFLLNQQKFASIGARELYKQFSHLERYSHAKQLSATDVLSDNTSENTDPLLKLLFIVGEVVDYYKKSNVGSIIQIFKANRKLFDMGIGTITSHRDRIDLTKLLKQLYEDYHKEISISEFLTLLRGCNLFKSSYIDNMGDEYLEVLKVKLNEFKALSNYLRNPAVSTQHGVKGESHNTVFFIAEDSFRTPIVHMHKFLKLWTIKELTLDSLESFYYDYNKWIEDTISHLGCKISDLNKESHNEHKIYLKTRVEQLCKHFEADFIFKDLCEESYSKYILNPNVTNIKKCFKESTVYGVLSAYKLFYVGCSRARSNLSIFVDKSKIEGFSEELIVKLRRIGFSVEIETKELQKV

SEQ ID NO: 63648 - protein, 714 aa, Klebsiella sp. OBRC7
MYISELVLVNYRNFKRSRFVFDKDINTIIGENGTGKSNLFRAIRLLLDDEMLFRAYKLGVSDFSHDLEDWRGHWIIINIKFRDISHDESVQSIFLHEGGGVEVDSENDVTEASYNLIFRPGISKRLELARLPVGDKAALIDVRNNISIDDYETVFTGRSFANFYNEDSYLKIVGDFDKVVFPSKIDSKNIGWIINKQMSLSKDISFTFIKALRDVIQDFNGNKRNPLLELLEIKSETLNNEDYEKIIENVISLNKDIESLPDVIDVSKGIHSTIRETVGEAFSPTKLTIKSQLPDEPEELLKSLTLNISEGSKNFDGTISDMSLGGANLLYLTLKILKYKYLVNKGKVANFILIEEPEAHLHTHIQKALFKKLNFENTQILYSTHSTQISEASKVSKVNIISKAEGKDYVDVCQPSTGLTVEEIHKLERYLDAKRSNLLFAKKVILVEGDAEEIMIPALFSKFFGLTLDELGVTIVNVGSTGFKNVANIFHNKRLRRRCAIITDLDSSIYSEISKKDSKVIKTKKRKALGSDKIGKERKALLDIFCQHNEYVKPFYAEHTFEVDFLNYYGNEEYVIDVLNDIYTHKSKIKSIEADLRTENVEVYGDKVLSVAKYAGKGWLALALAEKIDHNVLIPEYILDALSFSIGKFNKSTLLVVLLYRKQFYLDSSKSEELECIDQIINLLTQSKRAIKRQLIKDLYSKAFGKHDNLLRMI

SEQ ID NO: 63649 - protein, 587 aa, Klebsiella sp. OBRC7
MDRLFLREFLNEKQIDAVLFDKDAVVMACPGGGKTRTLVYKIAHKLSSKTDDRFVVAITYTNNAADEIKKRIVEMGISLDRLWIGTIHSFCLRWILKPYSGFCEDIRFGYRIIDPHDADELKQRFCDKHSCSIFKTNFGWNERGLKVKGVNNRKAVEEYYSHLKSNDLIDFDQVIYFSYLLLVQYKSIALNLSRIFNLILVDEYQDTQILQYELLFPLAKSRGNTCRLFFVGDPNQAIFNSMGGVALSFENFRARSGIDFNLLYLNDNYRSSQSIVDFFSLFRTISGQPFKAVGEFRGYDSKVTFNKGCSIEKLDDYVKELVYSAISDGISQSDICIIAPWWFHLSEITRRLMALMPDIAFNGPGVTPISLNRESLWYKFARIALTPSSPKNYLTRIYYASELLTQLNEAGFILKNESTEVKNFLRYCNSLNVREIDGLDYLKAFFNESSAYFDFDIMQNEEFSESYNAFFASAQKRKEKLEIEGLGVLTKTEHYKKMFDKKSGVTVTTVHSAKGLEFDCVIAFGLLQGIIPRFDEDEQQSKRLLYVLCSRAKKKLHLISEVERRHKSGPYLANEVLCKTKFDYTNE

SEQ ID NO: 63650 - protein, 673 aa, Sphingomonas sp. LH128
MFLKRVKLANFRSFDDAHLELQKDLTVLVGENNGGKSNAIDAIRLVTLPLGGRREIYCEPTDVRFQCGATQFELEAHFAELSVGQQGRLISAATDAGLTSACFGLRYDGSRQGARPQLWAGKDGNAPEPNCHDMVRHVYLPTLRDAKRALASGNPTRIMALLNHFLEGTTASDLAKELARTRRHDVLVKVDDAVEKGLSALTGGVRRQAATLGFASDEGLIDIARDLRFKLADHGVDPEDLRYSGHGYANLLFMAIIAVELEKVRSTDLTLFLVEEPEAHLHPQLQAAVLSFLREQAEQSRKSLPTDHGPAGELQVVVATHSPNLSAWVSSDRLVVFKSVIASAGTAEADELLEPGSIDASIIEDVLGHDADGDGEAAAESVAEAISAVVPRRATRCLPLANMPLEDLDRRKVDRYLDVTKAALLFGGRALLVEGIAEALLLPAIAKHHVLKDHPEKLRLFRSAVFIPIDGVDFAPYVTLLLTELEGARIADRVVVMTDGDRGLKKEKEDEEGADDVPDEGTEAPAGETEKLHEATEAHEAEEVSEVEDDAADDGLLPGERRKQALEKLVGRLGAIDYFAAVTSTYSLESELIEAGNEDLLEKAYLELHRRSKKKWRNAMKLDGDERAAAIHRIFKNARKGDFAQVLARLIEDGEKLAVPPYIKHAIEQLVAT

SEQ ID NO: 63651 - protein, 574 aa, Sphingomonas sp. LH128
MSEDYAPTKEQEAVIGHNGPAFVTACPGAGKTRTMVERARLLLSDGRDRRGVAFLSFTNAAVDELEVRLRSFGILPTPLFPSFIGTFDRFLWQFFVAPFGMEGCDVTPRLIPDKGDWVVQPYEKMQGLPLKAFDRKTGRLNRAIATEEGFDADRDAKKHEARALRMLASARSKGHVDFEDVRTCVKGRLADKAFAERLGKALAARFKEIFVDEAQDCNPDDLEVVQWLRTSGLIVKVICDPNQSIYQFRGGITDELDRFADRFEDGDRLPMSGNFRSTPAICAAIVGLRPPSARGVPDRALGSHKADSTALHILSYGGTSVPAAIGVKFGELVKSHGIAVADAPILASRLQSAARAIGHPVSKDTVHKTLLLARAATDFHFSFNLDNRREALSNLHRAILLVQGRIETAGDYHRHVLSEGLEDGRWRPEIIDAAATLKFSPGMSADAWLDKARRALAPGLATPGGIRQRLKSSNELLAALATPPADAHPARTIHSTKGLEFPAVCVVLTSNKAGGILEHLEGAARPEFAEDARKIYVAASRAERLLVMAIPKSRAKRLETLLQGNGCSTARHDI

SEQ ID NO: 63652 - protein, 778 aa, Sphingomonas sp. LH128
MKKLAIRNFRRLQDVVIDFASDISIFVGANNSGKTSVGHALQLFTGHGRFSIHDFSAELWSSIIAFGAGEEGAALPTLEVDIWLEIGAEDVHRAIDLLPSLAWDSTLVGMRVAYTPIDPEATRARYAEARERSLAAVDKDEHDVPVFDPAPRHLRDYLREHLNDEYELRYFILDPAKFDANMVAEVGYVPASLAGRDRSGREILSGILRIDFLNAQRHLSDSPGGARAEDLSRVLSRFYGRNLEQKGEDLDALRALAASEVSLNQHLERVFEPTLRSLAKLGYPGLSNPRMMIRSALDPAQIMSSRDGALVHYALGPDDGAPDPPTLPDRYNGLGFKNLIFMVVELLDLHAQWLAIEENRPPVHLIFIEEPEAHLHAQLQQAFIRKVMDILSLKGADRTAYTSQVVVTTHSTHILYERGFQPIRYFRRSRAEATSTSDILNLSVFYDSTDADVRTFLERYLKLAHCDLFFADAAVLVEGNVERLLLPQMIETAAPRLQSSYLTILEIGGAFGYRFKALIEFLGLTTLIITDLDSVFGPLDQLEAGVEGAATAGDGPVQAVGDAAVVDADDEDEDEEATDQLPLEKPGKACIAGHPGAATSNQTLLQWLPKCGTVAELWEATADDKTQVRANDNDALVRVAYQCRTDVTWGGDTLSLAGRTLEEAFALENLDWCQHKDRKPLQLRIAKNDEKDLCELANRIHKRVQAKSFSKTDFALALLAEDPATWVVPEYIAAGLRWLEAEIAPPDPEPDDEEGAEGVTGGGPDAPAALEPDGEVAA

SEQ ID NO: 63653 - protein, 123 aa, Sphingomonas sp. LH128
MTSRIGSPDTPADIEVRACLDCKVPRSFVMVAGAGSGKTTSLIKALDHLARTRGSALRRAGQQIACITYTEVAVGEISEDVGVSSLFHISTIHSFLWSVIRPFQSDIATWVGIRIEEKIAERR

SEQ ID NO: 63654 - protein, 142 aa, Sphingomonas sp. LH128
MRVAYQCRTDVTWGGDTLSLAGRTLEEAFALENLDWCQHKDRKPLQLRIAKNDEKDLCELANRIHKRVQAKSFSKTDFALALLAEDPATWVVPEYIAAGLRWLEAEIAPPDPEPDDEEGAEGVTGGGPDAPAALEPDGEVAA

SEQ ID NO: 63655 - protein, 123 aa, Sphingomonas sp. LH128; identical to SEQ ID NO: 63653

SEQ ID NO: 63656 - protein, 670 aa, Bacillus cereus BAG6O-1
MQTSRSPYISKIKIKNFRNYKDVDVTLNHKQIIIGENNVGKTNFLRAIQLILDPKLSDEDRFLQESDFYDDLEDPMKNKERIEISIEIKGFEHNKTILSTLQEASVSTKPPTLRLTYEYYPTEDGTGGYQYRIYQGTDANNLFTHYHRRFLNIKVIPAIRDVESEMKSLRKSPINQLINQYDIRKEELEKIATALKEKSDEVLSIDELVDLTQNINSRFSDIIGTQVDSTVSLETIDIDPNRVLNTLKLMIGQDKKRSTSNTSLGLNNILYISLILLSLQDKTIPSILKEDTYGKLALEKESSILADCYEKNESSNYILKKDIQEKDYAKLYSFMDNNFSSNNGFTLLAIEEPESHLHPALQRIIYKDVMKENTSILMTTHSPHITSVAPINSIVHLHSTKNGAVINTTASLKLDDRDKKDLERYIDVKRGEIYFGRGVILIEGVAEEYLIPSFAEKLGMSLDKKGIICCNINSTNFKPYVQFLDTLGIPYVVITDGDYYIWEEKKNKKGTLEPKKTFGILAQDSHEDFGYDGNDRIKKLLIDLKKIKSNEIPEGYTKQDTLFKVHNFFIGIHTMEIDIMSRISNMQTEKELLCKIFNELTLGGAIQKSNFKTSLEKGEYVSCLNKIESSNSGIGKGRFAQHLSVECTKNFIPSYIQAAIKTIFKRVDEV

SEQ ID NO: 63657 - protein, 608 aa, Bacillus cereus BAG6O-1
MELYNKKLKQIQQDPEQFTAFQSNTSIVVKAGPGSGKTTILTLKIMQLLNEKIAFPRGLACITYSKEAAKEFTERLQKMGCPKRKNVSLGTVHSFCISQIIIPFAKLFNDDFPLPLDIITDAEKQKIFNSTLTNLGIDKYTLSVEEMDKERSFTLTGLSTVPVTLNPTAAKVAYEYEQQLKKLKKTDFIEIVKYSRELINREEYIRRCLESRFPWILVDEYQDFGKPLHEMILSLLSLTNIKVFAVGDPDQSIYGFNGAIPEYLLELYDKPDISSVHLKTNYRSHQDIIDVSSIALNVDDREYKAGIEYDGNAEFHFITCEEELDTQYNYVVNTIIPNCQNQGIPLQEICVLVKDGNSIKNLSTVMKEKQIPHYFSKFEFAKSDVVLWLRSCALWLVNPTSQSFTEIVNFWIQLLKNETKHFSDEETLMLQKKLYTILEDSKKYAENLNDWLTYLEQELNLAQILNESVTYLDENKYLETLKNYAQSGSFKGYNLSQFSQIGKPKDQVTLSTRHSSKGLEFEVVIMLGMEKGVFPYYKNERNSAKLNEERRVFFVCLTRAKRICYLLRSKKYTRKTRNGIITFDHKPSMFWNELYEVCENKKLVSSTN

SEQ ID NO: 63658 - protein, 655 aa, Rhodovulum sp. PH10
MYIRSVTISGFRSFGPTPHKIKFSDGLTAVIGPNASGKTALLQALCKLFGISRGQRNVQRSDFHLPVGVGPDDRTARSLTIEVIIALSELAKGSATSKTVAPCFKHMQIAKTGATPVCRLRLEAQWADDGTAEGEVTQDLFWITTLDDAIKDEHKSKVAPFERGFIQVYYTPATRNPEAQIKLSTGALAARLLRAIEWSKGTRKSVEDATKALSDAFGGESAIKAMSEALSTRWRDLHDSVTDKDPGLALMSQRFEEVVAKVQVLFEQQATGVERGLDVLSDGQLSLFYFALAAAVFDLERAAVDGTISGFRPDALRIPALSVFAIEEPENHLSPYYLSRIVQQVRSIITGHAAQALVTSHSPAVLSRVEPTEVRYCRCDVTSRETSVTAIKLPEDDEEAGKFVRGAMLAFPELYFARYVILVEGDSERVVIPRLAQAEGLLVDPSFVAIVPLGGRHVRYFWDLLEGLDIPYATLLDFDLGRNGGGWGRIKTTLVELIENGYSREQLLKCQNGTLVDLKTMHTWPTNEYLASWVTFLREYDVFFSDPLDLDMAMLKAVPAAYNAIIPKDGGPSGKTETADTAVLGNGGEGIEPYKKYYPGYAELMPEYRYHFLTHSKPATHLRAFTHLDDAALKKNMPEPYRALLKDVKEHLRRD

SEQ ID NO: 63659 - protein, 632 aa, Rhodovulum sp. PH10
MALPIRRIDPAHWQPVGIDALEDNAIDVVQSTNNRSVIAGPGSGKTELLAQRACYLLQCGIAPIPQRILAISYKRDAAANLATRVRARVHPELGHRFDSLTFDAFSKGLLDRFGQALPKEWRPTQNYEITNATFTVVQNTLELLSPPAAVGTKRDIIAISVKTFEKDHLVAAPLALTPLGSPSPAQWAAREFWQNWLHGGSHSVLTFAMIGRLAELLVRTNPMVRDALHLTYSHLFMDEFQDTTQVQYDLAKTIFWQSETVVTAVGDHKQQIMRWAMAMDDPFTPFETEFGAIRTPLFNNYRSSPDLVRIQDVLAKALDGGSSTPISKAEGTIVGNSCEVWDFSSVATEATLLADFVAREMIQYSLQPRDFAFLVRMKAVDYFTTLQPALAARGILLRNEAAHIGKVALQELFSELLSETLITVLRVATSETAGRCWSECLDAICSLRGLAVDDDDRRHMAGKALEHFSDDFVTRFPTPPTDENRAEEILASVIDLVGRANLLTASPAYRQGDWFARVCDAARMHLVASSRSAAGWKQALDTYEGLHAVPLMTVHKSKGLEYHTVIFVGLDDGAWFNFRHQSQEEMSGFFVAFTRAKQRVIFTYCAGRGRRQQIAPLYALLKSAGVQTIKKS

SEQ ID NO: 63660 - protein, 213 aa, Klebsiella pneumoniae subsp. pneumoniae 1084
MDQISKSTVVSALTLPEKEDELSKFIKEAVKSYPEIYFSKLVIFGEGDSEEIIIPKVLELYSTEIDSHSISVVPLGGRHVNHFWRLLKSLQIPFITLLDFDIDRNGGGFGRLRYAIEQLSIFCGGKYGKTKEKIPAWDDERDPTTFKLPRTDGDSYNVVAALENHNIYFSSPLDIDYAMIEAFPDIFCEKDVVYGERGPKNIEQEEQEEQKKS

SEQ ID NO: 63661 - protein, 557 aa, Klebsiella pneumoniae subsp. pneumoniae 1084; identical to SEQ ID NO: 62503

SEQ ID NO: 63662 - protein, 581 aa, Pseudomonas putida LS46
MHLAELNIRNFRKLRDVQLRFQPGLNVLVGANNVGKSAVVDALRALLAGYEEPYPRFGAEDRHRSPQGEQAGDIEFHYVFRGLAPDDEADFLAALKPIAGGQAEAHFHVCYSDTDQGGRLRVRRWCGDHQEVSLTADMIENLRGVYLQPLRDAAQGLRPGRNSQLSRLLHLLTDDAGRQGINEALQRLDDELRDHAPIRGTQTAIADRHNAMLGAQLRQALNVGLSASDFQRLSTRLTLSVDDFELEQNGLGFNNLIFMAVVLSELARNSDAAYRGLIVEEPEAHLHPQLQAVLLRYLASLQEVEGEQPVQLFVTSHSPNFASNANLDCLVCLVESEGHIETFFPREVRFGNGKREKLERYLDVTRAELFFARRVIFVEGAAEMMLVDALATAAGFDLRGHGVSLISVEGLNFDSFLPLFGENALKIPVALITDADPSGVVVPDQPAQPLYPALGAAVQVSDNTANMLELQDRYVRVFHGVKTLEYDLALHPVNRTAMLSALAEFHPQIAVSLEVVVNAALDDAAKARALFCGMFERPPTQKNVQKGRFGQSLAYVIREGAACEVPPYILDAIAHVCQMPG

SEQ ID NO: 63663 - protein, 577 aa, Pseudomonas putida LS46
MIEPSREQQLVIDAPLVPLAVTACAGSGKTATAIQRLVEMRRRLAGSKGRIALLSFSNVAVETFRQGYQELSQTLPSGSGRNRVDIDTLDGFITTQIMKAHAHRTMGANQAPFLVTGGEPFLAGFNCPTRDHPIPVSEIKVRFDAGQPLFYYTVHGNEMLLNQADASRVVARLGRLGGYTHDLGRYWCYRVLSEQPVVLRALARRYPHIIVDEAQDIGVLHQKLLELLIGAGVQVSLIGDPNQAIYEFADADGLFLRNYHQRDGVAPYHLTRNYRSLPSILSVANHLSGRADDPDRDDELPPLGAYFIGYREQALPTLQDAFHAVLDRQAITPDRAAVVCRAAVLASRLSGERDPEGRGAVKLFAQAALLRDQRSDFLGAFRMVARGIFSQLDGPPPGMLNRLSGVAHHRELRELRRRLWLFTRDPAQGLPASSLPASGQWLPLLQERVAQLLREIHRDFGLVTLDGLTRRLTRALLPAGPLSAELEVEVEQEPKARVKTVHQVKGESIDAVLYVANRANIEAMLNGMDTEVGRIGYVAVTRARNLLWLAVPTAALVVLRPRLEQAGFLEVDQVPGD

SEQ ID NO: 63664 - protein, 729 aa, Enterococcus faecium P1190; identical to SEQ ID NO: 62500

SEQ ID NO: 63665 - protein, 597 aa, Enterococcus faecium P1190; identical to SEQ ID NO: 62501

SEQ ID NO: 63666 - protein, 729 aa, Enterococcus faecium P1139; identical to SEQ ID NO: 62500

SEQ ID NO: 63667 - protein, 597 aa, Enterococcus faecium P1139; identical to SEQ ID NO: 62501

SEQ ID NO: 63668 - protein, 729 aa, Enterococcus faecium P1137; identical to SEQ ID NO: 62500

SEQ ID NO: 63669 - protein, 597 aa, Enterococcus faecium P1137; identical to SEQ ID NO: 62501

SEQ ID NO: 63670 - protein, 729 aa, Enterococcus faecium P1123; identical to SEQ ID NO: 62500

SEQ ID NO: 63671 - protein, 597 aa, Enterococcus faecium P1123; identical to SEQ ID NO: 62501

SEQ ID NO: 63672 - protein, 729 aa, Enterococcus faecium ERV99; identical to SEQ ID NO: 62500

SEQ ID NO: 63673 - protein, 597 aa, Enterococcus faecium ERV99; identical to SEQ ID NO: 62501

SEQ ID NO: 63674 - protein, 729 aa, Enterococcus faecium C1904; identical to SEQ ID NO: 62500

SEQ ID NO: 63675 - protein, 417 aa, Enterococcus faecium C1904
MTNIFEKIVNDLNLEQKDVVESEDNLYVNACPGSGKTRVLTRKIAYQAIKHDGSLKRIIAITYTNRAAEEIKERLSLLSIDDDINIWVGTIHQFCLEFIIYPFKMNLSRVSKGFTIIDDYTQRAYVSQINNMLNLNLKTYELNKIDLSLSHDFKINEVQYTQVSEMYHTMLEKNKEIDFDMILLVAYKILTVNSNVARNIASNIRAIYVDEFQDTRELQYNVIAKLLQNNPQIQSMFVGDIDQAIYGSLDGIAKSVEELEMLTSHTFQSKTLHGCYRSNQRLVDFYSNFQSCPYEIESRGNNKNDRGFISYDCKVTKEDLPNIIKNIIKEKIESGIHEKDICVLAPQHYPLFSLGEYLKKELPYCNFDAINISPIKVNNHSLFFKLAILYFTESGEKVRRRKLIANDILITPIVKLS

SEQ ID NO: 63676 - protein, 729 aa, Enterococcus faecium C497; identical to SEQ ID NO: 62500

SEQ ID NO: 63677 - protein, 597 aa, Enterococcus faecium C497; identical to SEQ ID NO: 62501

SEQ ID NO: 63678 - protein, 729 aa, Enterococcus faecium 506; identical to SEQ ID NO: 62500

SEQ ID NO: 63679 - protein, 597 aa, Enterococcus faecium 506; identical to SEQ ID NO: 62501

SEQ ID NO: 63680 - protein, 729 aa, Enterococcus faecium 510; identical to SEQ ID NO: 62500

SEQ ID NO: 63681 - protein, 597 aa, Enterococcus faecium 510; identical to SEQ ID NO: 62501

SEQ ID NO: 63682 - protein, 704 aa, Pseudomonas aeruginosa PAO579; identical to SEQ ID NO: 63366

SEQ ID NO: 63683 - protein, 142 aa, Pseudomonas aeruginosa PAO579; identical to SEQ ID NO: 63365

SEQ ID NO: 63684 - protein, 642 aa, Rheinheimera nanhaiensis E407-8
MKLHSIRISNFQSFGAEPTELTLENITYLIGPNGSGKTAALQALCRLFAFDPSLRRIQRSDFHVPHDEQEAPEERQLWIEADFVFPELEDEEDNSTVAPHFSHMRLDDPDGIPRVRYRLSATMGLDGDIDETFVYVLEAGPDGSPLNPQTVPRSERNHIQVHYLPARRDPTDHIAYGTNALLGRLLRAVNWENEREEVKGFTDQISESLAANPSVNAFSAHLKKTWSTLHKGSYFTDPKITFVASEIEALLRHLSVSFSPGHDDNLVDFSRLSDGQKSMLYLSLVLSSQAVGRAVLAGEDDSFDPEKLRPPVFTLIALEEPENSLSPHYLGRIVSALNSMTSNEDAQALIATHAPSMLRRVDPEYIRYLRLTETRQSKITKIQLPSRKDEAHKFVREAVQAFPEIYFSRLVVLGEGDSEEIVLPRIFSAKGVPVDESAVTVAPLGGRHVNHFWRLLSALEIPYITLLDLDVSRHNGGWGRIKYVNDQLKKLTPAHALPDTWIISAWNDESIPIRTHHFFEDGTKDLFKELEKKNIFFSEPLDLDFSMLLAFPEQYSKENYKAPTVSTVKAVLGNSHHNPKQYSLKERKLFNTYHKRFKLGSKPTAHIDALAQISDKNLLSNIPKSFGRLADAVIAKLAELPE

SEQ ID NO: 63685 - protein, 551 aa, Rheinheimera nanhaiensis E407-8
MIAVDAWLPSDGLTLEPNALLAAKEEARCLALTAGPGAGKTEMLAQRADFLLRTGTCRYPKRILAISFKVDASKNLKERIQRRCGQELASRFDSYTFHAFAKRIIDRFRVVLTGNDALDMDYSIGERKVTRRQITFHDLVPLAIQILKASAVARNAIRQTYSDVFLDEFQDCTDQQYELVKVAFQSTSIRLTAVGDTKQKIMGWAGALDGIFQTFAKDFSAVPLNMYRNFRSKPRLLRMQNEIIRVLDPASVMPDHQLAGEEGEVFAWQFENAQGEAEYLADLIAGWIRNEKVPLSEIAVLVSKQLDLYANHLMAALEVRGIPYRNEQEMQDITVEPAARLVVDYLSCLYGQREPKAWIRLMNQLIPFADDEVQSSARQSFQRFFKEQRKIITMTELLDEPFSGWWDSVCSFLKKIGMETLVALSPDYESHARLGEVVRDTKAHIEELLELTPDLPQALTRFSDDQAVRILTIHKSKGLEFDSTIIMAVENEIFFGDQDANRCAFFVGVSRAKRRLVLTYAKERDRPANYHKRWDTARTPQTEYLGYVIAI

SEQ ID NO: 63686 - protein, 651 aa, Pseudomonas aeruginosa ATCC 14886
MKLQHIRVCGFQSFGSKPITIDLENLTFLIGPNGSGKTATLQALCRLFSFDPNQRRVRRSDFFVPHAEEEVPDERALWIEAEFTFPELEDAAGEHPTIPCHFGHMRLDNPDGVPRVRYRLDASIGIDDEIEQGLRYVLDVDEAGDPVDTVPVPRDERNFIQVHYLPARRDPADHIAYGANALLGRLLRAVNWSAQRETIKQLTADISQSLTDNDSVINLSAGLSKTWRELHKGQFFASPSVTFIANEIESLLRHLSVSFSPGHGEQMVDFSRLSDGQKSMLYLSLVLSSQAVGRAVLNGDDESFDSDKLRPAVFTIVALEEPENSLSPHYLGRIVSSLKTLVGSSEFADAQALIATHAPSMLRRVEPTAIRYLRLDESRCTVVTKIKMPPNEKGAAYKFVREAVQAYPEVYFSRLVILGEGDSEEIVLPRLLAAKGLLVDEAAITIAPLGGRHINHFWRLLSGLEIPYVTLLDLDVARFGGGWGRIKYVATELKKHRPDDLYLSEDELAKLPSWNDPTFKILKAEKDPNFKSCIGDLEPLGVFFSAPMDLDFSMIKAFPQAYGLTADKLVAPKLTQIKSVLGDSHFDPKQYTLTERKHFNAYHKLFKLDSKPKSHIEALSKLTDAELKKSMPASLARLADFVLAKVGALQE

SEQ ID NO: 63687 - protein, 556 aa, Pseudomonas aeruginosa ATCC 14886
MILIEDWRPSEGIVFEPNAETAVREVKRCVALTAGPGAGKSELLAQRADFLLTTGTCRYPKRILAIAFKVDASNNLKERVWLRCGAGYANRFDSYTFHGFAKRIIERFRPVLTGDDALDAGFQVVPRGKAHPVQTEFGLLIPLALKILDAYPMAVNALRQTYSDVFLDEFQDCTNEQYALVSKIFAGTTRRVTAVGDVKQKIMGWAGALDGVFGKFESDFAAAHLNIYRNFRSQPQLLRLQNDIVKILDPGSEMPESLLEGEGGEIHVQAFDDCTEEADSLAKQINTWINVEGLSPSEIAVLVRSQPEAYTTRLAVALSAMGIPYRNENQMQDIATEPMALVIVDYLLCLYGSREPKAWTRLMRRIIPSDDDEQSGALRTDWNRFIKEARKSAAEDLANNCYSQRWSLLKDFLSMVGVSLLTGLSHDYESRDRLKEVIKDIKKHIDAALEREPDLIQALSQLSDDQSIRILTVHKSKGLEFDSVIMLGVEDQAYWGNDTHETRCTFFVGVSRAKRRLVVTTAQTRENLGNISSWRIRRTPHAEFLSYVSSWQTEEQ

SEQ ID NO: 63688 - protein, 807 aa, Pseudomonas aeruginosa CI27; identical to SEQ ID NO: 62542

SEQ ID NO: 63689 - protein, 643 aa, Pseudomonas aeruginosa CI27; identical to SEQ ID NO: 62543

SEQ ID NO: 63690 - protein, 577 aa, Staphylococcus equorum subsp. equorum Mu2
MKLKNLKVKNFRNFSDINLALNNRNIIFGMNDIGKTNLLQAIRFMFDRQIRINGFRASDYHKNDTTLPIEIVVEIDISDRNNETPKSNDSKLLISKIKEARNNLNYPDSFFIMLKGVFDEKEIFGNPVLYWGSTLSDLELVPVRGQTSAIDDIFHVEYVNPTSSLEHTFKKYKKTLFNNSFKTEDDITIENDITQNINDLNNNISKLDVVKVAQESLTSSYKKFRNESMNIELRSEIAINGYLNNLTPYIKWTNEEGYYPTGGDGRKKLLTYALTKMITEKFANSKIIIYLIEEPENNLHRSMQVAFSQQLFNDKIYSYFFLTTHSSEVLYEMDDTQLIRISNPNKSIGNSYHHYLPEKYKNIKKMLNKGLSQAIFYNTVLLVEGGSEYTLFETVLNFIYPEKEIDGKYTLQVDGVGFKKYTELFDALDIVYFVQTDNDLQRMKSSQNEYMTTGFKRGFEIINKPSPLQKVTLDLNDINNDIKLKEKKKEIFDTNKTYILQLKESNIYLSEIDLENDLYKVMGEDMSEILNTDTPVAKLQERKLFNMVEFVNHLNECQAKKICEGFSVLKGFIDYEI

SEQ ID NO: 63691 - protein, 512 aa, Staphylococcus equorum subsp. equorum Mu2
MKYNSYNTHDLENRNKAIHSNENTLILASAGTGKTKLLVDKLIYEKDHNDSYQTFAALTFTNKAAKEIKERVKFNNRHLFIGTIDGFLEKEIIEPFISLYLKTESKLFYSYTNDNKFTSYSDGIQQIIDKNIIGSYKESSKNFKCELSLKILKEVIYSREYLKFKYKKIFIDEYQDCDFTMHSLFQYLNTQLAIKMFIVGDPKQAIYQFRGANPRYLEDLIKKDDYLKLQLNNNFRSKQDIIDFSQAISPEIEVENLVNSQSIFYYASNPSESKTNIIKFLIEESIIDLSSKTFLILGNNNDIYKLHKELNTIYPREFEIVNKTNITNCINKTILESIAKYYFDSEFSEYNFIENLYLEYDNILIADIKNILLKIKNEPSIENIEELFDKLEIPVREFEGKLESELLQTILKNDINKTLYNMQTNSKLLLTTHASKGLEASTVILFTSYFFHYESFNVENNYVAITRAKNKLILIDDNNCRYKKRMNMLLEENQYNKFSFDDFVTDISNAIQ

SEQ ID NO: 63692 - protein, 656 aa, Acinetobacter baumannii IS-116
MHISSIKVKNFRAIKDAELKLDPNQKQDLTLIVGKNNSGKTSFIMVFDKFFKKEDNFNFHDFSTHLREKIYKIESETIEEAIIGLFLEISYSKDDNLEYLSEFIIDLNSKNNTVKLYFECLIDEERLRNDLINIDKKHKKKFIEKNITSYLIKNLYIYEKDEDIENNKQKLIKKEVSAINSLINYQVIHAKRNLASSETKEKSSLPLSKLSTEYFNKENMFSEKDFIKINNAILEMDENLNNLYDTHFEGFFENVRDFLGSTALKVLSNLESRQIMSNSSKVVQIDSEENFLPESLNGLGNLNILYLLLQIDLKKRFFIQEDRSINLLFIEEPEAHTHPQMQYIFSKKIKKIIENIPNLQTFISTHSSHIVSQCNFEDIRYFHTHNGNVKIKNFYLELEEKYKLQTELFKFLKQYITLYSAELFFAEKVIFIEGVSEKILLPYFIKNFDEKNKGKHDYIPISSQNITYIEAGANAKAFQHLLNFFEVKSLIITDIDSVEPVEKDGKINYEACEVKNGVSSSNATINHYLNYNENDPDWFNLLKKRGIKITDKNINLFYQTEENGYHARSFEDSFISVNYELIKKHKKDIFGLKNKYKINDNPENFYDLTDSIIKSKSEFASSLLFLALVNGDKEGDEKIEWKTPKYIYEALEWINQ

SEQ ID NO: 63693 - protein, 697 aa, Acinetobacter baumannii IS-116
MDQSIKAIESVKEIIINNQFQKDGFRNFVLQGGAGSGKTESLKEVIEFISNSYPNQKIACITHTNIAVDEIRSRIKNANLWVSTIHSFLNEQTKNFQKNLQEVLPYIFYIDNSDINDYEDYKKRYEKLSKLNYKLNNRRMDKVVGKRDYNADIINYNNILLGEIKSINSMILEVISSKDFRDIKYNETVFDSINDGTFSHDSLIKVSYFLAEKYSLFSKIISDKFDYIFIDEYQDTDKVLVDLLLKKIATNKKTTIGFFGDSMQGIYDGIGSLDDYIRDFNLIYIPKDDNYRCSQQVIDFLNIIRNDDIKQKVALKKGENLDSRQGSVKIYINKIQKVKSNGRQEDKEKYIALINDAIKKVKEKSDILNLNILQLTNKSIASELKFSKLFKVFEDRYPNLEQTQIESNLKKIQVKDVVDLIFLYKNNRHNDLILKLKKNNLKIKKLDDKINIIARLSYICDNDLGLNEALDYCYENKLLIKSPQRIDFESQSKRHFEQCDSDPVFKDLKTLLERDNLNTYNRAKQHCTYDIDQYDYDDFMSSYRKIKFSDSLLSNNLLLSEVLNYFNYIEENSNSDEKYLTMHKTKGTGIENVFVVLEEFFWSNYSFRSIYDSSYSNFKVKEKSEKLFYVACSRTIKNLMILINYETNDELELIREKFSGFEIIELNSSDTNLLITNPDVENFILPAAIESNIQVSI

SEQ ID NO: 63694 - protein, 556 aa, Acinetobacter baumannii IS-58; identical to SEQ ID NO: 62630

SEQ ID NO: 63695 - protein, 593 aa, Acinetobacter baumannii IS-58; identical to SEQ ID NO: 62631

SEQ ID NO: 63696 - protein, 734 aa, Bacteroides fragilis HMW 610; identical to SEQ ID NO: 63492

SEQ ID NO: 63697 - protein, 632 aa, Bacteroides fragilis HMW 610
MITDYDNCLDDKVDEELLACLNLQNPKSFFLFAGAGSGKTRSLVNVLEQIKDKYGDELKLRRKNVAIITYTNAACDEIIHRLKNDPTFAVSTIHSFAWELIRHYTADIKNWLRNTLNKEIDELEIEESKGRPGTKTSVDRKRKIENKKNRLSTLDRISKFAYNPNGDNIEDNSLSHTEVISISAFFLENKPLFQKILIQKYPILLVDESQDTKKELINALFMVQEKNKNFSLGLFGDTMQRIYTDGKENLGTNLPNDWYKPEKKLNHRCPKRVVTLINKIRSDADGIEQLPRTDKEDGFVRFFIIPSDVDNKIAIENAIKQKMAEITGDDLWINSSDEKAVKTLTLEHHMAAKRMGFDDLFASLYKVERYRIGLLDGSLPGIRFFTQFVLPLIEAKRNGDEFAVSRIVRLNSPMFKRENIKLHEKQTDVIKSANTAVNSLFSLWKNNDNPKLLDILNNIAKSKLFVIPDSLKVIAQRTDKDSVIVDDSSKDIDESIAAWDEALSTTFEKIIKYNDYISDKSMFGTHQGVKGLQFDRVLAILDDDEARGFLFSYEKLFGAKETSDTDKKNMKVGKETSIDRTRRLFYVICSRAMKSLAIVAYTNNVDAVKNTAIDNDWFTKDEILPLDLLAIK

SEQ ID NO: 63698 - protein, 734 aa, Bacteroides fragilis HMW 616; identical to SEQ ID NO: 63492

SEQ ID NO: 63699 - protein, 632 aa, Bacteroides fragilis HMW 616; identical to SEQ ID NO: 63697

SEQ ID NO: 63700 - protein, 591 aa, Proteus mirabilis WGLW4
MSILINCVRISGFRGISEVEVELGRVAILLGTNNAGKTSFLKSLQLALGDYQRYFSDEDFHIDSTGRKVDEVIVDLMIIPTNSMYIRADEFDDKWVDVFGDNIALDANGKDFVAIRTKVQPDEIKGGFNTQRYYLNEWTEFDIWKNVTPSERKKVRSKIDAIPYICIEAQRDIHNELKDKSSYIGKVLSYIKYEDDDVATLEEMINSINETAVSKSEPLQSLKDSLQGLNESFLGASYTEITPFPKKIRDLSKQFSVHFGDEENHSFSMEYHGTGTRSWASMLTVQSFLGFMHERHDNENKALHPIIGAEEPEAHLHPNAQRTLFKQLTSSQGQIILSTHSPYLSAMAEIEDIKSFIKKTDGVTVSCLKKRIEHDEKNAIKREIMLTRGELLFSRALILCEGVTEEQLIPSMFELYFGKTMFSVGVNCVSVNGKNYPPFIKLASNLGIPVCIISDNDGNTKDEITRQINRLEKQDGLNLNSSCFSLNFLENNNDIEAELYNELNIHDEIINSLVLSETKASSNQQYLEAKRRQLEELSDTDIIAKMRDSKASYAGYLGPILVENANRKEFKELLPSSVITAFDMVKGWLEL

SEQ ID NO: 63701 - protein, 632 aa, Proteus mirabilis WGLW4
MTDYLSLPQKNIVNAPMGTAIQVLASAGSGKTRVLTERIRYILDNSERGSVIALTFTNKAADEMLERLDDGSENRERIWIATIHSVAQRVLDSYGYTIGLPKELHIFEREQDRMEVFLHSLKEQGIDIDSYLNIEDAKEKRNREKLLSQYLNVFSEIKREFLTEDEVREKYKSNPRIWNIYQDYQSALLESGGVDFDDILLYSHKILLNQESVSRIYQKKYIALFVDEAQDLNRAQYEFIKVLCGEKIKNIMMVGDSNQMIYGFNGSSSDYFIKSFGNDFSPVIYRLKENYRSSRAVIELANKIKPNSQVSINAAIDGFKTFKVLEDEQSEAVWVCDTVENLLKLKKHPEIEGDIDCSKMVIIGRNRFVFKSIEDEMKLRGIKYFLKRSDRNEQPVSFIGKLIDLAIKIKINSKDWVDGRRLYKLIGIEQFTKINNDYKISEIIKEVNNSNVDDKSLISLILDYVENLSFESPNLLKFCSELKSNLINLGAAVNDSSKEDDIALGIRDIEQLQSMWGRFKRKGLGDNLSSFRNALALGQLNNDALGKGIMLSTVHTMKGLEKDIVFLVGMCEGVFPDYRAKSNIDLEEERNNVFVAITRSRRWIYISYPEKRMMPWGDYKYHAASRFYLDMQ

SEQ ID NO: 63702 - protein, 650 aa, Aeromonas veronii AMC35
MFIERLTLTNFRCFGAETNIDLTPGLTTFIGANGSGKTAVMQALQRLFGITGDQRHIRRQDFYVPADEAVAPLQRHFSLEAILAFPELDTDEVGAAAIPEFFQQMAADEAGRLKCRLRLEATWTDDGSLDGAIEQKYWAVRAFGEFTDDECVELKAVDRARIQMIYVPASRDGSSQVTSFLRGRLWRAINWSQGVRDTFDEAGMTLNGAFAGEAAVDVVADAVRRRWQEVHTAGTDTTPLFRPVDLHFQEFIRKVEVVFRPDEAGRERALDDLSDGQRSLFHLAMTAATLDVENSIAGDPVAAGFQPGGVPLPALTLIAIEEPENNLAPFYLSRIVRQVEDLTVGSRAQAVVSSHSASILSRVDPSQVRHFRLDSANRTSLVRAICLPEGLEEESKFVREAVRAYPELYFARFVVLGEGASEEVVIPHLAEAMDFDIDRSFVAVVPLGGRHVNHLWRLLSELEIPYATLLDLDWGRDGGGWGRIKTACTQLLENGVAPQALFGQQLDPDGPDANLARFDGLPAENMAWMQEWTNWLRRFDVFFCAPLDLDYSMLCAFPAAYQVIEPGRQGPSNQGDPRIAVLGETGRRELYGADQEASLRWYRYLFLGRGKPSTHVRVLSSQASETLAAGAPEELRALLMAINARLEPAN

SEQ ID NO: 63703 - protein, 626 aa, Aeromonas veronii AMC35
MALIRPENWRPRGIEDLEPAAWRALRHEGSACVVAGPGAGKTEFLAQRAAYLLETGICPAPYRVLAISFKSDAAENLAARVRKRCPPDLANRFTSLTFDSFTKGLVDRFQAAIPVAWRPTRPYDVAFPTRRQVEQSIARARQNAAVQWQATIGGYTSETFESHKVGAYRLPIARNAPHSAEEFAIHHWWKEQLERQPNSGLTFVSLNRLAELLLRSNPHIRRALQHTYPFVFVDEFQDTTYAQYDFLLSAFGGADIAVTGVGDDKQRIMTWAGARTDSFDCFSEGFGAVRIPLLFNFRSSPDLVRIQQVVARALDPDAPQAVAQAQRQVDGDVAQVWNSRTRNRETTHLARWIVNDMANRALSSRDYAILVKQRADDFEAELAPAFAQVGLRIRNESHALGRTTLQDLLSDDFAKIAIGLLRLGASRRAPAAWQLVSSALWVIRAIAPDDELGSMRIETELSRFIATLRADMAHCPPSVANANVFANRVVEFLDLAALRRTYIEYASSDLLNIMEEAFHLHLAASSDAADWIGCLDAFEGIDQIPMMTVHKSKGLEYDTIVFVGLDDQAWWAHRPGNLEGLATFFVALSRAKQRAIFAFCQERGQRQRIAELYRLLTDAGVPEMVI

SEQ ID NO: 63704 - protein, 591 aa, Aeromonas hydrophila SSU
MNILIDKARIAGFRGIENVEISLPRVAVLIGANNAGKTSIIKAMQLALGDYSRYLTEEDFYINDDDHVAESIIVDVRIIALDTQGERAKIFEAEWIEEFEDIIQSEPDGAQFVIIRTKCERDKVKGGFLTSRYWLDTWPEFSVWMSVNTISKRQIRKRFDALPFISIDAQRDIHQELREKTSYIGRVLASVEYDDEDVKELERMVADINEKAISKSEPLSELKIHLDTLSQSFEGNGQTDITPFPKKIRDLSKRFTVHFGENENNSFSMEYHGMGTRSWASMLTVKAFTELSARKHAEEVEPFFPIIAAEEPEAHLHPNAQRTLYQQLKSSKGQVIVSTHSPFLAAMSALQDIRSMVKVHERTVVKQLPHVFDAEDLLILQREVMRFRGEVLFAKAIILFEGVTEEQIVPAMFEHYFGFSSFSAGVNCISVAGKNYAPFIKLGCSLGIPVCVVGDNDGNARASVEAQLVNIRRDTGLMLNDQEFNIYFLSDNNDIEAELVNELGIVPELVEALVLSETKGSGNQRYVEAKQREMLALDKGALLMKLRGAKASYAGFLASVICNNPQKRATGELVPIAFRNAFDQVKRWIES

SEQ ID NO: 63705 - protein, 631 aa, Aeromonas hydrophila SSU
MIGLSKTQADIIYSSIGNPIQILASAGSGKTRVLTERIRFILDNTKKDRVIALTFTNKAAEEMQERLAEVDDIEDRAWISTVHSVAQRILEQYGHTIGLPSELHIYDRDIDRMEVFLQSLRDDGIDIDNYLNTGDSREKKNRQQVMQKYMDKFSIIKRELLSKEEVEERFSIESGIWKIYQDYQSALLASGGIDYDDILIFAHKLLLTQEWVADLYRTKYKHLFVDEAQDLNKAQYEFINVFCGGKIKSILMVGDPNQMIYGFNGSSEKYLTKQFVEDYHPIQYKLNENYRSTKAVIRVANKLKPHSQTEHVMALDGLFHLQSCVDEHVEALWVVNKINELLRLANHHEIEGEITLEKMVIIARNRFVFKVLMDQLEKENIAFHFKKAERQTEPTSLFGKILDFSIRLKLNPKDWVDGKKLCALLKISPPIDWKGENLLSVWSRAVSNVDILFPDLQSELLEKVDKLDSEEPNIPKFCKELADKLALLANEAKLDENKSEIELSIKELDEFRHAWTRFKMKGLGSSLQAFRNAYALGQLAESAQGAGITLSTVHTMKGLEKDIVFLIGMCEGVFPDYRAKTIQEFEEEKNSAFVAVTRARRWLYITYPQKRTMPWGDIRYQTPSRFIRDLS

SEQ ID NO: 63706 - protein, 689 aa, Alcanivorax pacificus W11-5
MKLRHAKIKNFRLLADVQLALEDLTTVVVGRNNSGKTSLSEIIRRLLAEGSAAFQLEDFSSACYDRFCTALEAHNNGQDDDVVRALIPFIELRLTFEYDPAQPQLGPLSPFVIDLDPDCNEVLAVVRYELKDGQLAQFFSGQPDTPLTDETRIAFFRSLRERIPTSFAVRVWAEDPNDAENNRQLQPSALKALIKTGFINAQRGLDDITSRESDVLAKTVELLFATASSSSADEADKQIAQALKEAVQDIQSQIDSSFGGQLNNLIPALKNFGYPGLGNQELHTETLLDVRKLLSNFTKVRYAGYSGVTLPESYNGLGARNLIFILLQLAGFYKSFLAEPNSPGVHLVFIEEPEAHLHPQMQEVFIRQLAKTAQLLVEGTESKTAWPVQFVVSTHSSHIANEAGFESIRYFLSGEVQGAAAGVRQTRVKDLREGLDGVSEPDKKFLHQYMTLTRCDLFFSDKAILVEGLSERLLLPAIIEKLETAEPDRPKLSSQYVTTMEVGGAYAHLFFGLLRFLELPTLILTDLDSVEKPGGSACEVHKGTYSSNACLKAWFSDDNPFTLNGLLTKDESEKAKHGNCIAYQCAEEENGPCGRTFEDAFILANRALFGLNGATREELEAGARSQASKIKKSEFALKYAIEEKAWTTPKYILDGIRWLAAGIEPAIPDPALALAAEAMIANEEDAADA

SEQ ID NO: 63707 - protein, 579 aa, Alcanivorax pacificus W11-5; identical to SEQ ID NO: 62643

SEQ ID NO: 63708 - protein, 699 aa, Celeribacter baekdonensis B30
MITLSKIHVRGFRLLEDIEMSVEVGSTVIVGRNNSGKTSLTEVLDHFLGEQAGKFRLEDFSAGLRSAFISSKVDRDTGVLPASELLEKLPAISLDLTFTYGKGGLGPLSPFIIDLDPACTTAIARIEYSATIATIGALLDTPADPAVPLLIEPAPAAEPVVPVDPNTAFFRHLRTAIPDAYTLRVSAIDPTDPTNRRTFQSASELTALIRVGIVRAQRTLDPGKKGDPEVIGKLLSQLFRTANSAEAAQSDQDVVAQLKKSVSHVEAAMQSGFDTQLKGLLPALGMFGFPSLNDTELRPHTTIDIESVLTDNTRILYSGFDGVHLPEGYNGLGTRNLIYILLQLEAIHKVYRGLPTRPAVHLVFIEEPEAHLHPQMQEVFIAKLNEAVGALSARYPGDGVWPAQFIVSTHSSHLANAAAFEAIRYFLNVSTPIAGVRRTKVKDFRKGATKIPEPDRKFLQQYMTLTKCDLYFADKAILVEGATERILMPRIIRMIDKGIDAAKCLGSQYITTMEIGGAYAQKFFPLLEYLELKSIIVTDLDAVRLEGGRHRKCLCAEAGGTSNSALKAWFDKPDIQVTELLAKTPAEKTRGFYRIAYQIPEEGSAHCARSYEDALILANLADFGIAADADTASKAWEVAKGFGKSEEAIRFAVKEEDWNVPRYIREGLVWLSEPPPPLPPIPPLIEPPATIEVAAEAEE

SEQ ID NO: 63709 - protein, 580 aa, Celeribacter baekdonensis B30
MIAAVSPAVQAAQAAQARVSECLDAGQNFRLEAGAGAGKTFSLVEALKKIIAERGPTLIRAGQKVACITYTEVARKEIAQDIEDHPAILVNTIHGFAWSFLTQHQKALRELVIGLESERELEAIAAGGGVKDQIVDYNLGFFGIDDKRITLHHDHVPKFFAKLLAKEKSRRLFTDLYPVLFIDEYQDTDPHVMSAISEHFFTAGEGPIIGLFGDHWQTIYRNDFELTNFPDVIGIDKGANFRSVPAVVNVLNKLRPGLPQAVRDPKAPGEARFFHCNDFKGARRDDSPHKLDLPATDHSAVVERLKEHLTADGWDFAPKRTKVLMLTHNAIAAKQGYPRLAKVFKYNDAFAKKEDAVIAFFADVVEPLCEAYEAKRFGNMFAHLGRAPTIRSLDDKASWVKDLDKLVELRLNGTIGDVIDFLRDSARPRLTDRIMEREDEIKKLGPEPTDGESNTLKNHRALRSVPYAELIEVNRFVSGHTPFATQHSVKGAQFENVLVVLSGGWAHYNWHRFLDQLHTGAIGPKEEGGFYRARNLFYVAISRPETRLAVLATQTLSPAALSAVSHLFEPGNVSAIPFPN

SEQ ID NO: 63710 - protein, 583 aa, Serratia plymuthica A30
MYLGKLKISRFRSCDDVTVGLRPDLTVLVGENNGGKSNVVDAIRLLTLPLSGRRERYPEDEDVRRYSTVPSFQIEGAFQGLSDTLKGLLISAVPDPTKSEATFGYRYESRSEHAPRGKTTVWAGRFDTNGPELGSSELIRHVYLPPLRDAHQVLGTSSGARVMALLRNFLPKEREQDFLAGVRRADNRPEILTTINTDISTALGLLTNGVRPQIAALDFGSETLLDVARDLRFRMADTGLIPEDIRSSGLGYSNLLYMATVVVELTKAKEADLTIFLVEEPEAHLHPQLQVLVLEFLLDQARQSASRIAAPGKPEGRIQIVVTTHSPNLTAWVSPRHLVVMRSRHREQDGIAISESVSVPIAEIGLKPKTLDKISRYLDVTRSALLFGNRAILVEGIAEALLLPVLAQKLVLADDLDGWLRFKGAVIVPIEGVDFRPYVEVLLRPYGDARIADRLIVITDADPTVLGNRKVDLENLAATHGAPDALIVLTNQHTLEHEIFDAGNESFLKSVFLRLHRNSRRDWEAQIEGIPEQDRPNAFLKLIEAKKTRKGDLAQAMASRIEAGEPFVVPPYLIDAIRGASRI

SEQ ID NO: 63711 - protein, 591 aa, Serratia plymuthica A30
MTGIHNLTPEQETFASHIGGAFVNACPGAGKTRTIIARLARIAAKLPSRQGIAILSFTNSAVDEFRERCLAAGLDTLLKYPSFMGTLDAFVRHFVVLPSCAVSSQTRPIILDSWDTLGVEIRLSGQFAFRGEPVSLDLFDPETNIIDPDRIGHAGLQNHVRQHQIRYQQAAANRRRSLLQAGYMSAGDARAQTLRLIRDNVIGESLARALAARFQEVMVDEGQDCNPLDLQILTWLRAHGVNITFVCDPDQAIYEFRNGNPQGIQIFKDTYPIASHKGLTGNFRSSPAICQLAATLRREGQVDRSLGESANVDYPILLLTYGGRGPTEIIGQAFLGRITELGLDSTNAIILAHSSKVALRASGVTSSNSTGNSRIESLARKVSEFWSPAATPRTKENVVQSVEILLLDLMGGRQPNEHLIKAIERLGMDRRAHRRCALSFLINLPKTCRDSDEERLAWIACVHAEMEKLHLPLPAGVSVRRFFRQPPNAQWSKHLQVPAALGFACGNIHEVKGREYDAVCVVVPPNRAPENRIEALFESWQARVDAEAKRVLYVGLTRARNFVALAIPNAFAGRCVDLLATGQVPYTRVDL

SEQ ID NO: 63712 - protein, 712 aa, Klebsiella pneumoniae subsp. pneumoniae WGLW5
MHISKLSLVNYRNFPNTKLLFQKGINTVIGENGSGKTNLFRAIRLLLDDNMIRSAYRLEHTDFHRGLGRWQGHWIIISLEFEEISADESVQALFRHGTGVIEEEANGKATYNLIFRPKKEIRLRLSQLNDGDQAGLDAILNPVTIDDYETIFTGRSEADFNDEAFYKDVVGDFANVRFNEEVEFRVIGAKIPNVLSVSKEISFTFVQALRDVVSEFHNNRTNPLFSLLKGKSGDIDPVAFQAITDGVKALNDSIEALPDVQVVRTDIRDTIKDAAGEAYSPSSLSIKSDLPDEADKLFQSLKLFVGESGESHEGPIHELSLGGANLIFLTLKLLEFKYQKAKQSIANFLLIEEPEAHIHTHIQKTLFDKLKYDDTQIIYSTHSTHISEVSNVQNVNILGREGDRCEAYQPAIGLNPEEIGNIQRYLDAVRSNLLFAKSVLLVEGDAEEILVPILIKNVLGVSLDELGISLINIRSTGFQNVAVLFDDARIRKRCSIVTDLDKSIIDTTPAAGDSEGLLRRKGKYQASQEKGVARKALLEDTFKDNGWVSPFFAPHTFEVDFIAAGNARKVVGILPDVYKDAPTIATAKAELESADIALFGQRALTMADNYGKGWFAILLGKKIDPQTAIPKYILDAIAFAHPVVTKEVWFNVLSYRVNYIDAEDIFTASAVFDDFRAKLLAFRNGDIDFVGIRNEMLATFPDDRINDVLAVF

SEQ ID NO: 63713 - protein, 599 aa, Klebsiella pneumoniae subsp. pneumoniae WGLW5
MFMWNKDDLNPEQEAAILKPGSVFLIACPGSGKTRTLTYKIAYELSRLKSNKQFVVAITYTHRAADEIHERIESLGVDTSRLWIGTIHSFCLEWILKPYGIYHEALDRGFRVIDQHEREKILEALCKPYQKPKITFWDCEFYYTETGYVLSCPQDWKHSGLHVILGKYFEILHESRQLDFELILYYAYQLIARHPAISTLLAQLFSFVLIDEYQDTKRIQYSIITAILKAGQGATKAFIVGDPNQAIYQSLGGYPIAFEDFKAMANIDLDELELSRNYRSSERIIEYFGNYNVHNTRIEAASEDKAYPSLISFDDTVSKNDLDAELIRLIRFNIETMGISPHEVCILAPQWTHLASMTRRLVASMPEYSFDGPGMVPFARDTENFWYRLSKIALTQASPGMYVRRLRWAGEILNDLEAAGASVSKLTRRSLLRECNAIKIDETDGLTYLSAFFERLFANLAIDFRLFTLLQEHHVAFFDSSQARVNRLKSEGSEFIGDIETFRKVFQHRTGITISTIHGVKGAEFDAVIAYALLEDMVPHFNDPNGQESAMKLLYVIGSRARKNLHLVSERGRVRQYSGEEYQVTRKLASCSFGYDQIP

SEQ ID NO: 63714 - protein, 616 aa, Herbaspirillum frisingense GSF30
MTIYAIESGVAITDVRVSNFRSLTNIEVELGDLTVLIGANNAGKTSFLDALYTAVGAGRKTFSSEDVRLAKGEALPPKDRQITVDVRVRPVGDDGEVIDKFPAGSFWTSLWGSLFAFDDEFNEFIALRVTMAWSIAKADYVVERKALKEWRPFADWLTTEVHDRNVTASLLEPLAFHYIDAKRDLDEDLRKQGSFWRRMTDELGLDEADIAELEETLSSINQQIVDKSEVLKHLKDSLADLQVVVAADSAGIDISPVARKLRDLSRGIDVSFSTSGAQAFPLARHGMGTRSLASLLVFRAFASWRNTRVVASGDKIHSLLGLEEPESHLHPQAQRSLFSHIKDISGQRVVSTHSPYFAGQAQLEDLRLFIKNGGETSCTRLDLTKLTKLDDKRKLQETVIESRGDILFARAVILFEGQTEEQALPIWAEAYWEATIHELGFSFVRANGTDYFPFIWLAKSLGIPWYIIGDGEAKPVSDLEDALKKADAPAINDSKNIVIFPNGHNFETKLVSEGYLAEIEIALDEMSERKNYLDEFMKKHHGKAYPKGRGNRDYESDGARLRAAADAMALSKTRVSKPVAKAISGLEDEGRRFPEEIRSLFEVISRDHGLHIREKK

SEQ ID NO: 63715 - protein, 572 aa, Herbaspirillum frisingense GSF30
MTERVRTLLTEVPGHFRVLALTFTNKAAEEMRDRLSDLGSERQRAFIGTIHGFCLEMLAERGKFVGVEGTPNIFEQFKDRKEILLKAIKEDPYLDEELNQTVDPKERGKRVDEWLQMISRVKAHPITYAVIEEELTRRVIQAYDAGLRACHAYDFDDLLLLTYKLLSENPKLADFYRRLYNFVCIDEAQDLNEAQYAVICALCGDHLKNVMLVGDPKQSIYGFNTSSPEYMYRFETDFAAKKINLTENFRSSQAVVSMARKLDSNYLVEAQIPIPGELQIIVGNDEEDEAKKIVEKMSFLFANGHTDVEGKITPSSCAILGRNRFVLLKIEAELQSRNIPFFRRVTSNHENESETVDEFQLALRVVANPKDRLHFAALAKKWKVSDPESTLDSLGALDGMATMSGNKNALPIVHAVRAIVNSSDRLDLMPAFSSLRSHADSLDENSRRAIYEDVAVFEQEWDQYLRASSTGRTLVGFMSSKALGATQHSQKEGVALLTVHSSKGLEFDVVFIAGMCEGVFPDYRAKGKALEEEQRNAFVAVTRSKRLLYLSYPKMRMMPWGDNRFQSPSRFL

SEQ ID NO: 63716 - protein, 696 aa, Facklamia hominis CCUG 36813
MILKRMKVKNFRLLKDFELEFKEELSLVIGKNNCGKTSALIILDKMLNSSKVMWEDINLECQKEVYEKVIDYDISKHENAKSLETISLQLFIEYDDNDSYENIQKFMMDLNPENNTIVLEFISLIAVKKIIELNNFISEKNIKDFKSFSKFMSKNFANFFEMKKYSRGFDIESNQITQDRSEEIDNKDIQKVIKVAGIRADRAVSNDDHNHVLSGLTGKYFSSYKAAKDESESVFTRLEEKLEAADDELYKIYNGDKSETGEVIEGIFSNVIDVIKTYGGAENGIDIAIESSISEKNLLSDNTNLSYRQGGDYSLPETYNGLGYLNLIGILFEIETKIQELFEQPADINLLYIEEPEAHTHPQLQYIFIRNIKSHIKEHRKNLLEDKNKQLQILITSHSSHIVSECNFDDIIYLKKNGNTVIAKSFNSLKEEYGGDEQKGFQFVKQYLTMNRSELFFADKAICIEGDTERILMPMMMHKIDNKEKPKADLIPLLSQNISIIEVGAHSHIFMPLFSFLGTKVLFVTDIDSVKAEKKIDKNGKERTVYTSCHPEEGTNTSNASIKEFFKDTGIDTSNNQFKELVGKNAEDKIKDNMRIAYQIPESDSEYQASSFEDAFIALNKDFILKNKEGFYQYGALKDFVADEIESGDYYKFALDNVKKKSAFASSLLYFNKEDGNDDEKWKVPHYIEEGLLWIQ

SEQ ID NO: 63717 - protein, 635 aa, Facklamia hominis CCUG 36813
MDTVTLEKEVLEALQCIKDGENFILEGGAGSGKTYSLISLINALTEELPDIKIVCITYTNNAVAEILSRIENENIWVSTIHEFIWSLIRKYQNEIKNILVELINDDNEKNFKKPKDFSEDLISKEYFENLYVDYDEYYSVTANDENRVKISHNHILIVAEKMFEKYKKIADILKDIADCIFVDEYQDTSPLVADILLKHLEQSDKKNVIGFFGDSMQSIYDDGVGNLNQYNLTKIVKTQNRRNPRVVIEVANKFRDDDIEQRPSEDINAPNMENGTIREGSIKFLYGTEINDFISVKGKNIFESWDFSDGKQTKELRLTHKYNAEMTGFKDLYDLYNADLITKLISGIKKKIDKGNLDCNKTLGEIALEVKPTYNKAELLDQINGNEIYQSIYSVLEDMSWEEAYEKCRITKESLMSYKLNGMSGRYEANSYRDRILRRLDILEEIIELYEANRFNDFLRITKFSIHNRNDKICLKQAIDYLVSEDNQTIENVLKFAEVKGLLKEDELFSDYISNKGFYLWERIKKITFNQYRKSVLYLKEFSPICTQHSVKGSEYDNVLLVLESDWNKYDFRTLFGKGSPNSNVQKRTKKLFYVCITRAKKNLIIYMPTDDSDILEKAKEYFGEENVIDISSVK

SEQ ID NO: 63718 - protein, 636 aa, Lactobacillus crispatus FB049-03
MRLKTLLIKGFKSFNEETKIDFSKETAFIGTNGSGKTACLLALNKLFSYNASDRIIHESDFYINSANQDSQSRDLYIEAVFELDKANKDEDKKCEAQYWNRLIIKNGQDKPLLRIRLESTWTNSGIADGTVDTNIYFMTSLEDNNEENKIVARRSELSSIQFIYVPAVRNPERQLSNTSDGMISQLIKRVNWDDEIKQKIVSISSQLNDTFWDEKGSKLIQDTLNQEWKSLEPNSRFSNVKASVSSIDINKIMSRIRFEFNSNVTNNVFSVDEMSDGIKSLFYISNIASVLAIENTVQEDDIKIEYPVVTIFALEEPENHISPHLLGKVMDKVKSITKLDNTQTIITSHSPAIIKRVLPENVRYFHLTKDAVTEVKKIKLPDDKGEKYKFIKRAVQTYPELYFSKLVILGEGESEEIVLSKIISSYTGLDEANISIVPLAGRMVNYLWDLLESLNIAHITLLDLDYGRYLGGKKRIKDIIDELKRFNPNDDELEKIENKCADLAENKNNLLDLTKQLEKYDVFFSFPLDLDFMMLAAFLDKYKGIASGSPKTKADERKKILDRTLKGKREEEVDYDKNDIELMRWYNMLFLGIGKPLVHFTALEDISEEELCNNLPEQLKRLLESVKNKLDKKNDE

SEQ ID NO: 63719 - protein, 620 aa, Lactobacillus crispatus FB049-03
MMNKDQWKPSNGIVLESNAKQAIFTNDNILVQAGPGAGKTELLAQKASYLFQTGLCPAPFNILAISFKRDAAENIKDRVSKRVGKEEGSRFISKTFDAFAKLIVDRFYLVLPKDLRPRPQYEISSNSTQTKIYEHAFGYVPDRNAVNDLLKVDLNDINPQSNNYKFWKYMLMGEEKTYLTFEMISRLALYIIQHNKYVRHIIRSAFPFVFLDEFQDTTVLQYDIFRECFLNSESKITAVGDNKQQIMLWAGADKEIFGKYTREFRATKVFLKENHRSALNIVKLQKLMYEKIDKDINPDIIINKNKDEGKVFLIETNEPSKEAEIVGENIIKEIRMGVKPSEIAILVKQRPEDYIRNIKEYLKTKNVTVRVESKYTETFSEPIVKLILKMILASINVINGQEWQELVDETSEIFLINLADAEIEQKYIKKLNVFLDKLFKNLLVQVHENRSKSNYYCKIVESIIDFFTINRLQVYYPEYLEIDQLNRTKTQFIEQLKECGSINELNTDIKEIWKEIIDNYLGKNSIATLTIHKSKGLEYNSVYFIGLEDSAFWSFSNQSESDRKAFFVAISRAKEKLYFTFCRGRQTVRNIYQTKKNIKEFYELFDKSGIVKEINDNNNS

SEQ ID NO: 63720 - protein, 778 aa, Acidovorax sp. KKS102
MHLKKLAVRNFRRLRNVVIDLASDISIFVGANNSGKTSVGHALQLFTGSGRFNIHDFSAELWADIVAFGEGDGEASLPTMEIDVWFEIGPDDVHRVIDLLPSLAWEGKLVGMRVAYAPTNPAATHARYVEVRQRVLDAVAKGEDGAPAFDPSPRNLREFLRDRLHDEYELRYFVLDPARFDAKMVAEAGYDPATLTGRDRSGREILNGLLHIDFLNAQRHLSDGPGGSRAEDLSRVLSRFYGRNLEQKGEDIEALRALAASEVSLNEHLERVFEPTLKSLSKLGYPGLSNPRMMIRSALDPAQIMSGRDGAIVHYALGADDGKPDPPTLPDRYNGLGFKNLIFMVVELLDLHAQWLAIEENRPPVHLIFIEEPEAHLHAQLQQAFIRKVMDILALKGEDRTHYTSQVVVTTHSTHILYERGFRPIRYFRRSRAQNVSTSDVLNLSVFYDSTDPDIRSFLERYLKLAHCDLFFADGAVLVEGNVERLLLPQMIANAAPRLQSTYLTVLEIGGAFGYRFKTLIEFLGLTTLIITDLDSVFGPLGQDGEGAAPAGQPEAAEPAAENAQAAGADAEDIDDDEEDLPVAAEKPGKACIAGHPGAATSNQTLLQWLPKCDTVAALWEATAEQKIQARTDDNDALVRVAYQCRTDVTWGGETLALAGRTLEEAFALENLEWCQDKNRKPLQLRIAKADEKNLTTLAERIHKRVQAKSFSKTDFALALLAEDPSSWSVPTYIAEGLSWLETEIAPPEPDEDQPHEGQPHEDAPQGAPVAAGDEVAA

SEQ ID NO: 63721 - protein, 596 aa, Acidovorax sp. KKS102
MVAGAGSGKTTSLIKAMAHLAETRGPALRRAGQQIACITYTEVAVGEISADVGASPLFHISTIHSFLWSVIRPFHSDIAAWVAIRIDEKIAERRAHYDKPRTQAKTKARLEQEIADLEADLAAISEVEKFVYGTGSSYAEGILGHDDILKLTPACVAAHPLLRQLVAKRFPYIFVDESQDTNPEVVEALRHIAGEHPGLCVGFFGDPMQKIYMSGAGTVPLNDGWAEITKPENFRCPTSVLGVINAIRAPGDGLEQVRGRTITVDGIEQPVAGTSNLFILPADAERSARLAAIRQWLAAETGDGLWLSDVREGDVRLLVLVHRMAANRLGFPNLYAALNDRAPMSLSEGLSDGTAWPLRPLVQHILPLVVAAQAGDRFTVISTLRSECPRLEPARLRGQATAPVLTALQQALDGLVGLLAAGSQATIRDVLTHVRDNELLRLDDRFAMHLVAEPVDDGSSGFENVQAYLACGVDELWAYRRYFTEESPFATHHGVKGAQFERVLVVIDDEEAGFRQYSYGKYLGYVPLSDKDEANLAAGEESVLDRTRRLFYVCCSRATKDLAVVAFVPDVAAARTAIVAQNLFPEAVIRGAEHLG

SEQ ID NO: 63722 - protein, 733 aa, Pseudomonas syringae pv. avellanae str. ISPaVe013
MQRSGNLLLSNFATRLPRIARMHLSKVSLVNYRNFEFAKFVFKPGVNTIIGENGSGKSNLFRAIRLLLDSNIYRAAHELSEGDFFRKKTSWKGHWIVISLEFDDISTDESIQSLFVHHGAIVSGSAVNKATYNLIFRPNSHIRTKLAALSAGDKAGLATLQESMTVDDYEVWFTGRSDVDFTAPARYREIVGDFDNVWFPALDSKLIGTKIPHQLSVAKEVSFTFVKALRDVVSDFNGNRQNPLLNLLTRKSQEIDKSKYETITNTVKSLNLDIEALQDVQDVRGDIRTTISETAGDAYAPASLHIRSDLPSEAEKLLQSLKLFVGEADENYAGDISELSLGGANLIYLTLKLLEFKYQKQRETAANFLLVEEPEAHIHTHIQKTLFDNINYSNTQIIYSTHSTQISEVSNIESVNVLARKGVRCESYQPSVSLTRPEIVHLQRYLDATRSSLLFARGVILIEGDAEEFMIPALVKKVIGVSLDELGISLINIRSTGFENIACVFHPSRIRRKCSIVTDLDMAITGTDILETDSDTVRAYKSKVAGSAESGRTRRTRLENFCRDNPFVNTYYAQHTFEVDLLMADNTHEIKRVVDSIYTDVPTRRTAKAELEDADIGVAGKRILTMANYLGKGWFAILLADNISRATNIPEYILESVLGACEELPCKTKLKILRHRIVTLTTEDYYEEFYNDALLAQDLLVNYENGNLSFSTLTDSLGDLLCEDSVLATFLGI

SEQ ID NO: 63723 - protein, 607 aa, Pseudomonas syringae pv. avellanae str. ISPaVe013
MRIQSWQLSWAFNMVDLSTAGLDDKQLAAINHPGSVFLTACPGSGKTKTLTYKVAAELWKIDDHRKFVVAITYTHRAADEILERVERLGLPTAQLWIGTIHSFCLEWIIRPYAIYEPRLDSGFTIINQPDTEALLEELCKSTSYPKIKPYDCGYHFIDGKVTLLCSDSKKHANIRDVLKRYFATLKKERKIDFELILFFAHKLISSFPVIAKHLSNLFSIILLDEYQDTKEIQYLILFCIFSSRPDQTRAFIVGDQDQAIFNSLGGYAIAFNEFKTKSHLSIESLSLSYNYRSSTRIVEYFGNYRLHPGPITTYSEHKDYQSLICYDRTTSVNHLDDEIERLIRHSLYVQGIRPEEICIIGPQWPSLAALTRRLMSRLPECSFDGPGMIPFGRELDNFWYKVSRLCLSDPAPDMYLRRVRWATEVINALDDSGIKCNHTSKSLLKELNAIQLTEQNGMQYLELYFSKFLHLMQIPSIDTHPSLHNHYLSFFEAAHKKIARAKNDGLQLIEGIDNFKRAFRPRSGITISTIHGIKGAEFDNVIAFSLLDGMVPHWADPKPLDSAKKLLYVICSRARKNLFLISETARGKAATSELARTNYLYDTVPER

SEQ ID NO: 63724 - protein, 690 aa, Pseudomonas syringae pv. avellanae str. ISPaVe013
MQIERVEIRNFRLLQDVSLGLEVGTTLIVGRNNCGKTSIAEVFRRLLSDRAPSFKLEDFSLGCHELFWTAFDALHNGVPRADVAEMLPAVQVTLDISYDIKAPDLGSLSECIVDLNPNCSCARIVLTYGPKPTALDSLFEAIPLPGDEQFDRSAFFNLIKVRLASSYEARLEAVDPNDPINRKSLELRYLNALIRGGFINAQRGLDDDTHRERDVLGKVVEVLFQSALTDPTDPQKRTTAEQLHGAVEKIQKDLHDGFNAGLTSLLPTFELFGYPGLDDPGLTTVTTFDVERLLKDHTQVRYRGVNGLTLPESYNGLGVRNLVYILLQLLKFFREFQATPAAASVHLIFIEEPEAHLHPQMQEVFIRQLHLIKGEFERQLNDSRPWPVQFVISTHSPHMANEARFETMRYFLSAADEHGVRQSKIKDLRQGMGGVSLPDRDFLHQYLTLTRCDLFFADKAILIEGTSERLLLPTMIAKTDSAAVGEPKLASQYVTVMEVGGAYAHRFHDLLSFLELRTLIVTDIDSVKPNEENKRKACPVAEGQFTSNGCLKDWFEPNISPTQLLAKTSVEKTKGARRLAYQVPDVADGPSGRSFEDAFILANLGLFDLGHGDAALLAYRHAADQKKSEFALKYAIEDTNWVVPRYIAEGLRWLAVGAPVVHVQVAVQGMAAVAEAAGQIIATEKGNGDA

SEQ ID NO: 63725 - protein, 585 aa, Pseudomonas syringae pv. avellanae str. ISPaVe013
MLNHQESPADIAGRQALERMFACLHEGQSFRLEAGAGAGKTYSLEKALSLLIEGRGTALVRQGQQIACITYTNVAKDEIISRFQAHPAIRADTVHGFCWSVLKDFQTSLRTFLSGQDFWRDRFEPLGGIGGRRIHYEMGIPRVSDEEVSIRHEDVLTLMIQALPSQKFRAVITSRYPILFIDEYQDTDEQFFEALRSWFLDRKEGPLIGLFGDHWQKIYGSGCGLIEHDALHVIDKNANFRSASRIVDVLNHMRPELLQMVSDPELIGEARVFHTNCWPGVRRTGQGGGHWKGDTSAEAARAYFSHLKARLIAEGWHFSPKKTKILILNHSGIAREQGYESIPPIYGRFNESWLKKEDPHIKYLTDHFEPACAAYAQRRYGEMFKHLASDRPTIRQHGDKVAWVEAMDTLDELRLTGTIGDVIDYLRRIPQIQLPDALVRNEQRLEAAGGEVSDEEPRRVTQLRKLRGVSYRELIALDEFIDGHTPFATKHGVKGAEFENVVVVLGRGWNEYNFAEMLEWCEAEPPANKRARFENNRNLFYVACSRPKIRLALLFTQLLSPNALRQITAWFGDEFVIELPPEPGN

SEQ ID NO: 63726 - protein, 595 aa, Pseudomonas avellanae BPIC 631
MPSLFEYLRDKHNKYFTISRRSLYFDMQTKKEDDEHFVDLDLENINLSKIINFKWISARRNVSNKDADNSLSQLSAKIYKKLEASNPNESVVEEFKDTLTNTDAKLNIVYQKIFEGVINDVKKFGGLSQNDSVIKIVSSLQHRDLLEENTTVMYGLGNNEHDLPENYNGLGYLNLISMIFEIKLKLHDFHKDINESPSDINLLFIEEPEAHTHPQLQRIFIKNIKSLLKPGIKRVDGVKRDLQTILSTHSSYIVSESDFEDIKYFKKTDKGVTSKNLKDLKDYYEDSQHYTFLKQYLTIHRSELFFADKAVFIEGDTERVLLPAMMSKVDQEDLIKELETGVVNNIPLLSQNISMIEVGAYSHIFEKFVNFIGVRSLIITDIDASAMMPVIDKATGQPKLNKKDEVQLRLQKCKVEHGTHTTNASLRFFYKKEDLAFYENLNSSQKTLEKMDDAQWSPSILGKLLCAYQVPEKNMEGEVYHATSFEDAFFHINRVFIKSLAFDEGDFFTGDKKLPSLVQIHLKSFASGATDAFDCAENAITSKPSFAMEILLNSTIKTVSVLNANTTKLENVSIDFSNWNTPLYIKEALQWLKQG

SEQ ID NO: 63727 - protein, 633 aa, Pseudomonas avellanae BPIC 631
MAQTRLALEPEVQSIFDHVDQGKNFLLSGGAGSGKTYSLVQFIRQVLAEDPKKTIACITYTNAAVAEIRGRISAPNLHVGTIHEFLWDIIRPYKAELIDALIFSLKSESPTSIKNPDDKFDPEVLRGAEVQYKEYTRVREAIVSHDEILKLAHGMFSAYPKLCDIAKDRYKFILVDEYQDTSELVVDILLVHFQKSSKTSIIGFFGDAMQSIYDEGVGDLNKYRKLGLVEEVKKLQNRRNPKLIYELANRLRTDGITQEASTDENAPNMSEGKVICGNMKLVFTATDLDKLDEVKDSLGWDFKDVKENKELNLTHNLIAPKAGFAELMLIYDGDKIIAYRNRIKDFIKDGNIEEDFSGFTFGEVIDYLVERFPGNVKDVTPTKGMKPFIDSHQELYQIALATPYVTFRRMYVAKESLIDDKKDDPSATSKAGSKRDALIKHLFKIQNIINLYETGRYNEFLKRTEFKIRSVEDKRLLKKIIDEISAMSDRSIGEVIDRADELGVCKKDDNLSIFFSRSRYLYERVISVKFNEFQNLFRYLEGYTPFSTQHKIKGAQFDNVLVILDNGNWNNYNFKYIFEGAGNESVIERTRKLFYVCCTRSKRSLVVYYRNPSEKALATARKWFGDECVQCID

SEQ ID NO: 63728 - protein, 655 aa, Sinorhizobium meliloti Rm41
MKLERLTITSFRCFGPDGESINFEQGVTAFVGNNGAGKTAIFAALNKMFGTTVAQRQVRKRDFHVGAHIREIASGATLSIDCVFGFPDVDWDDDDAIPEVFNNMSIGGEGEPLKVRIRFEATWTDDGTPEGFVDEQMRWIHTLEDDFDWAGSPRVQAVERNFIQLVYVPATRNAFDQVTSLLKGRLWKAAQWSPELAEAVSRGSERIQQRFDRELPARFIAERLTRRWHQVDRGDTNSSPALRLLDHQMSDLVRRAEFVFEGEDQSYTLGLEELSDGQRSLFHIALTAATLEIERDALAAGGGAPFEHERLRRTHLTLLVVEEPENSLSPFFLSRIMLQAREIGGASNAQVAIASHSPSILARIEAHEVRYCRLDDGTRQSSVREIVLPPEGTEADAYVRLAVKAYPELYFARFVILAEGDSEALVLPRLAEAMGFPIDPSFVPVVPLGGRFVRHFWRLLNGLKIPHATLLDLDLGRKHGGANAIRSIVGELSRVGRNMARNEYVRSGEIDPRDMDGLSDAELLEQDQEHIWLRALRGENVYFSSPIDLDFAMLQLFAQDYQIVRSGGRGPRRGRQHLERKRAITLKTDGNPQLYEDFGDDFDASFIWYPYLFLSSSKPESHIMALSTVDAARLRRDAPSELRSLLNKVARTILP

SEQ ID NO: 63729 - protein, 622 aa, Sinorhizobium meliloti Rm41
MTLVRPDDWWPQGIDELEDRAWEAVRETDRNVAVTAGAGAGKTEFLAQKAAYLLQTGLCPAPKRILAISFKRDAAETLSKRVERRCSEAQARRFNSLTFDSFTKGLVDQFRMAIPADHRPPANYEITFPTAAIINDFLRRANVRRINAKQMTSFIERARLPIATLNTREYVKLALERYWDEQYSGPTTFLTFAMLNRLADYLVRSNAQIASALRKTYPFVFLDEFQDATPAQFGILMNAFDPNATIFTAVGDGKQRIMGFAGALPDAFATFAQSCNPREIQLLSNWRSHEDLVTVQHRVARQINPNVERVAARRARVVDGNVSAIWVFDNRAVEITTLAAWLAKEIIDRELPAERFAVLVRMLADNVENELRPALAEHGLILRNLARNLGGVPIQDTLVEPLTQLLLPLIKLGAVRRDRDAWSKTLKNLRRLSGAIDDDEAALQRLNARAETLIKSTRRFMRENPANAELADAIVARLINEVGEQEIKTLSASYQRERDFDRIKEGLVALFRESLENARSWSEVIDRLQGKDQIALMTVHKSKGMEFHTMIFFGLDDRSWRSLEQASPEELNAFYVALTRAQQRAFFTTCAARGHRIEWLEDMLGDDVVRVDGETILDVEDL

SEQ ID NO: 63730 - protein, 556 aa, Acinetobacter baumannii IS-251; identical to SEQ ID NO: 62630

SEQ ID NO: 63731 - protein, 593 aa, Acinetobacter baumannii IS-251; identical to SEQ ID NO: 62631

SEQ ID NO: 63732 - protein, 705 aa, Acinetobacter baumannii Naval-72
MKLKKITIQNFRRLENVTIDIEDKETIFVGPNNSGKTSATAIFKCFLGGTDFKIYDISASRVADFESFLHSNDPSLLPEIILDLWFSIDPNTIAFGRVFTLLPHLSDFTEVGLRMSYTIENPIKLREDYEAAYPIEQTGNRAKSLFQFLAIDKKLNHYFSTNYYSLEKDENENSEIIETATLLDRNDAKKLVSQLIKVEFVDAQRNINDDDSNRSNRLSTAFASFYKKNLEQSNYAAEAHEVINNNNKQLTAHYETQFSPLMTLIKGLGIPSVNDRELRIISSLSPESALRGNTELIYVDPNQGHDLPELYNGLGFKNLIYMAIQARHFHSQWLITPVNRPLCLLIFIEEPEVHLHAQVQQSFITNIWNVINESIASPDQAHLVPQIVVTTHSSHIIDAIDFEKVRYFQRSYTTRQTDQTGIQNVSNVMSLRSFQPQIITPEEGVQISPEESIAFLKKYLRLTHCDLFFSDAAILIEGAAEKLLLPSIIESSAHRLKSTYLTILEVGGAYAHRFEGLLEFLKIPYLVITDIDSIKPDGRSACRANIEGARTSNASLKHFYGIETIADLMAILPDNKIHKERDRCVAFQTEILVNHNNNQKNMLPRTLEEAIAYENFGLLHSGGLSIGIDIPDCLDSAYDQIYKRICSDSFKKTDFAMDLLARSSVWMPPKYIVDGLLWLETRLCGPTQILEIEQNTVTLAEVEQA

SEQ ID NO: 63733 - protein, 611 aa, Acinetobacter baumannii Naval-72
MITRIETTADNEIKACLANNQNFALIAGAGSGKTSSLVDALKQIRENEGKNLRQNGQFIACITYTKRAVEVIKSRLGFDDLYTISTLHSFLWNLIKTFQSDIRKVLKEVYLPILIAKNKSKDNGGDSQTAIKARAKAYKLELELSKIDTVKNFNYSDNQFSDYSKGQLSHDDIIEISIILLKQNQTFRKILGLRFPYIFIDEAQDTYLGIIEGLNLVCAEDGLPIVGYFGDPWQQIYDDSAGNFSPPANGKIIKKTENFRSSKSVIRLLNSFRKDVSQYPAGENKEIEGSVIFRLIQTEPPEMPKNKYSEDQISRALLKMDSALEEWGWSKQNDVIKLFLVRQMIARRMGFSELNKLFNGPFSSSRSEDAFEAGEHFALKPIISTIYPLITAKNNHNYRDVIDILRNNSPAFSIDGLNASRSLKVMIDHSNSLILELENHWNSSNIKKVLEFCVSAKIINISERLMEHLERPPRTEIYDEKIHEQEKEDWLMDQLFQMNTNEIGAYATFIAKNSSYSTQHGVKGEEYPKVLVVYDDIEASWNNYNFGKLLTPTVSGIPTSGQQARGEKLAYVAFSRAIEDLRVIFFTPNPEMAKNELISRGLLSEEQIQLA

SEQ ID NO: 63734 - protein, 556 aa, Acinetobacter baumannii IS-235; identical to SEQ ID NO: 62630

SEQ ID NO: 63735 - protein, 593 aa, Acinetobacter baumannii IS-235; identical to SEQ ID NO: 62631

SEQ ID NO: 63736 - protein, 634 aa, Acinetobacter baumannii OIFC110
MKLDTLRISNFQSFGKEPTEISLDDISYLIGPNGSGKTSTLQAISRLFCFDPSLRRIQKTDFHIDPNEEIPPPQRELWIEANFSFPELLEDGEHSTIPEFFNQMRLDQEEEIPRVRYRLIASMGIDGDIEENLYYILDVDENNEPINKTLVPRSDRNQIQAHYLPARRDPSNHISFGTNALLGRLLRAINWTSERADINSLSEQINSCITGNSSISSLCAKLDESWKYLHTGNFFTNPKISFGNSEVEALLKHMSISFSPGHGETNVDYSRLSDGQKSMLYLSLVLSSITLNRAVISGEETAFDIDKLNPPAFSLILIEEPENSLSPHYLGRISNVLKKLLGKDTQALIATHAPSILRRVAPEKIRYLRLNSESRSTNIKTITLPEKTGDAHKFVREAVQAFPEIYFARLVVLGEGDSEEIVLPKLFEALDLPVDESAICITPLGGRHVNHFWRLLSTLEIPYVTLLDLDIARYQGGWGRIKYANDQLKQHKPSSILPKDHTIPKWNNKEYLVRDFQNYLDELEERNIFFSAPLDLDFSMLLAFPNAYKVKKETPNEETIKSVLGKSHFGSNQYSKEEKELFDTYHSHFKVGSKPAAHIDGLSNINDEDLKSNMPQAYKDLATKVKEMLESIPE

SEQ ID NO: 63737 - protein, 547 aa, Acinetobacter baumannii OIFC110
MIKPDLWVPADNLTLEPNALLAAKEQTCSLALTAGPGAGKTEMLAQKADFLLRAGVCPYPKRILAISFKKDASKNLKQRVQLRCGSNLARRFDSFTFHAFAKRIIDKYRVLLTGLDELEPNYSIGTQRIGKTQIDFESLVPLAIQIVNSSSIVRNSILQTYSDVFLDEFQDCTDKQYELIKTIFHNSNIKLTAVGDTKQKIMGWAGALEGIFLSFAADFNAQAFNMYRNFRSKPKLLRLQNEIIRNLDSNAVMATELTTGDEGYISHITFNNSLEEAEYLSDLIKTWIIEENIPPSEIAILVAKQIEHYAFDLMAALKNKEIPFRNEQRMQDISEEPVVRLIIDYLLCLYGPRNPKAWAKINNLLLPFDIDDQKTNSILRNFNNFFKLQKKKFLAPDYQPPIDSWRDAIQALFKNLGISTLIALSPEYESLTYLNEVIEEFKKRINDFLSQEADLLKALNSFGHDDTVKILTIHKSKGLEFHSVILLGVENEAFWGNDARSVFFVGVSRAKDRLVLTESKTRPLDSPPYRWKENTTTHEEFFNYRVD

SEQ ID NO: 63738 - protein, 556 aa, Acinetobacter baumannii Naval-83; identical to SEQ ID NO: 62630

SEQ ID NO: 63739 - protein, 593 aa, Acinetobacter baumannii Naval-83; identical to SEQ ID NO: 62631

SEQ ID NO: 63740 - protein, 736 aa, Vibrio sp. HENC-03
MHITKLSLVNYRNFNNVKLLFNKGINTIIGENGSGKTNLFRAMRLLLDSSMPRFATKLAEGDFCRALGDWRGHWIIISLEFDDIAGDEASQSLFLHGVGNAEDEVVSRATYNLIFRPKAYVRQALAQLPIGELAALESYLGTITIDDYETVLTGKSVANFNDPSVYKSIVGDFERVDFPTALNNPAVGIRLPNILNMPNEVSFTFIKALRDVVSDFNSNRTNPLLTLLKSKSGDITQSDFQPIADLIGTLNNEIEGLPDICAIRDDIVTTVGDTVGDTYSPNSISIRSSLTDESDQLFQSLKLFVSESSDGYEGAIHEMSLGGANLLYLTLKLLEFKYQKANQSIANFLLIEEPEAHIHTHIQKSLFDNINYENTQIIYSTHSSHISEVSNINNMNIIGLVNGVCEVFQPSSGLCDEQIGFVQRYLDAIRSNLLFARSVVLVEGDAEEILIPILLKKVLGLSLDEIGISLVNIRSTGFENIAMLFDNERIKKRCSIITDLDDTFFDTTIYPTDSDADKKKKEKALGSKETGFARKGRLDDFCQNNPWISIFYAKHTFEVDFIQSSNSDYLERIVRDVYTKPATVNAATTELSSTDIAISGSRALKMANYQGKGWFALTLSKVIDFKVAIPEYIFDAIKFAHGDFNAELTFKILKHRYESVIEHVKYGLDIIERLDEEGDVSLKQEWEAYLAPYESGLATFTPKWEAFNPLDGNINVLKAQLINDLPTENNDILERI

SEQ ID NO: 63741 - protein, 596 aa, Vibrio sp. HENC-03
MFVWDEEDLNDEQVAAISEPNNVFLVACPGSGKTRTLTYKIALELSRLDTINKWVIAITYTHRAADEIRERIETLGVDTSQLWIGTIHAFCLEWILKPYSLYHDKLKHGFKIINSYDSEEIISRICSNIRTERIHYGECSHYYTPRGLELTCAGNKTSLVRQVLGDYHLHLEENSQIDFEQILYFSYEILSNNSAIAKIVANLFSNVLIDEYQDTKEIQYSIVASVIKASRGGVKTFIVGDPNQAIYGSLGGYAITQQELEQITEVSFTSMALDKNYRSSSRIIDYYSNYNVIPSATVAEGKHKDHLSIITYDQVTHKDYLVEQVSRHIEHSVENLGILEKEICVIAPWWMHLAALTRNLVNRLPQYSFDGPGLVPFSRDIDNFWFKLTQIILTEPSPNMYVKRLRWASDILFDMELAQVDVNSITSKQLLKTINSISIDEDDGLTYLRSFFDELLHALGIDFALYPMLKEHHDSFFNSSQNRIERLRNESALFATDIEAFRRAFKPRTGIKVSTIHGVKGGEYDVVISFGLLQGLVPNFNDSSVESSKKLLYVIGSRARKNLHLISEKGRMFGFGRHRSERQPTEVLCNLAYTYD

SEQ ID NO: 63742 - protein, 706 aa, Dehalobacter sp. DCA
MKLTNAKIRNYRLLENCAIRIDEETTILVGKNNSGKTSFSYLFETFLKNTKEFTFNDFSIACQEKFISAYNEYLSVKDKEDLLEDYFTNIDDKLPAIELELDIEYGKDDNWSNIRPLLTTLDNNNILHILFAFKIKEPKKFFDSLTNTISKLSTKKQNKKQCILGEISKTINDFYGCVIKPIYQDIYTDEVKYTDIQKIISSYFIAAQRQVEDSNSKTNSKLAPVFQREYKNCEKSKENETLPELEKLRDTMEKANGDIDTKLASFFRDFTASFSTFGYPNVEGSDLILKSNVTLTNLFSGIQLFYKDQEHLLPERYNGLGYSNLIYIISEMLCFRSQIKELNSDLNLIFIEEPEAHMHPQLQKTFITKLSEFMEQNGINVQIVISTHSPHIVSNAKFENIRYFNRNEYSVTVKDLLEFEIDTKKKVTHDEPFDDGTIEFLKQYITLVKCDMFFADKIILVEGLCERLLMPLFLIKIDNLIKSQPEYQKLRVLSEQYIAIIEIGGAYMYKFKEFLEFLGIKTLIITDVDSCLSEQEMDKDGNLVFLKDGKTPKMTRDKKKEIKSDYISQLVTSNQTLIKWQPGKKKIKELIFNKFNQNSKQLVNVSFQRNIYDTKANIKCGRSFEEAFIIDNWLYMFNMKDRLESVKSNISDYKDADEILNNSYNIYEYIDTNNKKSDFTFDLMYVSSKGWSVPTYIKEGLIWLAK

SEQ ID NO: 63743 - protein, 572 aa, Dehalobacter sp. DCA
MASKVEHLIMRCIDNNESFIVEAGAGSGKTWSLVQALFYILQVKGNQLKVANRKIACITYTNVAKEEIIDRIQANELIDVKTIHDFLWNIIKPFQRELKLELIEILKTQYTKNTDILRTSKTTTKKYAEAKEKADKYKLTLDELDKFKGKIEYKDYYDRKKGIVSHDDILKLATALLGKYNKIYKIIQDTYPIIFIDEYQDTNQEIAEVLLNNVKNNSSILFGLFGDYNQQIYVKTIGKVDDTKFSLKKIPKDENYRCSLEVISLLNKLRSDIEQRQSGEEKHGRCVCYYVNDTELDTEEFISSKIYRELNITEEMEIKRLYLVTKSIAKRNGYLGLHDLYDEENKDVTNRRAKNKDELLKNKDNRDCPFANFLFEIEELIELYQNNKIQRLLAKTSYELICMEDKTKLDNLMQKLIKLASKSSIQEIFEFVWNNNLLKKPSKIKYIYDNKELHDDFIIALMKMEYKQFQNLYYTVKKTSPFSTDHGTKGAEFDNVVCFVDDNDWKTSYNFSNYFDGTDAGTPRFDKTKNMLYVICSRARYNLAIVFLSKLSDNSQKKVELLFGERNYFPEK

SEQ ID NO: 63744 - protein, 631 aa, Dehalobacter sp. CF
MPISLTNIRVNNFRSLENIDLTINKTNIIIGQNNCGKSNLLKAINIAFGNVRDISESDIFISSEERISSTKTATIDILLKPVDLEGTFQKTFSDFWISVFTDSWITPDETNGDYVGIRTVLQYDIRKDDYIIVKKPIQEWNDSIETSVVGAKKSFGNDMVDSLTSFYMDAHRDAVEDIKNRKSFFGKATSQSDLSDQLTSELEGQLNYINSEIVRNIPALQQTNRRMSSIGKTMGSSSGTVEIEPLARKISDLHKGMDIIYKDGVAAQFSISQHGMGTRSWISFLTLGAYVDWHNEKLKQDDEDAENYTMLTMEEPEAHLHPQAQRQLYFQISEFDGQKIISTHSPSVLAQADLRDIIYINKQQGKTSVKRFNVGQFTPEELNRIEREVINTRGELLFSNAIVLCEGITEEQALPIYFKEYFGVEAICSGINIIGIGGQNYKTFLNLIKDLDIPWFIFSDGETETKKTVKKAVGVENIEELNSMSNIVILDNENDYEKYLISDGYRDIIISAINECENDEEYFANYILTKNHTSMGRERTNDPACGTCQQHIYKDVLRDFDGEGGLERALYDCCTGKKAKAKYATYVAEKIVSQQDVTKRIPSKINTLLKEIGRLLDLTEKEDYRTHEVIE

SEQ ID NO: 63745 - protein, 615 aa, Dehalobacter sp. CF
MKLSNKQEQIVKHVEGAILVKAGPGSGKTRVLIERIKHLLLSKKRCKILALTFSNLAADEMKNRLKEDTLISDLAENVTVGTIHSFCLDLVQSRGNLIGLGKELMIFESNSDQLSILRDVFSSDPQLMTILKSKEKPTAFLQKCLSLISEQKKKFISPEMCEMNEPFPVIYREYNERLLSQNALDFDDILFFAYKILTENPSVVNLYTSLYKFVCVDEAQDLNFAQYQVIKALCGDKCKNIMLVGDENQSIYGFNGSDSTLMSEKFVKDFKPTIYLLNENYRSAKTIVNFANKLGNYDSVSNYVYSGELKAYSFSDEKDEAQFVLDRIKELLASGHPDIENGLSYDSFSVIARNKYVLSPLETIFSELNIPFVYKKSSNGLENESDYMKVFELGIRILLNPKDIVHLRELCKITDRKSSEIVSDDNSIAILTQAIENTVFTDLLPCFQSLNKEEMNFSKALLQLKEQLPASMSDEERYLIINDIEQWDKHWKKYSGQVQRENRTLLSFRNYISLGKTQDTSSSKGVSLLTAHMSKGLQYDVVFVIGLSEGTFPDYRAVSAGGSEMEQEKNNMYVAVTRAKRLCYLSYPRSKKMPWGDNKWQTPSRFLKDIDILDS

SEQ ID NO: 63746 - protein, 348 aa, Acidocella sp. MX-AZ02
LKKAADLIPLGAGEPVTIEALPTKIFDILSRTQISLSSKSGARIPITRHGNGAQSLAVICLFDAFLQSRLESSYGEHAEPLLALEEPEAHLHPSAAKAVGTMLQTLSGQKIITTHSGDLLAGVPLTKIRRLSRRNGEIRVHQIGEGVFTKEELRKLDYQVRLSRGSLLFSRCWLLVEGETEGTLLPECARILGCDLDAEGISCIEFSQVGVEKIIKLADQLGIAWFVVADNDQAGLSYETSAKSQLDGRPASDHIKVLDHGDMEVFLCIEGFGSIYEASVASQKSSQVKATKGTSLYWKQVTDAQSKNAKPRNALAVVDEMAKQGKAGVPTLLSNIIGQTQTLARSNG

SEQ ID NO: 63747 - protein, 638 aa, Acidocella sp. MX-AZ02
MALNLHTLNENQLAAVQWQEGPLLVLAGPGSGKTRVLTFRIARLIESSPGRHFKILGLTFTNKAAAEMRERIEILVPDASERTQLTTFHSFAADILRQHGHHLGLRPDFTLLSQDTDRHSLLDEAISDVDLSQSRLNVTGERLLPLVNRLIENDIAPDMAADALSRGSLDEPETLAAIYAKYRSLMIANNTLDFAGLIAEALNLFRSRSGVQRQIQRVYAYICVDEFQDTNLTQAKILQLLVNPTTKNLFVVADDDQIIYQWNGASPERLWALRCEFDMQLLQLPQNYRCPPAVVELANKLIAHNFSRSSEKMALVAHKTTVSGDMIRVRQFDMVDEEIVWIASDIAARPAPARSRCVILARTRKLLDLAVEALTASGLPGFLAIRKTEFESASLRWLHAILRLANAPSSREQLSRVCKSFYSLEGINIAASDVVAHASAGDGNYLRGWADVVLAREGLSSDARILVKDLISKLVDRLDFWAFLKDAFAWLDGLPDTKPDPDGVFNEYHEEKATWHDLVGDVCAQYGRPEVTLHLLLQEFDLRSKSPPPPMNGIPCYTIHSAKGMEFHHVYVMGLVEDQLPSWAAIKKGDDSRDMQEERRNCFVAITRSQETLTLTYSRRVSGWAKTPSRFLREMQLI

SEQ ID NO: 63748 - protein, 713 aa, Desulfobacula toluolica Tol2
MFISKIEIKNFRNFENSEIDFNEGTNVIIGHNNAGKSNLLKALSLIFNPESGRKLKVDDFYKKINTDSYFEQDANGDLKIKSPPKIVISAFISQSINDNSTNEIQPDDNNTIYEWRIQTSPYYIARLTYEFFLPEGDETKEYIDSITKLIDKGIKTKDSYWNLIHRKFIHKYISRIYGGIAKLKNRADSDQLRKFDFQFLDAIRDVEKELFTGKNTLLKDVLKYFLDHKITIDTNLSEEQKQENKESKHEEFATKSSEVIMQLKQRINTDPILEYSKDVGASIGGEPDFEGSIDEVELFSTLRLIVEKETGIKLPATHNGLGYNNLLFISVLLAKMQMSRSDYVSQDDKKVFPMLIIEEPEAHLHPSMQFKFLKFLKENLKTKNEVRQIFITTHSTHITSAVELDEIICLNVDDENNLQIAYPGKVFDSDKAEDKKSKAYVKRFLDATKSDMLFAKTVLLVEGVAEQLLIHCLADYENKSLEDNHVAVVNVNGRYFNHFLKLFDFDSNDTFKKHAIQRKVSCITDADPVQKDTSGKKPKFKKCFPFELNIDTAKFEYKKISEILSSLQAKYAGNSYIKISSRVDGKGKTFEYELAYNNASTDLLITDEIANIQELKDLINAIKANKPFSDILSILKNQNIQESIELSNWTEEEKKSAIIAARYLQSIENSSWAGKGEHALNLDMKLRDNLKNGNPVNFSVPEYIKEAINHVCS

SEQ ID NO: 63749 - protein, 575 aa, Desulfobacula toluolica Tol2
MIEINSSTLISTETPFKIFAGPGAGKTYWLINHIENVLHNSKRLTTTTKIASITYTNIAVEEIQSRLGDSDDRVYVSTIHNFLYKFIVKPYGFLLKDNSGANLINLRNLDGHDEHIPNSRFVYDWKTQNKLNYIKDDKKIYECLQDLDWHLNADSSIDLGPRHTWKRKIGRYWIKKELFVDYKKRYWRIGTIHHEDVLYFAYKIISENPEVLEYVNLMFPYMFIDEFQDTNPIQTEIVKLISKNNTIVGVIGDAEQSIYKFQGATRQDFVDFKISGINNYQIKGNRRSTNKIINVLDNIRYDRVKQTPIRNIEGNMPTIYVGDKMKVIEYLTKSYPEISILTRNNETVGQIKNDNNKNIGNLWDSSRGLDSNYERQKLLYNSIYAAELCLLGYYKDAVRLTSKIFYKYKDGTKIQKVKKRELAIVLIDLLVSQKQNNSSKTLFDFYNSLFEYFLTNYQIKIGSKITRGKYKEFSENNIYADLVQALRIKDDTSRIKTIHKAKGAEYENVLVVMENSIELQYVLNPEKHQNEDDSRIYYVAFSRAKDNLFITVPKEFTKTDKEKFEMIGFHIKNEL

SEQ ID NO: 63750 - protein, 691 aa, Parabacteroides johnsonii CL02T12C29
MYISKVSLVNYRNFENSFFLFNKGINTIIGENASGKTNLFRAIRLILDDNLLSSAYKLNENDFNRNLSNWKGKWIIISLEFSEISADEAIQALFVHGGGNVEGDITERATYNLFFRPKPQIRKLLSELKAGDKDGLGKILDKVTIDDYETFFTGKSTVNFNDKNVQRELMGDFEKVEFNFDIDESKFGSRIPHQLSISKEVSFTFIKALRDVVSDFQDNRKNPLLTLFKSKSEDIKKKDFSSISGQVEELNQSIEKLEDIQEITDNISNTIKEAVGTTYSPSSLSIKSNVPSDVEKLFQSLKLFIGEPEEDYEGGVHELSLGGANLIFLTLKLLEYKYRKEKDKIANFLLIEEPEAHIHTHIQKALFDKIDYPDTQIIYSTHSTHISEVANISNMNIISRFRNYSEVYQPFVGLSEDQIVKIQRFLDAIRCNLLFAKSVILVEGDAEEIIIPIMVKKTLGVSLDELGISLINVRSTGFENLAQLFHNHRIKKKCAIITDLDASITGENTKAAKIGISRKEKLEALKKKSKWIKAFYASHTFEIDFFQAGNFDEILSTISEVYVDKKAIKQSKEDIKSGDIKKYGKRILTIANNMGKGWYAILLSNQITPSTHIPNYILEAILFAKSEFSKELLSQILTYVLSTYEPSDKIEKLNKELLAYKNDEITLDGLKKDLEKVIDNTEPILYILNRL

SEQ ID NO: 63751 - protein, 592 aa, Parabacteroides johnsonii CL02T12C29
MFVWRKNDLNPEQENAISNEGSVLLIACPGSGKTRTLTYKIALELSKLQSKKQYIIAITYTNRAADEIKERIELLGIDTKQLWIGTIHSFCVEWILKPYHMYIEELKYGYTIINAHDTESYLSSLCNLYASAKPKITYWDCLCYYFTSEGLIINCTKPQKKDIVESIIHDYFQNLKDNREIDFELILYYSYLLLKENQSICKILSNIFAYILVDEYQDTKELQYMILGAILKARNNSKAFIVGDPNQSIFGNLGGFPMNKVELEKVSGIHYNELSLTKNYRSSSLLVSYFDYFKTYDNMIEAVGKTKDDQSIIYYNQNISIESLVDEIIRIIKYNIEVCGIFPSEICILAPQWIHLSALTRTLMVRLPEYSFDGPGMAPFARDIDNFWYKFSRIVLTDASPSLYIRRLCWANELINVLSSIGIETNISAKTLLYICNSISVDEEDGLEYLKQFFQNFLGKLNIDIHQYKYLEMHYNAFFESSNKRIERLKKEGIESISHINSFKRVFRQKDGITISTNHGIKGAEFDTVIAFGLLEDYVPHFSESNKEESAKRILYVIASRARKNLYLISEQGRNKIPTNVLNNYKYEYTVV

SEQ ID NO: 63752 - protein, 472 aa, Parabacteroides distasonis CL09T03C24; identical to SEQ ID NO: 62928

SEQ ID NO: 63753 - protein, 567 aa, Parabacteroides distasonis CL09T03C24; identical to SEQ ID NO: 62929

SEQ ID NO: 63754 - protein, 789 aa, Pseudomonas viridiflava UASWS0038
MTTQGFSVPSPLVNSTASPAPGAPAVPSNEAIAPLSTAPIRLACVEASNFRRLAKTRLELDETTTILVGANNSGKTALLTVLRNFLGESPGIRAFDISLSQWAKLRELGQLWETLEDDPTTDSSDAEKWQEQYRQLQACMPFIDLWFDAKEGAYNHVAPFITSLKWSGGAVGVRVRLEPAADANELRKLAWRYREARSPVRDLPKDGHAWPMDLLDYWLRHSTDLRRIAAYRLDPLKGPLADKKRCDLQELPPNPQPVELQFLRKLIRVDFVPAQRGLGTEEDEVRSESANTRPGLFSSQLLKFARQHLNVAPSGHGHREDLVKAIANAQADLDKSIYKALKPAMEDVEILGYPGLHDPQQFHFRTRIQTADLLAHSTAVQYTLDETSVDESLPEHSIGLGYQNLQSLSFMLVSFRTARLTPPQGTPAAVHLVMIEEPEAHLHVQVQRNFSSNAHDLIRPKEAVHSNLRSQLLISTHSSHMAHGDSFTRLRYVKRVASTGAGTKPTTEVINLGDAFGKDIQTRTFAERYFQVQHTDLLFADAAIFVEGTAERMLVPLFIERDFPKLAKKYVSFLDIGGSHAHRLRPLVERLGIPAIVITDLDPVVPTKNAKGRVVRAAVHIAGQAELECGNDTLSSWHPKLTNFQAYGKPTPADLEWTADSGAKVRFAWQLPIAAASEQWPSSFEDSLVLSNTDWFKALDKETDPITGKKEVHRGTLAKVIGIVLDNPDHTDLLKELHAMLRGNFSKGDFAATLFERLNAGQALQCPAYISDALTWLSSQLNVTAGETP

SEQ ID NO: 63755 - protein, 660 aa, Pseudomonas viridiflava UASWS0038
MSSELQSLGNERDAHIVEDICGYITAVPPRSFFLFAGAGSGKTRTLVEVLRRITGVVQHEAGSQYAQKLRSRGQSVSVITYTKNATAVVTSRLGENYLTAVSTIHSFCWELIKGFDEDIKDALLARCAKKLEDAKAYAAGKVRGESDTDRRKYAEIEAQVDEIRGTDAFIYHPDRNTYGAGALSHTEVLEATAWLIRERPTLQRILEDRHPLILIDESQDTMKNVLDALFELTQNRPCQITLGLLGDHRQRIYPDGHDDLPSHVPEGWARPALQMNHRSQQRIVDLINKIWDADIEGRTQPKTGVPQHSRTEKNGGTVHIFIGDTKVSTAEKILKEAECALVMAEQSSYAAWRDNARGYKTLALEHKLAAKRGDFFEAYYAMDLLDKDAATPKSNGERSGPSMVRPLLGPMLELAKCVQLDGSINEFSTMEVLRRNGALANVPQTNAERQSLLGNIQAAVMKFAAATSKPDATVRQVLEPVLEGELFEADFRLVHAYEDSSPPPPDPKPRAKEAKEDRRKRGWHAFFNTPWQQISRYSAYLGGETELATHQVVKGSEFKHVLVVMDDEEAGGTLFSYDKLFGAEGLSPADLENVSEGNETAIDRTLRLLYVTCSRAEESLALVLWAKDPNAALVAIRRSEWFTTDEVTALNRPPVTVLPE

SEQ ID NO: 63756 - protein, 766 aa, Bacillus azotoformans LMG 9581
MHIKFVEIQNFRKLKSCRVEFTNETTLFVGANNSGKTTAMDALIKFLDVKDFTINDVTLSNWLGINKIGERWLKCNGENLELDKDEIGNFLPTMDIWLHVQDDQIHYVTHLIPSLDWSGGLLGVRLTLEPKDIESLYKDFLNSVKSTQGILLAVNPNNKENDISLWPKDLRDYLSRKFQNHLAIKSYLLDPTKCLPINKGQAQPQILPIGNEPIDGDPFKSLFLVHHINAQRGFSDPANKKTDDDESAKRIVGNLSTQLRKYYNTHLNPTKSPDPTDIDALQAIEKAQSTFDIKLREGFKNALDELENLGYPGFSNPKISISTRLEPMDGLNHESAVQFDLIDGYNGNELRLPEQYNGLGYQNLISIIFKLMRFRDEWMKVGKVAKNAPKNQEDFIIPPLHIVLVEEPEAHLHIQVQQVFIRKAYEVLCNHPNLKKQTNFTTQLIVSTHSGHIAHEMPFSSLRYFRRIPPKNKGEVPTSIVVNLSDVFGQGDETERFVTRYLQSTHCDLFFADAAILVEGPAERMLVPHFIRHKFSDLNNKYISLLEIGGSHAHTLKPLIDYLGLTSLIITDLDSVDPNNNNTAIPPARNQSYVTGNYTLKTWLPNKKNIDDLLNLQEEDKVKTSEEHFYSVRVAYQSPIKVKIVNDGLEEEALPYTFEDALVFQNLNLFKNIEGNGLVKKFRNAINEKGTMTELGKQFFEALRNGKKAEFALELIFKIDPNELEVPKYIYEGLHWLEEQLQVKPSFNVDAGETIGETVDETAGVL

SEQ ID NO: 63757 - protein, 629 aa, Bacillus azotoformans LMG 9581
MIDIEKCNDDHIDDHVDEEIFNCLNLKNLKSFFLFAGAGSGKTRTLVSVLERFRDQNYQQLQLNGQRIAIITFTNAACEEIQRRLDYDPLFSVSTIHSFIWELIREFDKDIREWLDANLNNQIDDLKLQLSKGRKGTKTYVDRVKSLEIKEKRINNLENIKHFTYNPSGLNQSKESLSHSEVISIGAYFLTNKPLMGKILVRKFPILLIDESQDTNKELINAFFEVERKNNNIFSLGLFGDTMQRIYSDGEVNLGNSLPDSWSKPVKKMNHRCPPRVIKLINKIRSTVDGQEQRERTDKNEGFVHMFILHSKTDKRNAEKKVVQRMAEITGDPKWEIVDADYTTLILEHHMAANRLGFIDMFEPLYKNDKLKTGLLDGSLSGLQFFTRIILPIVEADEIGDKLKITNITREYSNLLKFQKGERDQLLRISKARGAVDKLLSLWDDSKDPTCIDILQCVAELNLFEIPDSIFPLSVKEKKEELISEEITADGKSDVLIAWFESLNAPFSQIRAYDSYINDKSRFMTHQGVKGLEFPRVMVIIDDSEARGFLFSYEKLFGVKDKTEADKKNENEGKDTSIDRTRRLFYVTCSRAEESLAIVAYSTEPELVKKHVIQEGWFNESEVEILNVQ

SEQ ID NO: 63758 - protein, 656 aa, Acinetobacter baumannii OIFC065; identical to SEQ ID NO: 63692

SEQ ID NO: 63759 - protein, 697 aa, Acinetobacter baumannii OIFC065; identical to SEQ ID NO: 63693

SEQ ID NO: 63760 - protein, 641 aa, Acinetobacter baumannii OIFC111
MQLQSLRISNFQSFGATPTELSLEQITYLIGPNGSGKTASLQALCRLFAFDPSLRRITRSDFHVPYNEETPPEERHLWIEANFTFPELQNDTDNCTVAPHFGHMRLDDKDGISRVRFRLNATMGLDGDIEENLVYVLDLNPDGTPLNTAIVPRTERNHIHVHYLPAQRDPADHIAYSTNALLGRMLRAINWENERDTIRSLTDQISDNLKANPSIDAFSISLKKIWEKLHKGSFFTDPKITFVASEIEALLRHMSISFSPGHDETLVDFSRLSDGQKSMLYLSLVLSSQSIGRSVLAEENKSFNPLKLRPPVFTLIALEEPENSLSPLYLGRIVNAIHSAVGKGDAQALIATHAPSMIKRIPPEHIRYLRLSTDRCTKVAKIILPEELDDGHKFVREAVQAFPEIYFSRLVVLVEGDSEEIVLPRIFQAKDAPVDESAVTIAPLGGRHVNHFWRLLSALEIPYLTLLDLDIARYGAGWGRIKYVNDQLIKFEPTKALPIDSPLPKWNTTDTPIRTHHFYENGKKDLFTELECRGIFFSFPMDLDFSMLLSYPLAYEITLEVPNDGTIKAVLGKNHHDSSQYTTDELAFFNTYHQLFKIGSKPTAHINALAQLDNAMLLDNIPASLDRLANTVIAKLEELPE

SEQ ID NO: 63761 - protein, 552 aa, Acinetobacter baumannii OIFC111
MITVDLWQPADGLILEPNALRATKELERCLALTAGPGAGKTEMLAQKADFLLRTNSCAYPKRILAISFKVDASKNLKERVHRRCGTDLASRFDSYTFHAFAKRIIDRFRPVLTGEDTLEADYKISERRNGRSHNQISYEDLVPLAIQILKQSDIARNAIRQTYCYVFLDEFQDCTDKQYELVRLAFQGTHIRLTAVGDVKQKIMGWAGALDGIFKTFSMDFNAIPLTLYRNFRSKPLLLRMQNEIIRVLDPLSVMPDEQLAGNEGEAHEIRFRNSREEAEYLTDLITAWINNQQIPPSEIAILISKQPEHYGHHLIALLEEKNIPYRNEQQMQDITVEPAARLIVDYLSCLYSQCKPKAWIRLTNLLIPFAEEYIQLDIQRDINQLIKEHRKNIANQPIEAPYSNWWDCVSEFIKKIGKETLIALSPEYESIDHLKEIISSTKTRIEELLKVEPNLVKALAHFSDDQAVRILTIHKSKGLEFDSVIILGVEHQTFWGKIDEERCSFFVGVSRAKHRLIMTSCIERERPPSYTNRWETQRTPHIEFLSYLPKT

SEQ ID NO: 63762 - protein, 556 aa, Acinetobacter baumannii Canada BC1; identical to SEQ ID NO: 62630

SEQ ID NO: 63763 - protein, 593 aa, Acinetobacter baumannii Canada BC1; identical to SEQ ID NO: 62631

SEQ ID NO: 63764 - protein, 702 aa, Lactobacillus casei 21/1
MKLTKLIIDGFRSYGESTTIDFDNITTLIGSNGAGKTTALIALNKMFSVNANDRIISPTDFFVATQDNGELQSSTKLTCEAVFEFEQEDDSASQKHADALLLKHLCVKGPGEALILRIRLVATLEDDGTADGAIDSHIYYVPTLGVCKDEDLVLASRRELQHIRLIYVPAVRNPDTQLGTTSKSLLANLVRHINWGNETKHLVDAQLDSLNDTILNSKGVKLIGDSLSADWNMFHENDRFADVRLNIESTSLGDLAKRMRPVFQSSISHRTFQPEEMGDGTRSLFYISNVASVLEVERKLLEAEEQFSKDETTGEGHARLIDHQPPVLTILAIEEPENHISPHLLGKLVNQLKAMADYPNAQVVLTSHSPAIVKRVTPECIRYVWMNKDTDVSSVQSLEIPNQEDELEAYRYVKMAVELYPELYFAQLVILGEGASEEILLPKFLELSGKPLDESGISFVPLAGRFVHYIWHLLTQLQIPYISLLDLDRERSGGGWGRVSYVLKELSQNSIDVNAYPDGITDLSEASLQQLSERKTEDSVSANQLDQYLKYLQKYNVFFSAPLDIDFVMLSSYKNNYLGLVQGKQGPTLKVDGKRWLISEYPKQDENDSSYALRVEKARKDALKKDNSKLGPSSGNSYSFQDRELMIWYVYFFLGRGKTTTHIQALTQMNDDALKAGMPSLFSEIAAKASQLLGKEPVSHDE

SEQ ID NO: 63765 - protein, 616 aa, Lactobacillus casei 21/1
MMSSSGWEPSEGIILEREAENAIKSTRNQLVVAGPGTGKTEMLAQKADYLFQTGICADPFKILAISFKKDSATNLKKRVDKRSPQFSKYRFDSMTFDGFAKQILDQFRMGLPEDLRPNADYLVENTQLLDRMSRDSFTNRTPSKKEITSSWKNIQIQQNQLLERDRYLQNEMLTGTEDLPACLPYHAIMRLAQMILRLNPAVQQAVRNAYPFVFIDEFQDTTTSQLVLVRRLFENSGSAITAVGDDKQRIMIWAGARKTAFEDFCSIFAAETRELSINHRSAPAIVGLQRQMYASLNANSSTAIITEPSWNPDDGDIELLESDNEKEEAELLARRVKLLIDDGISPNKIAVLLKQKVSDYAPLLISSFASEGIKTRKEAEYQELLNESLVQLVIQTININLGKNTLAEWESYMSSFIVSRGIENEGAAYVKAERELNNFLKSTTTLLQKPANMQLVMKIIDQVTHFWTYDYLVGTDETYSNQERFSQLRETLATRLLEEYETTNNWIEVIDNFEGKHSVPIMTIHKSKGLQFEAVFIVALDDNAFWSMTKDADETRRAFFVAISRAKRYLGFTFSHHRHHGDIMTHNDIQEFYDLISSTAIRVNLANVKSELKSTD

SEQ ID NO: 63766 - protein, 684 aa, Clostridium sp. Maddingley MBC34-26
MVMEINKIKLKSFRCFGPTETVIRLNDLTAFIGTNSSGKTAVLQSLLKLFGTNTKDREIVKSDFHIPKGISPEEVNTNSLSIEAILEFPELLEDTDKSIAVPVFFNRMVIKEPGVTPYVRIRLESDWMIGSTPEGDIETNLWYIFLPEDSNEEEQEGVNKIKVPSQERSSIQVIYVPAVREPSVQLKNAAGTILWRIMRMIKWPEDIDLKLKDKVDEVDVLFDDQPAVKYIKKVINKEWKNYHRDIRYTEANIKFNSAELEDILKKMEIEFLPSVTNKGYKIDSLGDGLRSLFYLSLVNSLLEIEKKASEDTDRHEFNNTTSAALTVLAVEEPENHVSPHLLGRIINNLNSIAEKANAQILITSHTPAIIKRIAPESIRHLRISKEQFSTVLNEIKLPEKTDEAYKYIKEAVRAYPELYFARLVILGEGDSEEIVIPKLLELLGPKIDNSGISIVPLGGRHVNHFWKLLSSLKIPYITLLDLDTEREGGAWGRIKYAIKQLLKNGHNKYELLLLRDNTILDDDSLEKMHTWELDSERLNSWIVRLNKYNVFFSSPLDIDFMMLETFPDEYKQTAPKNGGPRIPDKLTNLGEFNKKVESAVRATLKDYGGDGKSYSEEQRELMIWYNYLFLQRQKPSTHIMALSNIDNKKLKDNMPEPLKKLVVAIYSNLKDDPFSELGVGDVNL

SEQ ID NO: 63767 - protein, 265 aa, Clostridium sp. Maddingley MBC34-26
MIRYTNCDKWFPSDGIELEDAAYDSVKTDTNCIVIAGPGAGKTELLAQKACYLLQTNKCPNPQKILAISFKKDAARNLAERVEKRCGKDLAKRFVSRTYDSFAKHLVDHFRMSIPENYRPPAEYNIASHDDIERLIRQYDLPSDIENVYGIHEVSTAEFIRFYLTQNMLPISKDYNNINEWLIGKVWHSLINGESWLTPSLTFPMISRLAEYLLRFNPSIRKALRMTYKYVFLDEFQDTTEVQYDLVKTAFLGSNSILTAVGDDK

SEQ ID NO: 63768 - protein, 695 aa, Clostridium sp. Maddingley MBC34-26
MYISELKLTNFRGFKDSTKILFTEGTNVIIGHNNSGKTTVIKALELLFDSEKNKRLCIDDFSKNISIEELKSNPPKITITAKLVESQNEEDYSDDLVTVSTWLTKIEKPYEALITYEFFLPEKEIDDYKNIIENIKSDDVNDYWYEIDYNCLRKYTYKIYVGNPEHKNVIDGETLKKFDFQFLTAIRDVERDMFTGKNSLLKEVIDFFIDYEVKIDEKLKDNEKRDVIIERKKEFSKNAKILINSLENRMSAGKKHMLKYAEETGASFEKLTPSFEGRILDTELYSALKLIVENETGIKLPANQNGLGYNNLIYISLLLARMQKNASGEYLGTNAKVFSMLAIEEPEAHLHPNMQYKFLKFLNENKETEVRQIFITSHSPNIAAAVNLDDIIVLYKDNDEVKVAYPGKVFTDTKEDKISKNYVQRFIDVTKADMFFAKSLIFVEGIAEQLLVPEFAKISDCDLTDAHVSIINIGGKYFDHFLKLFDTSKSNYAIKKKVACITDLDPSRKKKEKNSKWEVCLPIAIDCEKDKYDYNPCSNNVVDKYCGRNGEDVIRVYSQEKYIGCTFEYDLILCNPTIKELLTDSVSNSSEIELLMEGLEQNKDIDYFINILNEGAYKDEICVALDKSNLKTKDKIIHIIAGRYLKSIKKGVVAQELAYTISENYKEQESADKESFELVIPKYISEAIRWISLQH

SEQ ID NO: 63769 - protein, 568 aa, Clostridium sp. Maddingley MBC34-26
MDFSTALKLKDSDELIDIETNFKLCAGPGAGKTRFLINHINNIILTSERISKVRKIACITYTNVGVDTIISRLEDFIDYVEVGTIHSFLYKNIIKPYLWGLNDEFSFPLNAIDGHDEFVPTYSILKEWKESTKQQRVRDDKALAKALMSLKWNLKDNGNVELGFKYSSSGKIDGYNIKKASYIEYKKICWKQGLISHDDVLFLSYKILEKQPRIYDILRAKFPYVLIDEFQDTSPIQSKIIEMIAEKEAVVGVIGDACQSIYSFQGADVQRFIDFTLHDMKLYMINNNYRSTQQIINVLNDVRNEKTFKQNSPDNKDGKKPVLLVGGFLDAYNKAIQICNAKSVCTLAFRNDMSNILKYGFEDYFSTDASDELIFSDSDRGKMIFYVINSLEYCRQNKIKDAIKYMKKAYRKYKEFGDKEAVLNIKRLMNNYDKFKEISIKDFYNSYLFGFNGTKGKISSGNISQYYSQLTYNKVSVAVNIADDNSMHRTIHKAKGDEFDNVLLLMQPKENYDENKELSFLLNPDIDIEANRVYYVALSRAKNNLFINVPQLSDENKNKLNKFDIIYL

SEQ ID NO: 63770 - protein, 641 aa, Alteromonas mediterranea DE1
MKLHSIRVSNFQSFGAEPTELTLENITYLIGPNGSGKTAALQALCRLFAFDPSLRRIQRSDFHVPHDEQEAPEERQLWIEADFVFPELEDEEDNSTVAPHFSHMRLDDPDGIPRVRYRLSATMGLDGDIDETFVYVLEAGPDGSPLNPQTVPRSERNHIQVHYLPARRDPTDHIAYGTNALLGRLLRAVNWENEREEVKGFTDQISESLAANPSVNAFSAHLKKTWGTLHKGSYFTDPKITFVASEIEALLRHLSVSFSPGHDEHLVDFSRLSDGQKSMLYLSLVLSSQAIGRAVLAGEDGSFDPEKLRPPVFTLIALEEPENSLSPHYLGRIVSALNSMTSNEDAQALIATHAPSMLRRVDPEHIRYLRLTETRQSRITKIQLPAKTDEAHKFVREAVQAFPEIYFSRLVVLGEGDSEEIVLPRLFQAKGAPVDESAVTIAPLGGRHVNHFWRLLSALQIPFLTLLDLDVGRYQAGWGRIKYVNNQLGLYQPEKVLPNTFSLSDWNDDKVPVRTHHFFENGTKSVFAELEMRGVFFSFPMDLDFSMLLAFPDAYGVQQEVPDDSTIKAVLGKSHHDPSQYSYDELNLFSTYHKLFKLGSKPAAHIEALAQLSDEDLLANMPESFGRLTDAVIAKLAELPE

SEQ ID NO: 63771 - protein, 558 aa, Alteromonas mediterranea DE1
MIAVDAWLPSDGLTLEPNALRAAKEQARCLALTAGPGAGKTEMLAQRADFLLRTGTCRYPKRILAISFKVDASKNLKERIQQRCGQELASRFDSYTFHAFAKRIIDRFRVVLTGNDALDLDYSIGERKVTKRQITFHDLVPLAIQILKASTVARNAIRQTYSDVFLDEFQDCTDQQYELVKVAFQGTSIRLTAVGDTKQKIMGWAGALDGIFQTFARDFSAVPLNMYRNFRSKPRLLRMQNEIIRVLDPASVMPDHQLAGEEGEVFAWQFENAQGEAEYLADLIAGWIRNEQVPLSEIAVLVSKQLDLYANHLMVALEVRGIPYRNEQEMQDITVEPAARLVVDYLSCLYGQREPKAWIRLMNQLIPFADDEVQSSVRQNFQSFFKEQRKIIAMAELLDEPFSGWWDSVCRFLKKIGMETLVALSPDYESHARLGEVVGDTKARIEELLELTPDLPQALTRFSDDQAVRILTIHKSKGLEFDSTIILAVENEIFFGDQDSNLCAFFVGVSRAKRRLVLTYAKQRDRPLNYAKRWDVIRTPQQEYLQYAAQFITDLTHI

SEQ ID NO: 63772 - protein, 662 aa, Pseudoalteromonas sp. Bsw20308
MHISKIRIQNFRLLKDTTLDLEDEENNDLSLLIGKNNSGKTSFIVLFEKFLKSKKFYFADFPLSLRQDILKLSHQTDVYSLAIRLSLDITYNEKDSLHNLSDFIVDLDTECNLARISIEATINKSKLLKDLEAVINTREEFIKKNLFEYIQVNYYIFDDYSDFESKHRSKLIQKEAADVNSLINLKIIKANRNVTSSDAKPHERKILSHLTTLYYNSKVKMSHDELAAINSSIIEADRELSDNYKTFFEPFLKNGKSFLGLTDLNVVSDLQSKEVMASHSKITYGKDDTELPEHQNGLGHMNILYLLLNIEIEKQDFLEANRDINLLFIEEPEAHTHPQLQYIFIDKIKDTLNEIKGLQTFISTHSAHIVKKCNFKDIRYFRTLKKELNTEVLNFYLELQKMYVDESNDEEDKIEKENFKFLKQYLTIESSELFFAEKIIFIEGTSEKILLPYFIDQFDKERVGDEGDIALTSQNISILEVGANAKAFKHFLNFLQIKTLIITDLDTTRWSESSYKACPVKEGTHTSNATIRHYFNSPEFKEKDFPIWMDKLKKHQHRDPSSLIKVAYQDTENSYQGRSFEESFVSVNMKIIGRNIDDISGLKNKKRFEECKSDPDKFVDIILDSKGKSSFASSILFLALSKDNLKWNTPSYIKEGLKWIAK

SEQ ID NO: 63773 - protein, 675 aa, Pseudoalteromonas sp. Bsw20308
MDSQITPQQQIQKCIAESMSFVLQGGAGSGKTETLKHTLQFLSQDYSKNRVACITHTNLAVNEIIDRVGDGYKVSTIHSFLAALIKNHTKAIQQVIHEIFIVSNVEFETEENSDLAGNELKKANHDNYKRTYKKYAKLKYIVKGETSAKEIGKREYDKAPAEHNYELNLKIAELNAEVCNVIKDKDHRNIKYNDSRFDRFKDLSFGHDSLLKVAALLFKRFPKLGRILSDKYDFVLIDEYQDTNEEIIEVFLKYLPKERKTTVGLFGDSMQSIYSDGIGDVRAYIDSDQIVEIAKEDNFRCSEQVIDFVNYLRIDALNQKLAFKIKQDGIKEILKDRQGHVSLLYAVWDNVKPHSKSSPETKQAYLDFIDKLIDFADGEERSHKKLMLTNKSIAGKVGFAGLYKVFSDRYTDVKDEIEKVLSSIQVLDLAELCNAYSGSEKRYNFILSELKKSGFVLKTLREKERIVAAFEKITRGNLSINKTLEVAFKENILAKSEAHLAYVDRKEAFLSELKNDEEYQQLKMIFNAGSNSLTKMVKQVPELTEEAFNEFHSNFKRERFYHDLFSEEISFSEINRYYKYLNEECDFITMHKTKGSGIENVLVVLDEYFWNKYSFKFSDDSTETSSVFTPPNMKLFYVACSRTIKNLTVVKVVTKEEKEHLLKVFPEFEEVPINE

SEQ ID NO: 63774 - protein, 769 aa, Thauera linaloolentis 47Lol = DSM 12138
MPDAAPATPESGGIKLRFLELCQFRRLGKVQLDIDRKTTILVGANNSGKTSVLVALRHFLADGAPFGAFDISLSQWPKLRALGKSWEALTEDPTTVAGSEDSWKEQLQTLLAAMPTLDLWFDAEAGMYHYVVPFLSRFSWKGGAVGVRLRLEPAASVDELKQLAWTYHTARSPVKDMGADSLAWPIDLLDFWLREPSKLGQVRAYKLDADNNPVTDFATYVTQPLAADASPIERKHLSRLIRVDFVAAQRGLGSEEADLRSASGPHRVGMFSNQLLKFARQHLNVASTGHGHRADLIKAVAEAQRDLDKKIHEAIADSVEEVKELGYPGLHDPQEIRFRTRIQTADLLDHGTAVQYSMQKESLEDLLPEYSIGLGYQNLQSLSYQLVSFKAARLKPEKGSPAPVHLVMIEEPEAHLHVQVQRIFPDKAHKLISPTEKDASALKSQLLISTHSSHLAHAESFDRLRYVRRIAKSAANPMPTTEVVNLGQVFGDDKKTRQFAERYFRVQHTDLLFANAAIFVEGVAERMLVPLFIERDFKTLNSRYVSFLDIGGSHAHRLKPLVEKLRIPTVIITDIDPSEEKEGKSKKNGEPTKKLVAVANTGQAGLHCGNPTLRGWHPKLQQLDDFKNPTDAQLVWNETADCLVRFAWQLPVAEADGNWPSTFEDSLVLTNVPWFKGLMDEKVDEDGVEIEAPTGALGSVAKRVAEAGSVPELLGALHTLMHSSFDKGDFAASIFEMVSSDEPVVCPKYIADALAWLQAQLEPNQESMV

SEQ ID NO: 63775 - protein, 649 aa, Thauera linaloolentis 47Lol = DSM 12138
MSAVPIFADNDRDAGVVEEICGYLTEDPPRCYFLFAGAGSGKTRTLVEVLRRMTGVVEHEKGRGLARRLRMYGRSIRVVTYTKNAVAVINGRLGDNDLVEVSTIHAFCWELISGFNDDIRAALIAVKEAQLEKETAEALAKPKGITAAKQRDLDQIKEDIEAFRGTGVFIYHPDRETYGPGALAHKHVLDVTAWLLKNSPTLQTILKDRHPIVLIDESQDTMKSMLDALMDLAEPRGSGLTLGLLGDHRQRIYTDGHSDLPSLVPPNWATPELQMNHRSQRRIVALINRIWEAELEGRTQPANGVEQHPRAENTGGLVRLYVGDASLSPEDKVLGERWCADQMREASGATAWSHGDYQLLALEHKLVATRGSFLDAYSAMVLLDPNAAAPTGSGENKGPAAVQILLNELAQLEACVGADGALDEFKATEVFRRHGRLDDMPEDTAARASRVDEMLQAIGVLAAACANPISTVEEVLEPVLRAKLFEVDHRLSAAYADKSPPPPAPGRGDEESKQDRMRRGWCALFASPWNQLQKYRTYLAGNSVLATHQVVKGSEFLHVMVVMDDKSAAGNQISYDKIFGGTELSKADRENVEKGKETTIDRTLRLLYVTCSRAQESLALVLWSSDPAAALARVKGSGWFADGEVGSIP

SEQ ID NO: 63776 - protein, 584 aa, Streptococcus agalactiae FSL S3-586; identical to SEQ ID NO: 63244

SEQ ID NO: 63777 - protein, 513 aa, Streptococcus agalactiae FSL S3-586; identical to SEQ ID NO: 63245

SEQ ID NO: 63778 - protein, 746 aa, Streptococcus agalactiae CCUG 44110; identical to SEQ ID NO: 63142

SEQ ID NO: 63779 - protein, 672 aa, Streptococcus agalactiae CCUG 44110; identical to SEQ ID NO: 63143

SEQ ID NO: 63780 - protein, 746 aa, Streptococcus agalactiae MRI Z1-035; identical to SEQ ID NO: 63142

SEQ ID NO: 63781 - protein, 672 aa, Streptococcus agalactiae MRI Z1-035; identical to SEQ ID NO: 63143

SEQ ID NO: 63782 - protein, 746 aa, Streptococcus agalactiae LMG 15081
MYLKSLSIKNYRKYGEEVQTINFAHSKWSEMSGAEDESEKINRTEEYISKSSSLIVGKNNSGKSTIVKLLNTLQNTKSGSRNIFKYTDFNLKMLSDWYRFNIDNKSKEDIESIDKSDFPKLEFQLILGIDDENDLISSFEDILILGGIETVGTHENQEVAEVTIDVKYEVADVQSFLEELVKIKSSPREKIEQYDQGYQKELRYRKFLSLFSSNYFVLNFYPIRRDEPAKEFSLSSLLKVATIEANTVKNDKTLSQAYNKIVSTYIKNNDIVEIDSLVGDINYQVKDMVDTNIKDILQSAVSSIESTKNLKMNLHPDVTLEKIFANSIIYEYQEGNNNIPESQFGMGYTNLMVIIAKIVDYIELYSEKDINGSVNILCIEEPESFMHPQMQELFIKNISKAIATLLGKKQQLDTFQIIITTHSTHILNSKIQSGNTLNNISYLGQVGVNNIIKNVSDDKIASGRDIDKKAYEYIKKYLRLEITDIFFADAVVLVEGVSEETYLRYEIDRHSILKNHHVKVYRIDGAYAHQFISLLDLLGVRTVIFTDLDLKRSESEKKVDIKDNAEPDVIPSNIPDLEEKYGGVASSLTTNGTIQYFVKKLLNDDKAKYDKINSKIIEILTDKEELVVEYNNISMYSQCKINKYYATSFEEAIVLTNAGNEDENKYKKSLIKALQYVHPNMRYFGDIDETSEIADKSYMYQVKLSDGKSKFSTGIVYLSITDKEFSLKRPQYVESGLNLLCGYFEE

SEQ ID NO: 63783 - protein, 672 aa, Streptococcus agalactiae LMG 15081
MTYTISTENKQLELDIQKDINECLDNFESFCFDAGAGAGKTYALQKSIEHILKTEGENLKLRNQKILCITYTNAAKDEILSRIGKNSAILASTIHEFLWGFISIQQELLTIEHEKKIKEELNGIEQKIIDNPLFGSVNLVDFHNAISDEEFLKVFYSTPISPAGDFKSMIKGYSEYFSPYLSNVNKFSSLVKNVDKKYKLEETLKEIKNKKSKKIIYNPIRNRDKLENYVISHDTLLLYCRNIITSQNLLKRLFSDRYPYVLVDEYQDTDEKVVDIIDSIRKFTICKKNFVVGFFGDTLQNIYSSGVGKLPNKEEYKSITKIFNRRSSNQIVELIEKIRNDNFGQQSIYTDFDNGSYNFYIADDDFDLDIFLQEKNLVSNTACLLKKNDDIVRVRGFDVLLAIIKKFPRFGGNNFDNVNNEFLQKNLQHMGWFLREILTFIDFIQKSSDYNSTVKEIVQFIGPSKSTITFGEMKQFISSLRGINLSTLTIDECINKIANIQERISGEDILRKIFSIDDTTENILLNIKNRAYDYFYYLQDSEEYSEREMIVIDNFFRLDVTQFIKWYKYIFDDLKNEEISYYTLHGSKGLEFDNVVVVLQDNFAGKRNYCKYFFENYNNLTDSDLQFQEVRNLLYVACSRAKIKLCVIYISDTLEDALKNIESIFGEIQYLA

SEQ ID NO: 63784 - protein, 584 aa, Streptococcus agalactiae MRI Z1-217; identical to SEQ ID NO: 63244

SEQ ID NO: 63785 - protein, 421 aa, Streptococcus agalactiae MRI Z1-217; identical to SEQ ID NO: 63603

SEQ ID NO: 63786 - protein, 746 aa, Streptococcus agalactiae BSU260; identical to SEQ ID NO: 63142

SEQ ID NO: 63787 - protein, 672 aa, Streptococcus agalactiae BSU260; identical to SEQ ID NO: 63143

SEQ ID NO: 63788 - protein, 596 aa, Rhizobium mesoamericanum STM3625
MRLSKLSIRNFRNFKFVDIPLHGNIVLLGENRVGKTNLLFAIRLILDPALPDAARQLRLSDFWDGCPADFSQPIEVHLDIADFAGDPALVALLTDFRVAHDPSIARLSYVFRKKAEVTGPAQSSEDCEFLVYGGGVETRTVPGKVRRRIAIDVLDALRDAEGQLATWRTSPIRHLLEEAVAGISRADLDVVAAELDKATKSLEAFPTIKALEDELRAGILHLSGKAHDVDARLRFAPSDPLRLFRAIAMFIDGGKRGIAEASLGSANVALLALKLAEFAWRRRKNERNFSLLCIEEPEAHLHPQLQRSVFKKLLNEASAAQTMVVTSHSPTLAAVTPLRSIIQLRTRDRATQAYSLANLPVTPEELDDLENYLDATRAEMLFARGVIHVEGDAEEALVPVFAASLGFNLDDLGITVCNVAGTNFGPYVKLTEALGVPWSVITDWDPLDGSKPPKPPLGRKRVIDLWQDILAVRGNAPMTAEARATWEAKPYADLASTAAGSGIFLNEQTFEVSVANTPGLLTPLLDILSEQGFGSIRTKRIANWRSGNPVDPAQLLAMVADIGKGRLSSRLAKKSAGLAPPPYIENAIRNVVGRVQ

SEQ ID NO: 63789 - protein, 593 aa, Rhizobium mesoamericanum STM3625
MSSSQVLLQAIEELRANPEQSKAVLETGHCVVLAGPGSGKTKTLTTAMARTLSEDVVDPRGVACITYNNECAIELETRLAKLGIAPGDRAFIGTVHSFALSQVIAPYARCVSIGLPAELKIATKAQARAAVEAAYESAIKGGENPHDRWGFASEKRKRDVDRTRPEWLGRNPELVTFIEHYERELRGQGLIDFDDMPLLAYRMIKENTWIREAIWARFPVLFVDEYQDLGHALHELVLLLCFGGGIRLFAVGDADQSIYTFAGANPALLESLTQRPDVETIKLRFNYRSGGMLIKASLGALGEERDYREVAGAPEGEISFWGAPMGLDTQADMIATSVIPHLISKGTAHGEIAVLYRAAWLGDKVAEALKQAGIPFVRTDTKALVRRSSRLARFIEDCARWATGGWHDADPPFSRLLSQASALMFGSHVSEAEQDALSRQLILFLESSIGSPATTHTWLQRFDRELITPWRALARNTEQEWEICAEMISGTDPTKDLDLPLAQFAGRADSAGRVTLSTLHSAKGREFDAVIMYGVNNGDFPNKRDRKTELGMREARRSFYVGVTRPRKELCLVFQEHHHSPWVQELYDRTQRE

SEQ ID NO: 63790 - protein, 729 aa, Staphylococcus aureus CN79; identical to SEQ ID NO: 62500

SEQ ID NO: 63791 - protein, 597 aa, Staphylococcus aureus CN79; identical to SEQ ID NO: 62501

SEQ ID NO: 63792 - protein, 618 aa, Acinetobacter sp. WC-487
MGILLDTVRISGFRGISNLEMTLSKVTVLLGQNNAGKTSVIKALQLALGDYSRFLSDEDFHINQNISDQKQIIIDVRFIPFEEEKKENFSEDWQQAFEDKIQSQADGQQFVVIRTIAKPDLIKGGYTLERYHLDNWPSYDSWQITNVNISNKLKKKLDFIPFISIDAQRDIHSELKEKSSFIGRILTSIEYSRADVASLEQMITTVNNTAIEKSDPLQKLKNHLDALNQSLNSQGTTELTPFPKKIRDFSKRFSVHYGSSADSSFSMEYHGMGTRSWASMLSVKAFSELLVDKHTEEMEPLFPIMAAEEPEAHLHPNAQRTLYKQLINSHGQVIISSHSPYIAGLAEVDEIRYLKIIEDSVKVFKLRENFEGDNLRKIKREVIHSRGELLFSRAIVLSEGETEDQVLPLLFETYCGKTTFELGINFVAVNGSGAKYLPFLILAKDFDIPVFIFSDGESKTVQELKTNYEKVFGSVDLMSCNNITILNNTDFEGYLLEQNYTALIEHSIKLVNGENFIENWIERKNGTPLKPKKSARPPCTLCNQPIFESLLRDYSGDEGRKRAILEILDSSKPQYAKAIAESLLSLTADELPQKLKDLFQQITTGIGYESLTNTTSDS

SEQ ID NO: 63793 - protein, 633 aa, Acinetobacter sp. WC-487
MNLSQIQLQIVESPLDVPIQVLASAGAGKTRVLTERIKYILANTKKNGVIALTFTNKAADEMLMRLSFEENIQERTWITTIHSMGQRILEKYGHTVGLPTDLHVYERDQDKMEIFMQSLREDGIDVDEYLNVVDSRELKNREKQLQKYLDVFAQIKRELLTEFDILEEYPNKNVWKIYEAYQDSMIRSGGIDYDDILIYAHRILITHDWIAKIYRAKYKHICVDEAQDLNKIQYEFIKAFCGDTLKSVFMVGDPNQMIYGFNGSSNRYLCDEFVRDFLPKKYDLKDNYRSTREVIQVVNKLKSDSQVVSEYALKGQVHFNEYEDEIEEAKGILAQIQNLLQMRIHDEIEGEITLDKMVVIARNRFVFSSLEEVLRDNNIVYSLKKGERLLEPSTKFAKILDFSIRIKLNPKDWVNGKKLCQLLQLEEPLNWNNDVLLELADKINISSDPNRQLLSELLIAVYSLEVDNPKIPKLIKYFRDKFTIWIGRQSNISDTKYEDIRLSIQELDEFNHTWTIFKRKGIGDSLTAFRNALVLGQLSENNSEKGLTLSTVHTMKGLEKDIVFLMGMCEGVFPDYRALSKEQFEDERNSAFVAVTRAKRWLYVSYPKYRKMPWGDFKKQKKSRFMLEMEKDY

SEQ ID NO: 63794 - protein, 681 aa, Streptococcus urinalis FB127-CNA-2; identical to SEQ ID NO: 63096

SEQ ID NO: 63795 - protein, 618 aa, Streptococcus urinalis FB127-CNA-2; identical to SEQ ID NO: 63097

SEQ ID NO: 63796 - protein, 712 aa, Providencia alcalifaciens Dmel2
MHISKLTLVNYRNFKNTSLQFHKGVNTIIGENGSGKSNILRAIRLLLDDTMVRAAYRLDESDFSRSLGQWQGHWIIISMEFEEITTDESVQALFLHGTAPVDDGPIHKATYNLIFRPKKEIRLKLASLGTFEDEQLSEIRDAITIDDYETIFTGRSWADFSNPAVYKSIVGDFDICDFSPETEFPEIGAKVPGFLSVTKEVSLTFIQALRDVVSEFHNNRTNPLLTLLKSKSGEINPATMEPITEMVRELNTSIEGLEDVQSVRNHIRETIKDAAGETYSPASLSIKSDLPEESDKLFQSLRLFVGESEEGYEGAIHELSLGGANLIYLTLKLLEFKYQREKLTMANFLLIEEPEAHIHTHIQKTLFDRITYSDAQIIYTTHSTHISEVSNVSNVNILGRHGSFCEAYQPARGLELTQINSIQRYLDAVRSNLLFAKSVILVEGDVEEILIPILIKLVLGVSVDELGISVINIRSTGFKNVAVLFHDLRIKKRCAIITDLDQAFFDITVQTTDTEGVAKIKSKAAGSQKAGLERQADLTEFTAENPWIVTFYAKHTFEVDFVAAGNHEAIVQTIPKVYKDEGTRDEAKQQLQSRDLRQMGRRTLTMAKQEGKGWFALLLAEYLTPQVQIPTYIMQAIHFAHGTFPLPLIARILQHRAEYRYGSDVLNSPAKQAFLLVIEHFVQGDIGLAELRIAIGHMLPGDAIDAFLAEIQ

SEQ ID NO: 63797 - protein, 593 aa, Providencia alcalifaciens Dmel2
MFTWDPRDLNPEQAAAVIEPSSIFLIACPGSGKTRTLTYKIAYELSRRTDKRIVVAITYTHRAADEIQERIEDLGVDTSGLWIGTIHAFCLEWILKPYGIYSPELAHGYRVIDPHDRERLLERLCAPYKGVTHWDCDYYITETGYQLGCVDMGKHHIIHEVLKAYFDELSANRQIDFELILWHAYSLMRDRAQIAVLLSRVFSHILVDEYQDTKQIQYTIVTSILRAGSGQTKILIVGDPNQAIYGSLGGYAMPVDEFRARAGISIKEFVLSLNYRSSERIISYFSNYSVHATKINGAGKHAKFPSRVTYNQNVTCSDVHDEIVRLICASLANGHSPENICVLAPQWVLLASTTRKLVAMLPDQQFDGPGLVPFSNNFDNFWFKVSKILLTDSSPRLLVRRMRWANDVIKDLDSFGVDTKTLTPRILLREINALTSDETNGLRYLDQAFNALLKRLDISQEIHPALLTHREAFFSSSAARIERLQKEGATYINQVSFFKKVFRERTGITVSTIHGVKGAEFDVVIAFGLLEGMVPHFNEANGHIAASKLLYVLSSRARKNLHLISESGRQRGRFGVYASTELLAACHFSYNLD

SEQ ID NO: 63798 - protein, 583 aa, Providencia sneebia DSM 19967
MYLDRLNILRFRSCNDVSVSFCPDLTVLVGENNGGKSNVVDAIRLLTLPLSGRRERYPEDEDVRRYSTVPSFQIEGAFQGLSDTLKGLLISAVPDPTKSEATFGYRYESRSEHAPRGKTTVWAGRFDTNGPELGSSELIRHVYLPPLRDAHQMLGTSSGTRVMALLRNFLPKEREQDFLAGVRRADNRPEILTTINTDISAALGLLTNGVRPQIAALDFGSETLLDVARDLRFRMADTGLIPEDIRSSGLGYSNLLYMATVVVELTKAKEADLTIFLVEEPEAHLHPQLQVLVLEFLLDQARQSASRIIEPGKPEGRIQIVVTTHSPNLTAWVSPRHLVVMRSRHREQDGIAISESVSVPIAEIGLKPKTLDKISRYLDVTRSALLFGNRAILVEGIAEALLLPVLAQKLVLADDLDGWLKFKGAVIVPIEGVDFRPYVEVLLRPYGDARIADRLIVITDADPTVLGNRKVDLENLAATHGAPDSLIVLTNQHTLEHEIFVAGNESFLKGVFLRLHRNSRRDWEAQIESIPEQDRPNAFLKLIGAKKTRKGDLAQAIASRIEAGEPFVVPPYLIDAIRGASRI

SEQ ID NO: 63799 - protein, 591 aa, Providencia sneebia DSM 19967
MTGIHNLTPEQETFASHIGGAFVNACPGAGKTRTIIARLARIAAKLPSRQGIAILSFTNSAVDEFRERCQAAGLDTLLKYPSFMGTLDAFVRHFVILPSCAVSSQTRPIILDSWDTLGVEIRLLGQFAFRGESVSLDLFDPETNIIDPDRIGHAGLQNHVRQHQIRYQQAAANRRRSLLQAGYMSAGDARAQTLRLIRDNVISEPLARALASRFQEVMVDEGQDCNPLDLQILTWLRAHGVNVTFVCDPDQAIYEFRNGNPQGIQTFKDTYPIESHKGLTGNFRSSPAICQLAATLRREGQVDRSLGESANVDYPILLLTYGGRGPTEIIGQAFLRRVTELGLESTKAIILAHSGKVALRAAGVTSSNSTGNSRIESLARKVSEFWSPAATPRTKENVVQSVEILLLDLMGMRQPDEHLIRAIERLGMDRRAHRRCALSFLINLPKMCRDSDEERLAWIASVHAELEKLHLPLPAGVSIRRFFRQPPNAQWSKHLRMPAALGFSCGNIHEVKGREYDAVCVVVPANRAPENRIEALFESWEARVDAEAKRVLYVGLTRARNFVALAIPNAFAGRCVDLLATGQVPYTRVDL

SEQ ID NO: 63800 - protein, 607 aa, Caenispirillum salinarum AK4
MYLSRIRIENFRNFRDLDVALGGNIVIVGENRVGKSNLLFGLRLIFDPALSDSSRQLGLADFWDGLEEITAETAITVSVEIKDFEEDLDVLAVLTDYRLDDDPDTVRLTYQLRAQPSLDHAPANDDDFSFVCFGGEDEAKRFGHDLRRRITLDLLPALRDAEGDLAAWRRSPLRPLVEDAFVGIDKEALKGISEKIAEATAAAIDFDEVKALEASIAELFLAMAGSKQDVHPSLGFSATDATRINRQIRLLIDEGRRGVADASLGSANLIFLTLKLLDLQRLIAANKRDQSLLAIEEPEAHLHPHLQRLVYKHLFEAIVDGEDGANGDVGGAAAVPLSVILTTHSPHIASVAPLESLLLLRSHSNEGTKGYSVAEADFTKADTEDLERYLDVTRADMVFARGVILVEGDAERFLIPAFAEDMGISLDEHGVSVCSVAGTNFQPYAKLLCALGIPFSVITDYDEVDETPRAYNRALKLVRIIDEASGGDDTDAVIKTITKKKTWGETFAEIQKFGIFVNWSTLETELFEGDYAQEMINTLHEHNFSAKRKATLNALAANPTDFDADELLKMIEQMGKGRFAQRLATRATGKLVPKYIEEAINHVIGLV

SEQ ID NO: 63801 - protein, 598 aa, Caenispirillum salinarum AK4
MSSASSDHSLYLRAAEDLRSNERQWQAYQSTGHCVLLAGPGSGKTKTLTIKLARMLNEDVDEPRGIACITYNNECARELENRLEALGIAPGGRVFIGTVHSFSLTQILLPYAKVAGLGLPDSFTVANRQQARAALAAAHANVIGGPENPQNWEMRLGRHRRRFLNRELPEWQTLDPQLTAFVEAYEAELRAAGLIDFDDMPLLAVRALAENRWLRTAMVAKYPILAVDEYQDLGRALHRMVMGLCFSAGMRLFAVGDVDQSIYGFTGATPELLRRLSERDDVETLRLGLNYRCGSRIVSASEYVLGEERGYEAPHDAHEGTVYFHPCTGGYAEQARYLIEELIPEIRERRPDINLGEIAALYPAAFLGNELANAAAEHGYSVIRTDGNALYPRGSKLMRWLEQCAMWCCGGWRSGAPRLSRVVSEGARLFHEAITDEDERLAFQRDLTAALWDRRDETVDLHDWLTALHDDIIRSRVSLTRSLDDEYVTLNNFLTRIGPAGDVDDFPLAEFAGIGSGLDRINLSTLHSAKGREFDVVILFGAEEGRLPRNYATENDLREARRLFYVGFTRARHEIHLMYGQHNPSRFVTEVQDRLEGE

SEQ ID NO: 63802 - protein, 617 aa, Kocuria palustris PEL
MRVRQLEIENFRGITAGRVIFQQHTLLVGGNNIGKSTVCEALELVLGPERLYRRPVIDEHDFSHGDYLGDAGEPREIRVRAVLTDLSDEQLRRFFQHLRRWDDAALSFIDEEPDSFQSADRDGTSWALPVIFIGRYDREEDDFIGDTYFDHPLPEHDELDEDQRASLGSGRAQFNRAHKRLCGFIFLRALRTGSRALSLQRGSLLDTILRLGGEGAAEMWRDALGALQDLDPAIGEIEQLKVIRENIRTRLGKFVNLAPGEDSASFFASDLTREHLREVVRLFVATQPSNHSVPFSKQGTGSINLLVFALLTIIADLKEDQSVIFVMEEPEIALPPHTQRRVTKYVVQQMGQSIVTSHSPYVIEQFDPENVVILSRDGDTFSGAPIDTTSVKPKTYRTQRRQFAEAILSRAVFVLEGQTEMVAVHAVSSALEQFRDDYSHVDLTGVTLFNAGNDREVPRYALIFKALGKRVYGMRDKLNAPDAAGATENIKSFDDFWESQETGIEQILVKQVPTRVLRSFLDEVVQRDDYPTSHPYVAEQIADDDLAALAAKVLKARKGDAFGFGYTGTLIEQCQAEAELPAFIRDALLTINDQLQDEPELILDDAAPATGSGETEE

SEQ ID NO: 63803 - protein, 575 aa, Kocuria palustris PEL
MEVQLSETAQGALDHGCPVLVLGGPGSGKTTLSLLKAQTMFPALQAGQEILFLSFSRAAVRQVEIRCRDILPYDERRQIAVRTYHAFAMDIMRAHGRLLTGRAPRIIYPGEENLAKAAFDGDWEAEAARLARDEGRYVFGQFAAAAAQLVAGSASIASLLVNKYPVIILDEFQDTDDAQWALVKALSARSKTMFMADPDQRIFDYDARVDPERLNHLRAHLAPAEFDLSGENHRSPDAGILQYANAVLTNRPLPDTKDVITRAYWPNAFDSTVHAGVVWMLGSLRKAGIIHPSVVVLARTNSLVGKLSTILGQEHSFNGQTVMPVEHDVLWDADLTAAAALVVASILEWPSHSKDDALGQTFDRIADYFDTKNAASASNAARQASERYRTAAGRARRGEGQRLKSTKALTASYDSGLTLQGDPARDWLRARDLLGAGNDLSDLLANAKFVRLFRATDEIGSRLASAWDLRGSYGRAIDLVRRALEAGRLQADQRDPRGCVLMTIHKAKGKEFDGVLLVEGQYQGSFFRDTDTEAQRAAARRLLRVGITRARHQVVIVRPQGAPALVTSAGASRSA

SEQ ID NO: 63804 - protein, 587 aa, Pseudomonas sp. UW4
MYLAELNIRNFRKLRELQLRFQPGLNVLVGANNVGKSAAVDALRALLAGYEEPYPRFGPEDRHRSPEQEQDGDIEFHYVFRELGPDDEADFLAALKPMAGGQAEAHFHVCYSDADQGGRLRVRRWCGDYQELSLTADMIENLRGVYLQPLRDAAQGMRPGRNSQLSRLLHLLTDDAGRQGINEALQRLDDELRNHAPILGTQTAIADRHNAMLGPQLRQALAVGLSASDFQRLSTRLTLSVDDFELEHNGLGFNNLIFMAVVLSELARNSDAAYRGLIVEEPEAHLHPQLQAVLLRYLASLQEVAGEQPVQLFVTSHSPNFASNANLDCLVCLVESEGRVETFFPREVRFENGKREKLERYLDVTRAELFFARRVIFVEGAAEMMLVDALATSAGFDLRGHGVSLISVEGLNFDSFLPLFGERALKIPVALITDADPSGVVVLGQPAQPLYPALGSAVQVSDNTANMLERQDRYVRVFHGVKTLEYDLALHPNNRTAMLSALAEIHPQIAQDLEGVVNAAPDDAAKARALFCGMFERPSTQKNVQKGRFGQSLAFVIGEGAACEVPPYILDAIAHVCLVPEAGAEAE

SEQ ID NO: 63805 - protein, 577 aa, Pseudomonas sp. UW4
MMEPSPEQQLVIDAPLEPLAVTACAGSGKTATAILRLVEMRRRLAGAKGRIALLSFSNVAVETFRQGYQELSQILPHGSGRNRVDIDTLDGFITSQIIRTHAHRTMGANQTAFLVTGGEPFLVGFNCPTRDHPIPVSDIKVRFNAGQPLFYYTVHGNEMPLNQPDASRVVARLGRVGGYTHDLGRYWCYRVLSEQPVVLRALARRYPHIIVDEAQDIGVLHQELLELLIGAGVQVSLIGDPNQAIYEFADANGLFLRTYHEREGVVPYNLTRNYRSLPSILSVANHLSGRADDPDRDDEPPPLGAYFIGYDEQALPHLLESFHAELGRQTINPDRAAVVCRAAAMASRLSGQRDPDGRGAVKLFAEAAVLRDQRSDFLGAFRMVARGIVSQLEGPPPGLLNRLSGVAHDRELRKLRRRLWLFTRDAAQGLPASSLPASGQWLPLLQERVARLLRDIQRDFGMAALDGLNRRLTRALLPAGPLRMEPDVAVEQEPKARVRTVHQVKGESIDAVLYVANRANIEAMLAGMDTEVGRIGYVAVTRARNLLWLAVPAAALVVLRPQLEQAGFLEAIHAIGG

SEQ ID NO: 63806 - protein, 776 aa, Pseudomonas sp. M1
MHVHSLTFKNFRRLKAARIDFANDLTIFVGANNSGKTSATHAIELFLSGGKEKFTVHDFCAGCWADFESFSAEDAADAKVKFPAISLDVWISVDADNLYRVVELLPRAAWEGSLVGLRIEFAAKDAAQTLVNFRAKAAEAAKFAKTKEKDGQDYKPWPRNMRDYLSRELKNEYGLRYFILDEAQLKAETAAAAYTPKEIIGDAERSGHTVINSLIKVDFLSAQRHLSDGSAQARTEDLSKRLSRFYTRNQKQREEDHNALGALALSEDQLTKHFADVFSDTFKSLRKLGYPGLANPTLEIRAALKLERLMGDQQAKVHYLLEEATAEGEALALPDSYNGLGFKNLIYMGVELLDLHSAWSTTEEGEEDKRQPIHLIFIEEPEAHMHAQLQQAFVRKLTDLISPTGDDGYATQFVITTHSPHILYERGFQPIRYFRRSPETGAKQSSAIFNLSAFYDQNEFDRDFLQRYMKLTHCDLFFADAAILVEGNVERLVLPLMIEQGAKRLSSAYLSILEVGGAFAYRFRKLIEFLGLPTLIVTDLDSVHPASSKKEEETTAGDGAAAEAAQVLDDAEEEDDDGEQDAQAEKKPKPKSKCPASTPGAVTANQTLRQWLPGKSLVDELLAAPAGDRLQAPTADGGAHVMVAYQGPVNATWGKDTLELKSRTLEEAFAYENLVWCQKKEHHEVGLRWSKSSTMSLEELAAKIHKRVKGESFKKTNFALGLLASSDAGWVVPAYIQEGLDWLTTHVAISDDTIGRATATLEPAPEAALSAVEAEK

SEQ ID NO: 63807 - protein, 629 aa, Pseudomonas sp. M1
MTSRAGKPDTLADIELRALLDADASTGFVMVSGAGSGKTTSIVKALDHLRKTRGPYLRQRAKKIACITYTEVAVGEIWGDVGNDTLFHVSTIHSFLWAALKPFQTDIASWVERRLDQKIAATEAKIAAFTNRTQEKTRVQAAADIERYREQKLKIVSVDRFTYGVGSDYPKGILGHDDVIRLSTELIRTQPLIAKVVGQKFPFVFVDESQDTAPDVVEALKAISETLGSKFCLGFIGDPMQKIYTAGAGAIEPLSGWKTIEKPENFRCPVAVLNVINNIRAGGDGLTQTGGKTELVGEERKPVQGTAKLLIVPKDDRSERLAAARQWLADRHADPLWLSDELEADVKVLVIAHRMAASRLGFGSLYEAFHDKTSEGLKDGFDDGSHWSVQPFLKFLMPLVLAKGTDDQFEAMNLLRRFAPALQREHARANALPAILKELDERVNALAESCNATSTVAAFEALRHLRDGRMFRLDDRLLAAMAEYDPSISPTDPGDAAALQKLLHTPMKELWGYRTYIEEQSPFETHQGVKGAEFSRVLTVLDDEEGRHNQFSYGKLFGITPPSDTDRTNLREGNETTFDRTRRLLYVCCSRARKDLAVVFFADDPAAAHAAIAELGLFPVDDVHNLAID

SEQ ID NO: 63808 - protein, 698 aa, Cylindrospermum stagnale PCC 7417
MKIESITLKGFRCFGDTPKTVKLSDGITALIGANGSGKTALLEGLLRVFGITGKQRTILRTDFYTSPSTPDEDSSTRELYIDIRLTFPELSEDAPVTNPAVPACFRHMVVDQPNGTPFARVRLEAKWVDDRTGGDGDIEQNIYWVLTANELPTDKDKRPCEPTDRGRIQVYYVPAIRDPSSQLISSSGAMIGRLLKAIEWTSETKESIETASARIREVFGKELAINSINQTIASRWKELHNDTFDAEAEFNVASRKFEDIIRKFNIVFSPNEFNGERDLDALSDGQKSLFYFSLVASIFEVESKFINQNIAIKNTKKIDDQENPENTDEDKPSRTGFNSNRIQTPILTIFAFEEPENHLAPYFLSRIIKQVQSIVNEYPAQAILTSHSPAILGRIEPEQIRHFRLDIKSRNAIIKEITLPSQAEEEAKYLREAVKAYPELYFAKFVILGEGDSEQIVLPKLASAMELEVDPAFVAIVPLGGRHVNYFWKLLNDLQIPYATLLDLDIERNGGGWGRIKYALKQLLEIGIDAAYLLKFKVAEGDEQEISHASLETLHTNNEPIDENHPSIKILESFGVFYSAPLDLDMIMLSSFPDAYKAIIDNRSRPRIPDKNNANYNDDMDGVKKAVLGKDANLSTYSEELQELLPWYRYLFLSKSKPSTHLQALCKIDNKDLKQKTPPVLERLLKHTTKEISANKTL

SEQ ID NO: 63809 - protein, 629 aa, Cylindrospermum stagnale PCC 7417
MTFIIQTKKWVPVGNMTLERNAYEVVCSNSNYSIIAGPGAGKTELLAQRACYLFQTGLCPDPYRILAISFKTDSAKNLKERVAERCSKQDAMRFDSLTFAAFAKSMLDRFMGALPELWRPKYNYELYFPKDSEYQAFLISLIKAAPKNFINLQNLKPKEFEKDWVLGSTLPLEGIQTTCMRAIAAKEWWHACLHLGKKSRLTFQMIERLVELLLRTNPQITNALRGTYSHVFMDEFQDTTHTQYDLIKTSFLNSQAVLTAVGDNKQQIMRWAMAMDDAFSIFEKDFQANSISLISNYRSSPELVRIQDLLAITIDPNYTQVESNKEKNIAEEACVIWDFETQTLEAEHLAKTISNAINIYQLKPKDFVLVVNKLARSYEPCLTEAFKKYDLKVRLTLPNDILDKELTEIFINFLRFGSKEGTNPYWSDCNKILTSIYGIDPEDVRSTRELQDKLDSFHLSLQNKMTNLDFSDDTQVNSILADIENFIGKDYIKLSYPQYQQGDEYEKVIKAISNQLQTSHTNSTDKAWKSILDDFEGIDSVPLMTIHKSKGLEYHTVIFVGLEDSAWINFKEQAQESRSTFFVAFSRAMQRVIFTYCKQRGARDNTRDDISSLYQVLQGAGVKTEQIQV

SEQ ID NO: 63810 - protein, 659 aa, Brevundimonas diminuta 470-4
MFIERLSLTNFRCFGPEATSIGLTSGLTTFVGVNGAGKTALMQSLQRLFGVTGDQRRLRRQDFHVPAAELVAPLQRSFVLEAIIAFPELDADGSGGAAIPEFFHQMAAEDGGKLKCRLRLEANWTDDGSLDGAIEQKYWAVRTFGDFTDGDCTELKAIDRARIQMIYVPATRDGASQVTAFLRGRLWRAINWSQGVRGTFTNAGAALNGAFAGEPAVDVIAAAVTRRWQEVYTAGTDTTPVFRPLDLRFEHFIRKVEVVFRPDEAGRERALDDLSDGQRSLFHLAMTAATLDVEAGIVADPAGAGFQAGGVPLPALTLIAIEEPENNLAPFYLSRIVRQIQDLTKSPQAQAVVSSHSPSILARVDPTQVRHFRLDPHERSARIRPINLPVGEEEASKFIREAVRTYPELYFARFVVLGEGASEEVVLPRLAEAMGLDIDRSFVAVVPLGGRHVNHLWRLLTDLDIPHATLLDLDWGRAGGGWGRIKTACTQLLANNVTPQAIFGQHLDPLGPAANLVAFDGLPVGDTASLIHWMNWLRQFNVFFCTPLDLDYSMLSAFPHAYQVIEPGRQGPSPAGEPRTSVLGDDGQPHLYDASNDALMRWYRYLFLGRGKPSTHVRVLSAHDSAALAVGAPEELRALLTSIVARLTPPPPSLPPVGP

SEQ ID NO: 63811 - protein, 627 aa, Brevundimonas diminuta 470-4
MRLVRPEDWRPSGIDDLEPAAWNALRHAGSACVVAGPGAGKTEFLAQRADYLLETGLCRAPHRVLAISFKTDAANNLASRVRQRCPPEFARRFVSVTFDAFTKSLVDRFLNAIPADWRPTRPYEIAFPKRKAVEGFLTLARLNAPPQWQAEIAGYSADDFETKIVGSYRLPVGPIVPQNAAEFTIARWWATQLRPGQPSLLTFIGINRLAELLLRANPHIRRALVATYPFVFVDEFQDTTYAQYDFLNSAFSGGQTIITGVGDDKQRIMVFAGARKDAFQRLQTDFQGARFPLLFNFRSSPDLVAIQHVVARALDPNTVQTVAQTVRQVNGDVAQVWSSQTMAGEAAYLAQWIANDMAARSRAPRDYALLVKQKSDDYEQELAAAFANQGLRIRNESHALGKTSLQDLLSDELSRLGIAIFRLGASRRAPAAWQLVSSSVLALRAVGQADDVRAAKVETELTAFLAALRADMAATPPSEQSAVDFAMRVFNYLDLDAIARTYAEYGVGDQLQIILEAFCIHFFRCADGAPDWTSCLDVFEGLNQIPMMTVHKSKGLEYDTIIFVGLDDRAWWSHTPGDPEGVAAFFVALSRAKQRAIFAFCQQRGNRNNVAELYQLLTAAGVPEIAV

SEQ ID NO: 63812 - protein, 626 aa, Brachyspira pilosicoli WesB
MYIRELIITNYKNIKNVKIDLQHEYSMIYLTGENGIGKSNIIDIIFKLFTYKKNLFEKEDFYKNEEKIEIEIKLELYTDEIFKDYIYKDNDKYFMKVVYKQYSSNDEYEWFYKNLTEEYKLHNNILTNFICYKYSPREFDNNFMFNKSNRIGKFISKIIENQIKKYQNDDNELQKLLKKNYKNCKNELNKIFKPIFNKPNQELKLNIEIDDEIKFLLKLFELVHYHNGDNKLYLNQLGRGRGYYLYPFIDFLAFLYDKINNTKSQGFNTNIIILFDEPEVFLSPFLQRQFMDHWLSIFNNNQDYKIINNIINIITDDNEEIDYKITPIFFVSTHSAHIIPHLELNKKKNILSIQRLYYDEENTVKIASLDKKDKLKQFIIFDRNILEGLFAKKIILVEGDTEVGFLPSCLNYNGINIHQEHIYIIKAAPNNFPSLAKIFSKLQIKTYILTDRDCKNKEIKEQRNNKIYQIYINEEYGYVNKRVYDLYESIKNCNNVKMFVSDYWDFEESILVCLKNHFQKIYISISKSKTNDKDKLIEKVQDENSDEEFTKKLLYMRDNNKTIDDNYKLIQKIIKENLKLKQNEYKNVEKIDCGNMNNEAIKNVAEENYKLPKYIINLIKELKNDK

SEQ ID NO: 63813 - protein, 535 aa, Brachyspira pilosicoli WesB
MINNDKINKILEKHKNDKEQLDFIKSTEQSLTIAPAGYGKTEMLISKLNYIIESKQIKYPKRILVLTLSNVAKHTIESRLNNNQFVDIYNFHNLASRILRLQGKQYLNIDYQYEYKHYNLKDKLQEKYKNDKIEKILNYYREKISEINKKFHEIKFDDKIFQYVDTINNNKEICYEYVIYFAIVLLNNFNINEIYKNLYSYIFVDECQDINLLHLILLRSIADNEYNKIFFLGDTFQSIMKFADALGEQIEYLLKQHFNITKIIELQKNYRLEGRENISNFQKNIRNYDKKLQIELDEDFQIKSFNYFEEEISFINNQINKIISENKKAKIAILFSNQFYFNDDKILNLLFENLIKENIEYINILKTEKELNTIMKNVFNIATNIKILNYNNLLKKIQNYYDNDISKLIEGYRNYCLKFGIDFNTIIEVLKEKDLIKYAPYCSVNVNILNIHKAKGAEWDYVFIPFLNKKQFIYKKNCNKCNNICYNHIIDINEEFYQAFYVAITRTKYGLYITSTKNNASCLFYHSLKLIKNIY

SEQ ID NO: 63814 - protein, 661 aa, Pediococcus lolii NGRI 0510Q
MIIEGFRSFGKKTEINIDDFNTFIGNNGTGKTTTLQALNKIFSTNPKDRIIEATDFFVSPQEENEQTTNRDLSIDVIFGISTEKLENDGRAAAIFLKNMTINSPEDEPYLHIRLEASWTSEGGASGTVDYNTYYVDRENNSTIASRLQLNSLRMIYVPAVRNPTRILKDSSHSLLSSLIKNVVWAEQTKEKINNENKRLNNDFLSERGMALINDKVRKIWDEFCPDERYGGAKLEISPTDLVAMSKQTQIVFNSSNVEHNYQIDEMGDGSRSLFYISTVKTALEIENELIDLEAENDPIINDTPPLLTMVAIEEPENHISPHLLGKLMNRLLEIAKLKNAQVLLTSHSPAIVKRVDPLKIRHFRIKSREKYTEVHKLSLPNKEDEAYKYIKRAVQTYPELYFAQLVVLGEGDSEEIILPRFFEAKNKNLDEAGISVVPLGGRFVNHLWRLLNQLGIPYITLLDLDKERKGGDWQRIKYVIKELKKLKENDEELNEKLSVFEGQKVVSSEKDLKEAIDALENKNIFFSAPLDIDFMMLKAYGGFYKGLLNDDEGPRYKNKQGKNVKVPKKNTKSLEEDFVKKIEDAVAETLKKDGGTGESYNQEERELMIWYNYFFLGRGKPSTHILALSSIDDETLNTNMPKVIERLLVKAEYLLEGENEK

SEQ ID NO: 63815 - protein, 605 aa, Pediococcus lolii NGRI 0510Q
MIKEVWNPRNGIKLEKNAKKAVFSEENTLILAGPGAGKTEMLAQRASYLLETGKCQNPYRILAISFKRDAASNLKERVKERTEKKNNIRLDSITFDSFSKRLVDQFIMAIPLKWRPPKGYTIEDSEIKETIYKNIEKPVYKYSRTTINNFFDKIKKPTLEEEPDGVWQLSLKGTENLKPNLTFKMINQLAIFLLQTNPNIKRLIQNAYPFVFLDEFQDTTALQYELITECFKDTTTVITAVGDTKQRIMGWAGALKTIFKDFKRDFSANELSLKMNHRSAPALVKLQESVCFLLEEGIENIRTSEKWGKEDGEIKLFKSTSEENEAQLVGDDILKRLSKGLRPEDIVILCKQKPDVYTKCLKNYLEEKDVQIRVEDPYQSLLKEPVVDLILKTISAADNTLESKEWQEYIDIVCKIKQITTSENDRQFGECLKSLNLFLKSFKKKLTGALDSEQVKKIKNEIMSYFKTESIQEAFPEYRNKSYLDRQLENFCDLIIKTKDNATNWQDIIDNFKGKNTISIMTIHKSKGLEYEAVYFVGLEDQGFWNFKKQRDEDIRAFFVAISRAKRILACTFCQKRNIDKVKRRHDEIRELYKLLDDNAEFICD

SEQ ID NO: 63816 - protein, 702 aa, Pseudomonas putida CSV86
MAIRFHGRDIMRIERVEIQNFRLLQNVSLGLEDGTTLIVGRNNCGKTSIAEVFRRLLSDRAPSFRLEDFSLGSHEEFWTAFNAFHGEIARSDVAAMLPVVRVTLDISYDIDAPDLGPLSECIVDLDPDCSCARIVLTYGPRATALESLFAEIIAPNAEQGDQRPGFFSLIKKRLAAAYEPRLEAVDPNDPTNRKDLDLKALTTLIRGGFINAQRGLDDDTHRERDVLGKVVEVLFQSALTDPTDPEKRTTAEQLHGAVEKIQKELHDGFNAGLTSLLPTFELFGYPGLDDPGLTTVTTFDVERLLKDHTQVRYRGVNGLTLPESYNGLGVRNLVYILLQLLKFFREFQATPAAASVHLIFIEEPEAHLHPQMQEVFIRQLHLIKGAFEQQLNDSRPWPVQFVISTHSPHMANEARFETMRYFLSMTDEHGIRQSKVKDLRWGMGGAPAPDRDFLYQYLTLTRCDLFFADKAILIEGTSERLLLPTMIAKTDAAAVGEPQLASQYLTVMEVGGAYAHRFHDLLNFLELRTLIVTDIDSVKPNAERKRNACPVAEGLYTSNACLKDWFEAEVTPAQLLAKTSAEKTRGLRRIAYQIPEGNEPGPSGRSFEDAFILANLDRFQLGQGDVASLAYEHAADQKKSAFALKYAIDDTNWNVPRYIAEGLRWLAVGAPVVDTQMAARTMAAVVEVVGEAVAAEGGQGDA

SEQ ID NO: 63817 - protein, 584 aa, Pseudomonas putida CSV86
MPDIQESPADRAGREALERMFACLDEGQSFRLEAGAGAGKTYSLEKALSRLIEHRGPALIRERQQVACITYTNVAKDEIISRFQAHPAIQAETVHGFCWSLLRDFQSSLRAFLGAEAFWQDRFETVGGVGNRRIHYEMGIPRVSEDEVSIRHEDVLTLMVQALPSPKFRAVLTSRYPILFVDEYQDTDEHFVGALKSWFLDRGEGPMIGLFGDHWQKIYDEGCGLVEHEALQPIEKNANFRSASRIVDVLNQMRPGLQQEVRDPDLIGEARVFHTNRWPGARRTGAGGGHWTGDTSPEAARAYFECLKVQLNVEGWDLSPQKTKILILNHRGIAREQGYSSIPPIFGQFNDPWLKKEDPHIKYLADQLEPACVAYQQRRYGAMFGHLASDRPTIQRHSDKVAWTEAMEALLELRLTGTIGEVIDHIMAVPQMQLPNAVLRNEQGLQDAGVEPGEDEPRRITQLRKLREVPYSELIALDQFIDGHTPFATKHGVKGAEFENVIVVLGRGWNQYNFAEMLEWFQPGPPANRREKFESNRNLFYVACSRPKVRLALLFTQLLSPAALAQITAWFGAEHVFELPANPG

SEQ ID NO: 63818 - protein, 712 aa, Cronobacter malonaticus 507
MHISKLTLVNYRNFKNTSLQFHKGVNTVIGENGSGKSNILRAIRLLLDDTMVRAAYRLDESDFSRSLGQWQGHWIIISMEFEEITADESVQALFLHGTASLDAGPIHKATYNLIFRPKKDIRLKLAALDIFDDEQLTEILEAITIDDYETIFTGRSWADFSNPSVYKKIVGDFDNCIFSSETEFPEIGAKVPGFLSVTKEVSLTFIQALRDVVSEFHNNRTNPLLTLLKSKSGEINPATMEPITEMVHELNASIEGLKDVQSVRNHIRETIKDAAGETYSPASLSIKSDLPEEADKLFQSLRLFVGESEEGYEGAIHELSLGGANLIYLTLKLLEFKYQREKLTMANFLLIEEPEAHIHTHIQKTLFDRIAYSDAQIIYTTHSTHISEVSNVKNINILGRHGAFCEAYQPARGLVPSQINSIQRYLDAVRSNLLFAKSVILVEGDVEEILIPILIKLVLGVSVDELGISVINIRSTGFKNVAVLFHNIRIKKRCAIITDLDQAFFDVTPLPTDTKGVAKAKAKAAGSQKAGLERQADLTEFTGDNPWLVTFYAKHTFEVDFVAAGNHEAVVQTITAVYKDEETRKEAKQQLQSGDLSQMGTRTLTMAKQEGKGWFALMLAEYLTPQVQIPAYIMQAIHFAHGTFPLPLLSRILQHRAECRYGSDILNSQAKQAFLLVIERFVQRNIGLAELRREIGLMIPGDPINVFLAEMQ

SEQ ID NO: 63819 - protein, 593 aa, Cronobacter malonaticus 507
MFAWDPRDLNPEQAAAVIEPSSIFLIACPGSGKTRTLTYKIAYELSRRTDKRIVVAITYTHRAADEIQERIEDLGVDTSGLWIGTIHAFCLEWILKPYGIYSPALAQGYRVIDPHDREHLLERLCAPYKGVTHWDCDYYVTETGYKLGCVDMGKHPIIHKVLKLYFDELAANRQIDFELILWYAYSLMRDRSQIAVLLSRVFSHILVDEYQDTKQIQYTIVTSILRAGNGQIKILIVGDPNQAIYGSLGGYAMPVDEFRTLAGISIKELALSLNYRSSERIISYFSNYSVHATKIKGAGKHANYPSRVTYNQNVTRSGVHDEIVRLIRMSLTNGHSPENICVLAPQWVLLASTTRKLVAMLPDQQFDGPGLVPFSNNFDNFWFKLSKILLTDSSPKLLVRRMRWANDVIQDLESFGVDTHTLTPRILLRESNSLTVNETDGLRYLDQAFNDLLKRLNISQDIHPALLTHREAFFSSSAARIERLQKEGATYINQVSFFKKVFRERTGITVSTIHGVKGAEFDVVIAFGLLEGMVPHFNEANGSAAASKLLYVLSSRARKNLHLISESGRQRGRYGLYTSTELLAACRFSYDQD

SEQ ID NO: 63820 - protein, 594 aa, Cronobacter malonaticus 507
MRISRIRLINFANFSDVDVETGESIVIVGENKVGKSNFIRGLQLILDPGLSERDRQLGFEHFWDGLGEDKLGETIEISLDLTDFTDDPRLMAHLNDCVLNPGPPMVARLTYRFQPKAELNRAPESLKDYEYVIFGGADPDMHIGGAFRRMLPIDVQGALRDAEKDLSSWRNSPLRPLIEELSASLDDETREEIQTQVDEAQRELADHDEVAATAERISQRLIAIAGEQHAVPVSLGLAPTRVDVLLRSLRLLLDSGIRGIGDASLGTANLIFLALKSLELDRLVDNGERDHTFFVVEEPEAHLHPHVQRLVYRYFLGTDGENGDEGTPLTTILTTHSPHIASVTPIRSIVLLRHDPEEGKTIAVSTANAPFTPRDENDLQRYIDVTRGEIFFSRGVILVEGDAERFLVPAFADALNIPLDMLGITVCSIGGTNFTPYVKLLGPRGLNIPHVILTDRDPMENGPPLVRRRFINILEVLEEDVEHDGMDDDEVIELAGEYGCFVNETTLEPELFTGGLGEAMKSVIEQELSPRRATLNRIQTWVDDSNQLDNVRLLELIERIGKGRFAQALAPLVSEDVCPDYIREALEYICDAVT

SEQ ID NO: 63821 - protein, 605 aa, Cronobacter malonaticus 507
MPSRSVSAAYLAQAAELVGNPGQLAAYHSQGHCVVLAGPGSGKTKTLVLKLARILAEDVQAPRGAACITYSQECARELTRRLEALGLREAPNLFIGTVHGFCLRHLLMPYGRLADLPIPFPLSVASQRESERLLRQSGDRLFGANHPYKAMDLGRHRRSVLNRNSVAWRAEEELAAWAEAYEAALRQQGLIDYDDMVIFGQRLIIEHDWVLPLVQAKFPILAVDEYQDLGVALHRMVKRLAFEGGVRLFAVGDADQSIYGFTGADGALLLELAGRGDVETVRLQLNYRSGAGIVNASEMVLGEVRGYRANDPNRQTTIAFQLCPDGLVDQAVHAVAQIIPAALAAKPGRTLGDIAILYKDYRAGDVVADAVTAGGFDYIRVDTAAPYRKVALTNWVEDCAAWCAGGWRIGRPQLRGLIDRYLAFHRARLDDACARRKGQELTRLLWVLRADQYPACDFVASLRNGLVDSLLATEPTLSDQGEQIDRMTAALAEGGALAMLDITSLGGRDGSPEHLNLLTLHSAKGCEYDVVIMVGLDLGNLPWRNETPEKLRESRRLFYVGLTRARDEVHMLYSGFVDGRYGPMRLGRSPFLDELEARMRGAGLR

SEQ ID NO: 63822 - protein, 527 aa, Enterococcus faecalis OG1X
MNKIRLIYVPAVRDPGKQLKNVSGSMIHQVMNSINWKDETRENVKEHIDKINEDFSVESGVNILKNAIQKEWYEYQSDTRYTKADLKFNATTIDAAVKNTEVLFSPTETGREYSIDEMGDGMKSLFYMSIVDSILDVEAKINEEMVNGEDLSFTKEPPVLTIVAVEEPENHISPHILGKLVNKLRDISKKGNAQTIITSHSPAIVKRMNPEEIRHFRMNYGTLSTSIKKLTLPDNETNSDQYKYVKEAVKAYPEIYFAKLVIFGEGDSEEILLPKFFEADGSGLDSSGVSIVPLGGRHVNHFWRLVADLGIPYITLLDLDREREGGGWGRIKYVIKQLLQIGINREELLKLKNGKLLDDDRLNEMHSWAVTNVDNMNNIITRLENHNVYFSSPLDIDFMMLESYGQDYISTISDREGPRIKLSGTNKKVVDLNDSEKELDEFKERIIHDIGKTLKNNDATGTTYSKTQKELMIWYNYFFLNRGKPSTHIAVLSQISDSKLVEQSPEVLTRMMSAAKKLISEQRENYE

SEQ ID NO: 63823 - protein, 620 aa, Enterococcus faecalis OG1X; identical to SEQ ID NO: 62995

SEQ ID NO: 63824 - protein, 690 aa, Enterococcus faecalis M7
MKLKKMILKNYRSIGDDEQVIDFENLTMLIGNNSVGKTAALSALNKLFSDVPNERVLKRSDFHLPKGIQPENFKKQELVIEAIFEFDELLDDQAESSPAIPFFFESFIVEGPDSLPKLRVRLEASWEDGSTVDGTIESNIYFITCPETSEVTDDNKKNASRHDLNKIRLIYVPAVRDPGKQLKNVSGSMIHQVMNSINWKDETRENVKEHIDKINEDFSVESGVNILKNAIQKEWYEYQSDTRYTKADLKFNATTIDAAVKNTEVLFSPTETGREYSIDEMGDGMKSLFYMSIVDSILDVEAKINEEMVNGEDLSFTKEPPVLTIVAVEEPENHISPHILGKLVNKLRDISKKGNAQTIITSHSPAIVKRMNPEEIRHFRMNYGTLSTSIKKLTLPDNETNSDQYKYVKEAVKAYPEIYFAKLVIFGEGDSEEILLPKFFEADGSGLDSSGVSIVPLGGRHVNHFWRLVADLGIPYITLLDLDREREGGGWGRIKYVIKQLLQIGINREELLKLKNGKLLDDDRLNEMHSWAVTNVDNMNNIITRLENHNVYFSSPLDIDFMMLESYGQDYISTISDREGPRIKLSGTNKKVVDLNDSEKELDEFKERIIHDIGKTLKNNDATGTTYSKTQKELMIWYNYFFLNRGKPSTHIAVLSQISDSKLVEQSPEVLTRMMSAAKKLISEQRENYE

SEQ ID NO: 63825 - protein, 620 aa, Enterococcus faecalis M7; identical to SEQ ID NO: 62995

SEQ ID NO: 63826 - protein, 729 aa, Enterococcus faecium EnGen0016; identical to SEQ ID NO: 62500

SEQ ID NO: 63827 - protein, 597 aa, Enterococcus faecium EnGen0016; identical to SEQ ID NO: 62501

SEQ ID NO: 63828 - protein, 674 aa, Enterococcus faecium EnGen0001
MKLTQLKLENFRSFGPFAETIDFNSITGLIGHNSAGKTAILSAIRVLLGNLRLKQSDFHCVNEQSIEHIEMKIEARFDFFDSSESQEECGETSIPTFFETLTIQNEGENPYIRIVLDAKWTPSNSPEGDIDSSISFITSSDDDTKRVPMTAFFRSKIDVIYIPAIRNPYEQLNNAAGTILWRLLKQINWKESDKLDISQKIDSLDRAISDQDGISLIEETISAQWKIYHNDNRFSDAKIKFGSTDLNKILKKLEVEFSPGPHNRSYKIGDLGDGLQSLFYFSLIDAFLKTEEKGLKEISKNIDENDRTLNVSPPELTILLVEEPENHINPQLLGNALSNLRSISKNENSQVVFTSHNPSVVKRIDPEEIRHVRMESLFESSVVNKLVLPDKESDAYKYVKNAVIAYPELYFSSLIILGEGDSEEIIIPFFLKEKYPNLDSVGISVVPLGGRHVNHFWRLLNQLQIPYITLLDFDLERYGGGWSRIKYALKELIKIDPAVGEVEMKNSKTTIADIIDNLDKREDNNYKGWLNFLKESSIYYSYPLDVDFLMLENYKNDYIETLSSNEGPFVEIGGKRIKMQNISDEEKTTEEFKSKRDVSIRNTLKEHGGSGEGYSDTQKELMIWYDYFFLGRGKPVTHRLALNDITCDSTNTIPTVFQKMIIDVKEKLSGDSND

SEQ ID NO: 63829 - protein, 605 aa, Enterococcus faecium EnGen0001
MISESDWVPTDGLELEPEALLAVKETRNTLVEAGPGSGKTELLSQKANYLFTTGICSEPKRILAVSFKKDSAVNLADRVALRVEREDSRRFSSRTFDSFAKNLLDRFLNGLPLEWRPTKSYRIDERYFVSACQFHNIQFRYNTDDRKIFEQDFYTIDFNRMSEQAKLVWDTMLKGDGTKSILTFKMINWLALLLLKRNPKIVASIRKTYKFVFLDEFQDTTTLQYELIKTCFCESNAIITAVGDSQQKIMGWAGAMSSAFETYQNDFSSFSHTLALNRRSNKKIQNLIWQINQLNAESPLAEMPFDSESISEGNIESWFFLSELDEANRIALKVKQLINEGVSAEDICILVKQRPDSYMESLELAFSNNEIRIRNENEYQNLLKENITIIILDVMKAALNFEKALSWQKIFNLKMEFSQENISNRIKQQEKMLVEVKRFLNTVANQIESVDSPEDVYHLFQNIVDFFGTNNIQAKFLEYTDISYLTEILEDLTSCLYQYFTQEENWVCAIQTLCGKGIVPLMTIHKSKGLEFNTVFLIDLSDSSFWSYRIDPIETKSTLFVAVSRAKQNFVCTFSSIRLGKNQTCTLVSDFFDAINSHGQKFNFN

SEQ ID NO: 63830 - protein, 729 aa, Enterococcus faecium EnGen0003; identical to SEQ ID NO: 62500

SEQ ID NO: 63831 - protein, 597 aa, Enterococcus faecium EnGen0003; identical to SEQ ID NO: 62501

SEQ ID NO: 63832 - protein, 666 aa, Enterococcus faecium EnGen0029
MSNPYLSKVRIKNFRNFKDVAVELEKQQIVIGENNVGKTNFIRAIQLILDPSLSEEERYLNETDFFEGLESPFENNEIIEIEIELRNYENNLKLLTILSGATVSNNPDTIRITYQFFPEVDSMGNTEYKYRIFQGENKELNFGHNERRFLNMKVIPPIRDVEKDIRSNKKSPIKALLKDYDIDSKELEAISEELDEATSSLLDMDELKYLTGSINDRFSAVVNSQIDLPVSFKTMDIAPTKLLNSLKIVLGESGRGLHDTSLGINNLLYISLLLLSLEDNTVPSILSEKQYNILLEDDTELIIDKLYKVTSNGKRIINSNISKADYKKLYTFMDENYKNKNFQGFSILVIEEPEAHLHPAVQRTIYKDIFNRNVSMLMTTHSPHITSVAPINSIVHLRKSSQGTLINSTANLDFTDGEQKDLERYIDVKRGELYFGKGILLVEGVAEEYLIPEFSRVLEKDLDKHGIICCNINSTNFKPYYKFLRTLKMPTAIITDGDFYFQEEKIENGEKKIISTFHKMEYNTPTGANKFYDGLERMRQLVKDIGMFSEDVDILDDEALEATLNKEGIFIGFYTLEIDIFENLDAIDKDNVCNLFNELTAGGDNHKSNFKDHLDNKRFDKCLKMIEGTTSKIGKGRFAQRLSLDISPEMVPDYIKNAINYIVENF

SEQ ID NO: 63833 - protein, 592 aa, Enterococcus faecium EnGen0029
MTKYFEKLSQIKEDKNQYEALLANSNAVIKAGPGSGKTTVLTVKLKQLLMEKIVDPRGIVCLTYSNSAVKNFTQKLRELGVNKSNRVILSTVHGFCISQILIPFGKIYDTRINFPIKIINEKEKKEIFRVSENELAISKQYTLKNVEEYRNEMYGSRSSVDINKDKQLEKLCLLFEGKMLEKNLCDFNLIISESLRLMEERPYILKCLEAKFPWILIDEYQDLGKILHEIVLLFLEKTKIKFFVVGDPDQSIYKFQGASPFYFLELYDHPDMKKINLTTNYRSDQFLIDSVLKTLDWDDREYVSGIINEKPAKINFFECEDGMEQQYKLVAQQLIPMCVANDISLSEICILVGYNNQLDELSNILDEEDIAYYREGLPFLKLKFVLWLQECCLYLSGSNKVNFNDISDEWLFINNKDIRNFGEKMNLYKSLEKSKLNKASFKKWLKEIFIDLDLSNVLSCSPYSNEVDDVKKFIIQVIQNEVLKNHTVNQFGNISAIDNQVTISTRHSSKGLEFEVVIILGLEDGSFPHYAHEIGGQEYQEDLRVFFVSLTRAKRVVYLVRSKSISGISKYGNPYSFKKEPSPFWTLLKQNI

SEQ ID NO: 63834 - protein, 729 aa, Enterococcus faecium EnGen0030; identical to SEQ ID NO: 62500

SEQ ID NO: 63835 - protein, 597 aa, Enterococcus faecium EnGen0030; identical to SEQ ID NO: 62501

SEQ ID NO: 63836 - protein, 729 aa, Enterococcus faecium EnGen0057; identical to SEQ ID NO: 62500

SEQ ID NO: 63837 - protein, 597 aa, Enterococcus faecium EnGen0057; identical to SEQ ID NO: 62501

SEQ ID NO: 63838 - protein, 575 aa, Echinicola vietnamensis DSM 17526
MRVAKLNIKNFRGVSSAEIYFSDHVVLIGDNNTGKSTIFEALDLTLGPDRVNRKPVVDEHDFYNGLYLTDDETDNPVIEIESLITNLSLDQQSHFKDYVEWWNIEEKKLHTSPPPKSIDNENIIAALRVSFVGQYEEEEDDFIGSTYFSRTIAENDRPLSFTKKDKQRCGFLYLRTLRTGSRALSLEKGSLLDIILRLKDLRPQMWENTITELNEFNVATDPELGISGILESIETAIKKFVPKEWGITPHLKVSNLTREHIRKIITAFIATGSGEHAAPFYRQGTGTINILVLAMLSQIAEEKQNVIFAMEEPEIAIPPYTQKHIIHEIKKLSSQSLFSTHSPYVIEEFHLSQTIILSRDDRGILKQSEVKLPDGIKLKTYRQEFRQKFSEGLLARRIIIAEGHTETASLPAVARRLSELNPDKYSSLEALGVCIIDAGSESKITALAKLYGSLGKRVFALCDKQSNEAKKLIEDNVEKLFMHSEKGFENLVLKNTTIEAMERFCELIDWPSHIIEKHPEPKNDIEHALLKYFLWAKGNWGIADFLSQCKESEIPDWLCDVCIEIKDLYELSPEF

SEQ ID NO: 63839 - protein, 606 aa, Echinicola vietnamensis DSM 17526
MSSEKFILTKEQHRILKDFHNQLIIGGPGSGKTTISILKAGQWVEKLKENQNVLFLSFARATVSRVIEAIDEQSLLSKEIKKRINVDTYHAYFWKIIKTHGYLLGLPRKVSILTPSNEAITLSSIRNAYGKVKNLSDRQKEEKKQDEKDAIRKLAFEKGEIAFGLFAELTFSLLDNCNKILNLLANSYPVIILDEFQDTNFEQWKVIQSLGNRSIIIALADSEQRIFDFIGADPQRINHFKKHFSPKEFDLRNENHRSRGTDITKFGNDILKGNFQDDYKGIKLFTFPSNNNQAFSELKIRTIKARKRLIEKDVKDWTLAILVPTKKLMRQVSDFFNQKTQKLPAIHHHAVIDMHGAILAADVIAFLIQPKCNDNDLEQFVQLICNFFYGKGGDLPTKTDIAEASSIQKSFDKLYAKIKAKEKTPKNSIINAIVEGYENCRKLKFTGNPYEDWLTVRDTLESSNCKRLKSIALEAKNLRLLNRGTQLREALSQNWRDSGFYRNALDIVRQAFIAEHFSISQSPEKGVIVMNMHKAKGKQFDEVIVFEGWPKWVRREIVSNPDRIVIGNKKSSDMTKYKYNLRVSVTRAKIRTTIMTPKDDPCVLFL

SEQ ID NO: 63840 - protein, 673 aa, Echinicola vietnamensis DSM 17526
MKIEKVEINNFRLLKNTSLSLQEKTTVIVGRNNSGKTSLTEIFRRFSKRDRFKLEDFSLSSFPDFSRALKANLAQEKDSAIREILPSIDIILIVNYLENKDDYGVLSNFIIDLDENLTNTQIKISYRLQDGKIDSFFSGMTDEKAPDFFDIIRERIPMYYDFEVIAIDLKDPDNTAKTEFENYKRLIRTDFINAQRWLDDETIKENDVLGKVLSSIFSNASKESAPEEMQKKSKELDEVVKQIQTTVDSDFNTKVKALIPALNIMGYPGLSDPNFTTKTSFDAKTIIEKNTKLLYEKAHGITLPETYNGLGSRNLIFILFHLFDYFRQFQSDEIQPKNHVIFIEEPEAHLHPQMQEVFIRKLYEIADTFSTQLNGGKKWPVQFIVTSHSTHIANEAEFDSIRYFLTKGTEDLQTYIKDLNEEFSKPDNEKDKNFIHKYLTLTKCDLFFADKAILIEGPTERILMPEFIKKLTTANLNSQFISTVEIGGAYAHHFYKFLDFLELKTLIITDLDSTKHKQTDKGIKYEACQVSAGEKSSNTGIIKWFSYKDDEGNDKENVDLSEIRTKVLEDKIQGTRRIAYQIDEEVRECCGRSFEDAFIITNPTLFGIAETKGKALEAKAFEEAKKYTSKKTDFAIKYAYVESKWEIPLYIKEGLTWLSENESDKVLSTDVIK

SEQ ID NO: 63841 - protein, 581 aa, Echinicola vietnamensis DSM 17526
MNSPAEKASEETLKKIYLALDNGNSFRVEAGAGAGKTYSLIKALHYLIEHKSAELQKGFQRIACITYTNVATEEIRNRIDNHPSVFVDTIHGFCWSILQGFQAQMRAQIELIGDEKLIEKIEDAGGLRKQKIVYDLGYRSATEKEIFIHHDNVIQLFTALLSKEKFRSILKNQYPIIFIDEYQDTNEELGKAIISNLIESKSDMQIGLFGDHWQKIYENGIGGMVSVDIEEIGKKANFRSEKNLVKFLNRMRPGLPQMEKDPSSAGEVKIFHSNNWIGVRRDGKGGGHWTGDLPEAEAGNYFRAVKNKLIQEGWEFSFEKTKILMLTNSVLAREQGYSGITKVFRFSDDYLKMQNKYIDYFVNILEPVSESFSKKKYGEMLKAIGIRTPRLKNHSDKKVWNDSLSKLIKNRNSGTIGDVIDCLAETQKPRLSSKIEESEEKYSKLKDLTEFEDEADKKLVSKIKKLKSVKYSEVIELAKYIDDKTPFSTNHGVKGAEFENVLVICGRGWNKYNWNQFLTWANDGVPDDKKESFERNRNLFYVSCSRPKKRLAVLFTQELSSSAMATLNKWFLPENIFPIII

SEQ ID NO: 63842 - protein, 603 aa, Pseudomonas putida HB3267
MRVARLQIENFRGIKRADVLLPKHAVIVGDNNIGKSTLLEALDLVLGPERLSRRPVIDEHDFYAGEYVDLQGQPVNITIEVVITDLNMDQEMRFRDHIEWWDNGAGDLLGGPPAESTDEQMVQACLRVVFIGSYDADEDDFTGTTYFCSPMKQDGSYDFFRTADKRVCGFLYLRTIRTGSRALSLERGSLLDIILRLQDDKNFKIWEGLLVELRQLQVAADPEIGINDILADVQASIRGYMPSDDGSDPQMRVTQLTRESLRKALTVFMATGAQRSDGEAHAAPFQSQGTGTVNMMVLALLSLIAELKQNVIFAMEEPEIAIPPHIQKRIINGVRNKSAQALFTSHSPYVLEEFDPEQVIVISRNDGNLSAMPAGLPPGIKAKMYRQDMRLRVCEALLARRVLIAEGRTEYDAWPAVARLLHQQEPESFMPLEALGIPIIDATTDSLIAPMGAYYRRLGKKVYAVFDEQAPEQLEAIRASVDYPYQAPEKGFENVVLKGTDEEVLRGWVASLVDSGAWPSDLKDKAPGPDATKDEVAAILGVLLKRWKGDGAAASLLCTAMTRHQLPEFIVSTLESITATIVPKKPEPELSELDDDFLDLVGP

SEQ ID NO: 63843 - protein, 572 aa, Pseudomonas putida HB3267
MMVLDQSRRDVIESPRHLVVMGGPGSGKTTVALLKAEAFLGRLDLTEYQQVLFLSFARATVARVAEQAGKMLPKLEQARLEVNTYHGFTWNLLRSHGYLLRNGRPLSLLPPPEAAARLSTLSEEQIALEKIRLLEEEGLLHFDLFASNAAMLLERSQSLQRIYGNSYPLIILDEFQDTNEDEWRFIRALTRHSQVLALADPEQRIYEFRGASASRIQEFEQAYRPASFSFGMENHRSTGTDIVQFGNDLLAGVNRGRAYTHVSVTPYAPRKGMLHRAFKFAILTAIARLNRYGRDWSLAILVPSKSFMAEVSAYLSSDADNLPRLSHEVAFDQEAAALSATAIAALLEGGANAELITERLLRNLCAHLRGRKGEKAPSKAHLELVLALEQLFGGQALRRAPHKRVLAAAQLIAVQRLELQLTGDPQVDWVAARQFLDSSTEQVFKQIGIDGRYVRLLGKGSLLRSRLSEMWRSAEGYSGAEKLVRDALIQDHFQAVTRDWKGLHLMTMHKSKGKEFTEVILYEGVMKGRFLPTEATPDRVRQARLAMRVAVTRAMKKATILTPTGRNRCPLI

SEQ ID NO: 63844 - protein, 690 aa, Escherichia coli KTE113; identical to SEQ ID NO: 62940

SEQ ID NO: 63845 - protein, 577 aa, Escherichia coli KTE113; identical to SEQ ID NO: 62941

SEQ ID NO: 63846 - protein, 594 aa, Escherichia coli KTE177
MYLSKLGIRNFRNFEAADIPLAGNVVLLGENRVGKSNLLFAIRLVIDPTLPDSARQLKLSDFWDGCSLELNPQIEVHLEFADFDSDPSLSALLTDFRIAEDPTVARLSYIFRKKEEVGGAPRSGDDCEFIVFGGGQESRTIPGRVRRRISIDMLDALRDAEAQLASWRSSPLRPLLEDAFSSLSRADLDRVATELQTATETMEKFPSIKELEDSLRGGILDLAGTAHDLDARLRFAPADPLRLMRSISMFIDDGKRGIIEASLGSANVALISLKLAEFAWRREKNERNFSLLCIEEPEAHLHPQLQRAVFDKLFNNVDKDQSLIVTSHSPTLATIAPLRSIVRICRDPEGRSRAFSLAKLPVSSEELDDIERYLTATRSELLFANGVIFVEGDAEEVLLPGFAQAMGINLDQLGITVCNVAGVNFEPYVKLAASLGLPFSVVTDWDPLDGTKQPMGKTRSIGIWQAFSDVSGKLKKLTPGNINWLNNRSYEECKTAFEKIGIFLNDQTFEVAVANTTGLKEALLDILDEQGFGVLRSSRIASWRAGMVPDPTQLLAMISDIGKGRLAAKLKQKAPGLAPPEYIASAIQYVVSNV

SEQ ID NO: 63847 - protein, 593 aa, Escherichia coli KTE177
MSDRRALSEALNELLPNREQYAAATYPGHCVVIAGPGSGKTKTLTTAMARALIEEVADPRGVACITYNNECASELEGRLACFNVIGDDRNFIGTVHSFALNQVLIPYSRCIPGLLPDGFRVATRDESRAAVEVAYQARFGAVGDPHARWKFAEEKRRRDVNRLLPAWRNNNPELADFIDGYEAELRRLGLIDYDDMPLIAFRIISEHEWVRNAIRSRYPVLFVDEYQDLGHALHELVLLLCFNGGIRLFAVGDADQSIYGFNGANPGLLDSLVSRADVRPFRLRFNYRSGAKIIRASLGALGEDRDYVGPDGNPEGELGFHGINGDYDAQAHFIAHDLIPSLFERGFQPERIGVLYRAAWLGDKVADEFKAKNIAIIRADSNALIKRNSRLARFIEACSQWVTGGWKEASPPFNLLLGQALFLVYGRRASRAEEQLLTLQLITFLRNGIDKAESAHEWLRRLNDEIITDWMAISQNTQQEWDVISELLKRTDPLRGLDVALDIFAGKVEGTGRITLSTLHSAKGREFDVAIMFGVNKYDFPSKRDLASDNALREARRLFYVGVTRPRKELHMVYEKGKHSPWIAELYHRSQQI

SEQ ID NO: 63848 - protein, 710 aa, Escherichia coli KTE232
MFIKTLSIRNFRNFKATSLSFKKECVNTIVGENSSGKTNVFEAMRLILDDTLPYYKRFLLENDFHRGLGSAFGHWVIVSLEFDEIGGDEESELLCQLNTTVNGGGTGRITYIYRPQFYIREQLFKLNEIEDYEERKGAYHTLKEQHLIDKTTYESLVLCQGTADFSDNQTYSLVVGDFNALLFSDPKLERINLIGNRQRNYNIQDNISCTYARALRDVVSELKNNRFNPFQKLLEYVSKGIDNDETLSKNIRDVNEKISSIDEVKKLSDGILLSITNAVGTTYSPVLNVTSELPSELKELVKVLQLKAGDSLSEGYVSELSEMSLGGANLIYLALKLYEYEEGISKNLLANFLIIEEPEAHIHTHIQKSLFSNLKNNRTQVFISTHSTHISSVSNISTTNVLVKKGLETISCSPSKGLEEEKVNRIERFLDAIRTDILFAKNVILIEGDAEEILIPHLVKNTFGITLDELGISLISVRGTGFELLSSLFHADRIKKKCAILTDDDINLYGDNKPDYLSQEEYNKAVKSAESGIARKVILDEIVGDNSFIRAYYSKFTFEIDLVLSGAVRYFDQIADESFEKKAFYSPYQEAFSSSDRQKIGCYALKLANKHKKGWFAMMLADKLDADFPIPEALCHSLGFTGDFNKFTLAKMVRYRVEVIKNRDGNDLLNNILGRDDLAFVIDNLDAALAVFQEHCPNDPLTLLLEVHYG

SEQ ID NO: 63849 - protein, 558 aa, Escherichia coli KTE232
MDDQKRGLIKIKSNLLVSACPGAGKTKLLIGMLEDNLYHNEGFRWHIVLTHTNAAADEISSRIDNLNIETDRVWCGTIHSFLLEWVVKKYAGAIPRLVDGFSLLSEYKQRKIIQSIEVDKKLGTRLRYNCDEEGNAFVVPYCHAADSKDKELLVIQEYNRIKEDNKFIDFDDIIKLGVDFLNNNPNICEHLSKLIGNIYLDESQDTSLIQLKALSYITRYNRVSVFIVGDNDQAIYQDLGVSVKNKDILKSELQLSELRHETLSGCYRSSKSLVDYYKKYSASRNDVISMRVGDGKLPIIRDMSKDELPKRIFNLINQYHLKYNGVDGIAIIGPDKYYLMGLINDLYDLSECFVYDFQSTNPLYCVRNTVFYELIKLVLLDVSVVNYQRRHSLARKIIDSIPELSHLSPLQLKRDLKEFQCVKNNFILWLKELYVFLEMKYQKSIKIETDYNICNAAASVAQLKAGMGAIKKMINKDKNVVSVSTIHGSKGEEYDYVITIGYHDKVVPHQSSYDKGNDYAQDIANRLMYVAFSRAKDYMNIFIDDRKAVSPFFIRELD

SEQ ID NO: 63850 - protein, 694 aa, Lactococcus raffinolactis 4877
MKIKTIEISGFRQISNAAFNLEDRLTFLAGANNSGKTSLVELLNCVFNFGTEKLSGEDFSVVNTQQWVNDVYPQILNYFQEDTQKENIISNIHNLIFPNTDEKNEVIIEPIKLKFQIDYDVTNDDIRNFADYIMDLDPSSSSFYFVYEYNVDNSLFRKNLINHYDKLEHRIRKILSDPENNNDKNIKKIILKVYFESLSETIRFTDSNFENGRKIDRKDFIKLFNFQKIMAGRTLDDTSTDRSKILSKNIVDIASKDENWAKTIESLPDTILEAIENENIEQIIKSTSIDSLKETMSSILMTNGGQTNEIIINIDITEDSLKSLLKNITSAQYMLDDHYLNESSQGLGYSNLIYMHMQLEKFNKTIDPLLVNLFVIEEPESHMHPQMQYVFSQYLLTYFASKPELQGFITTHSHEVVRGAKLSQLRVLRKVNSFECSLYDLRSFHNILAGTPELLDFYNYFYAISFPNIIFADKVILYEGDTERMLINSLLKDDQTPFPKLKSQYLSFVQVGGAYAVNYEPILKYLDIKSLIITDIDYGNECSTKNEIDVSKSTNDSINKLLNMKVKTENTKTIKEIYSYREANEPYVLIRDNICLTFQGDKDGYTRTLEEAMLCKLYDVKVFDTSTKEQWKDKRNRDKLKYSIPNTDDLIGVRHIVNSTSKNKTDFMYSAVLNNKLMDTLPYYIEEGLKWLEK

SEQ ID NO: 63851 - protein, 650 aa, Lactococcus raffinolactis 4877
MVRKIENFFIVNAPAGSGKTTTIREMINNIISINSKDNVLCITYTNRAADELSKSFSSPNISISTIHSFLNNFMKQYFGSQEIIDLYFDTYQDSIQQRIDNREAKENQTESNKKYIEKYGDLSIDVLRRNITNIYYNENSFNSLYYGGLGHDDLISFSSKIILKYKVIQNRLSYKFQYVFIDEYQDTTADVLNIFYESLNEKRTILYLFGDKMQQIYKNYDGSFEPKFLKFDSSKALTTNYRSIPKIITLLNNIYNDSSFVQNVSEDMVKIAPNFAPRVIISSDVDEKLTQILDEYPNSLTLFLSNQSRFQKIGCPTLYSAFSKMNRYSFGKKYSVVDVLTDNTKDNPDSLMRLIFSVAYINNNYASNNYGAIIQKIKDEQSTIGLKDWKLSDHQDKVTLNAILEELALILSSSKKSIKDVLIFLKEKIPQSAVTLSEIMEDESYSDALDVPIEEVIKLYNYLEYPKVSTQHGVKGESHDEVIFVADDSYNPHVSMYNFFDIWSDTELSLTSLEEFYYQYSFELTKITEKVGMKINNLKKDSFTAHEDYLKGVASSIMTMFQENDLFNKLCFLEYQTFISNPNVTNAKKCFKESQVYGILSAYKLFYVGCSRARKDITVLLDSNKTKGNMDLQIQKFEQLGFKVHNESLI

SEQ ID NO: 63852 - protein, 594 aa, Rhizobium tropici CIAT 899
MRLSKLSVRNFRNFQSVDIPLSDNVVLLGENRVGKSNLLFAIRLILDSTLPDSARQLKLSDFWDGAAAPYEDAIEVHLELADFASDLGLLAMLSEFRPADNPTIARLTYIFRKKADIKGAPQSSDDCEFLVFGGGVESRTVPSKVRRRIAIDMLDALRDAEGQLGTWRSSPLRPLLEDAIAGVTRAELNAVAVELDKATKALEAFPTIKDLEEELRTGILNLSGKAHDIDARLRFAPSDPLRLFRAIAMFIDGGKRGIAEASLGSANVALLALKLAEFAWRRKKNERNFSLLCIEEPEAHLHPQLQRSVFKKLLAGGDAAQSLIVTSHSPTLAAVTPLRSIIHLRTRDQSTRAFSLAELPVTPDELDDLENYIDATRAELLFARGVIFVEGDAEEALVPVFSSALGHGLDDLGISVCNVAGTNFSPYVKLAESLGMPYAVITDWDPLDGTKLPLGKTRTLDLWDDILKVRKQPAVNPVQRGQWEALDFAAFASMVAPAGIFLNEQTFEVSVANTPSLLSPLLDILGAQGFGSIRTKRIASWRSGTASVDPAQLLAMIADIGKGRLSAKLSKKAVGLTPPKYIADAIAYVVSRVQ

SEQ ID NO: 63853 - protein, 592 aa, Rhizobium tropici CIAT 899
MSSSQQLLSAINELSTNPEQVAAVRETGHCVVLAGPGSGKTKTLTTAMARALSDDIIEPRGVACITYNNECAIELETRLARLGIESGDRAFIGTVHGFALSQVIAPYARCVPIGLPAEFQVATRAQTRAAVEAAYATAIGGSDDPHRRWNFASEKRRRDVDRSRPDWLGRNPELAVFIEAYENELRRQGLIDFDDMPLLAYRMIKEHDWIRDALHARFPVLFVDEYQDLGHALHELVLLLCFGGGIRLFAVGDSDQSIYGFTGANPELLDSLTQRCDVRTIRLRFNYRSGGKIVRASLGALGEERDYREAEGAPEGELTFWPVTLGLDVQAQAIADTVIPDLEKRGFALDEIAVLYRAAYLGDKIAEALKRAGTPFVRSDGNALVRRSSRLSRFIEDCARWVVGGWKSADPRYSRLLQQALKIVYGAQVRPDEEQLLSDQLIGFLQATINSSDTTHTWLQLFDSELIAHWRTIARNAEQEWEVCAEMIRNTDPVADLDIPLAHLAGRLEGTGRVNLSTLHSAKGREFDAVVMYGVNASDFPSQRDRQSTVALREARRLFYVGVTRPRRELAMVYQEHHHSPWVKELFDRSQK

SEQ ID NO: 63854 - protein, 651 aa, Clostridium pasteurianum DSM 525 = ATCC 6013
MYISKLNIEGYKNCKNKSEIQFNKGLNILVGENASGKTTIINALRMILKENEFSYMNISEDDFYKSFKDSEQAHAIKINISFEELNSNEEVTFLTWCDADFKAKLNLEVNSNPNRKGYFRKSIWGGASKTSAFEEETFDCIDCIYLPPLRDAEEKLTNGKKSRLATLLKHQYKDKNDENNLVEKVSEFNNKITTNEGNNYKEISKAKENINFNIKNSMGEMFGQSINLQFADVSFNKILESIKMVFFPEIDATDIKRFRDIAINSLGYNNLLYIATVFAELQIAGKSKDLFTVLLIEEPEAHLHPQLQIKLIKHLETLANQQTNTQVIITTHSPILASSVSIDNLIHVSEQNDTIKTTSLCKIRLDDSKNYINRWLDVTKSTLLFSKGVILVEGISENMLIPELAKICLCKYNKYNSAKQLPSSLEEAGISVININGINFKHFLKLFCSIDEDKNIIKIPIKCSGMTDNDPEKEEIDAVNKKGEKIKVKIDTYPNFNDNIEGKNSALKLISQINNSNYARLYHSPLKTFEYDLAMEGNIMIMVKCLNNIWYSKTGEVKDTCKDISENYDDTKLQEYSKFIHKRASDKKLGKGIFAQELAEDIKKEYDEKLLELNSKDETKENVYDEIIEIFKVPQYIYNSVVWACGGDVSD

SEQ ID NO: 63855 - protein, 670 aa, Clostridium pasteurianum DSM 525 = ATCC 6013
MTKEEMQNEVAKILCEKNSDLTCDECYKSKKDIDYICKNSNHCRISEKTEKQLQYILSSINESTFLEACPGSGKTEVVGMKSAYEIKRWDSNSKNGMAILTFTNDATSVIRERANQFSKKTSFYPHFIGTISSFIHQYIAQPFGYSEINYSGIDGDYSLKLIDADLNAVTNPWLKKYKCSIPYIGKNGKRTDIFANQIFYDEKNRNFYIKIDKIYLSINEYYDIQQMQKHIKDSRKKFNNNYYYSNSYFYNEFKKCKNNFLKDGFATYEDMNCIAYQILDNDTIVKKISRKFPLIIVDECQDLSWIEIEILNKLKEKGTILHFVGDINQSIFEFKEIALESEYTSEYIKRLKKLELTDNFRSCQPIVNLSNKLMSISNTIKGIEENKFLENSVLYLEYENPEEAVTKYLRILNHFKISESKSCIIVKQNILKNQLLCNINDNERHLLISSIQLWGKENPNSKKKSLEYAGKQISKWFGGARSKSSYYCPKDITSVFAWRIFLKDILNDCYINSKLINYDRKYGKWYCDARKELPSIIKKNYCKIQCFDNLIRDFDEIFSSKWYIGKDVQEDILILNSELKNNDSAIKISTVHGSKGCTYDSTLVISSETAKSESGHWKSHWIEGTDEDRRVGYVASTRAKFLMIWAVPTLGKKDKELIEGYGFQNGNTIV

SEQ ID NO: 63856 - protein, 667 aa, Streptomyces turgidiscabies Car8
MQLTHAEVINFRALERVDVRVDPKATLIVGRNNSGKTSFVNLFEKFFGEEDTRFVLEDFSTCRIADIEQARQIFGEAQAHAGRGDSETSEDLLAKAYDLVPAIRLVLTIEYTEDDDLAPLTGVILDLDDTCFEVKIEAALEVARPHDFLKDFWSASQREQFDRIKWLRKNFSDYFAPAYRAVSALNESVRKEIKRGAAEAILSVKFVYAQTKMDDTPSDKARTLSKTFEAYYKVNSGNEDRHQSIEQIETALASASQQLDDNYATLFDPIFEDLRTFGVGTITPVQKPRIVSLIEASGILRGSTRIQYPSGDDDFHLPEGHNGLGYSKLIFTILQVISFHQTYERTTPKPALQVLFIEEPEAHLHPQMQETFIKNIQDFIDRKTGWKVQVVITTHSSHIVASSGFHTVRYFDRSEPQLTVKDLSTFEANVKATPQGDETLRFLRQYMVLHRCDMFFADKVILIEGTAERLILPEMVRRCAKGLLHQYVSVIEVGDAYAVRFRELLAFLNVKTLVITDIDSVCPKHRKACPPGQGPTVTSNATLKNWLPAKSSIAELLATDPADKEQGHVRVAYQIPEKDSGACARSFEDAFIIANAEPLVRGFRQLVLKAAFVKEVGADPTADDIEAKAYDIAQQLSDHKTDFAFDVMLLEDWAVPRYIAEGLQWLA

SEQ ID NO: 63857 - protein, 545 aa, Streptomyces turgidiscabies Car8
MARLDTLEAVTTELEARRSFLVEAGAGAGKTTTLVRALQHLLTHHRVDLEAHGRRIACITYTNVAKKKIVERIAADPLVDVDTIHEFLWSVIQPYQFELWQQILDYNKDLSKPEDLDDVTDPPVIEYSDRGRRLHEGRISHDDVIALSLRLVTAHPKLIRIITSKYPVIFVDEYQDTSPKTIQLLLDHLAGAGREKCVVGLFGDSMQKIYESGVGAVKRPGLLTEITKHENYRCSPPVVEVLNRMRPELTQDAVGKQQTGEVHLFLNSSVPAGPARLTAAEAILARNGWTRENSKYLLLTHRGIAGTLEYANLLEQYRKLGRYGPDDLMARNEPYIQYLTRIEAISAAFRDNDFAGLTDLLDEGRTRITRHANKRAISDAIRALDAVRSTGTIGEVLDLMADGHLLAQPGKLKDLERRRSATDLDERDQRRADFSNNLRTVSYREVISVTHFIDELTPFSTQHGVKGDEFENVVVVVDDRAWNRYSISKMLAGTDKPDRTERSRNLFYVCCSRAQRGLAVVFIDDLPDGAEPTLHTWFSSGTIHP

SEQ ID NO: 63858 - protein, 693 aa, Elizabethkingia anophelis R26; identical to SEQ ID NO: 63338

SEQ ID NO: 63859 - protein, 559 aa, Elizabethkingia anophelis R26; identical to SEQ ID NO: 63339

SEQ ID NO: 63860 - protein, 609 aa, Pseudanabaena biceps PCC 7429
MNIVIDTIRIAGFRGIKNLEMSLPRVTLLIGMNNSGKTSVLKALQLALGDYSRYLSEEDFYIGSDDKRAAEIVVDVRIVPVDEQGDRIDTFDDDWQAEFQDRIQSESNSRQYVALRTRSKPDEVKGGFDTSYLVLRQWADYSNWLTDSVQVSTKNFSRPTSILFIPIDAQRDIHHEIRDKSSLIRKVLSSVKYDNAEVTALESLIKDVNDLAITKSTELTSLKTNLEKLNQSIESSGKAEITPFPRKIRDLSKYFSAHFGESASSTFSMEYHGMGTRSWASMLVVKAFTELQDEKHAKEAKPFFTILAAEEPEAHLHPNAQKTLYKQLDDSRGQVIISTHSPYVAAMAKQSELRYLKKDADNIVVKYLSNELTHEERRKLHREVIHSRGEILFSKAIVLCEGETEEQALPLLFEKYFGSEAFVKGISFIGVRGAGNYLPFLRFAYDFSIPVYIFGDGEDSAVNALKKHYESVYGKTEILNCSNITILDGTNFEGYLISSGFQSIVESAIEDLNGNGAIQKWIDDNDGKWAGRKPTNQPTCKTCNQKIYIDVIKDYQSSGGANRVLMDILKPGKTKYAPLIAEKLCELEKEQLPPKILEFFQKIENGGII

SEQ ID NO: 63861 - protein, 634 aa, Pseudanabaena biceps PCC 7429
MIDLSPDKRSIVYAPTDRAIQVLASAGSGKTRVLTERVRHIINSTKKDGVIALTFTNKAAEEMLNRLEDLEDVNERCWIATIHSVAQRILEQYGHTLKDVALPSELHIYDRDEDRKTIFIQSLRNEGIDIDKFLDVSDSKTKREREAKIQTRLGQFATVKRELLDEQEIINKYSENTKFLSIYRSYQKALFEGGGIDFEDILVYAHKILLDNSWCGDIYRAKYKHICVDEAQDLNKAQYEFIKVLCGEKIRSVLMVGDPNQMIYGFNGSSNRYLLQNFLNDFSPIQYVLNKNFRSSKAVVNLANKIKQGSQSEYDFALDGRSEIKILEDENSEAVWICNKIDELIQEKSSHEIEGDISLDKMVVIARNRFVFKTLEEHLKVKGINPLFNRGERQVEASSTFGKVLDLAIRVRLNKKDWVDGKKLCTVLKIDSPDVWDDECILSKFAENVLNTDIPIPDIQSKLLLEIQNLDINDPNIPKLCKCFAQLIEERKNETLNEFEENELERSIQELQEFKECWQKSKILGLGSLSSFRNAMALGQLNGNNSKNGLTLSTVHTMKGLEKDIIFLMGMCEGVFPDYRARTEQDIEEERNSAFVAVTRAKRWIYITSPRLRKMSSGNSKVQRPSRFIREMQG

SEQ ID NO: 63862 - protein, 667 aa, Streptomyces viridochromogenes Tue57
MQLTHANVINFRALDKADVRIDHKTTLIVGRNNSGKTSFVNLFEKFFGDDDTRFVLEDFSTCRIPDIEQALQIFGEAQRHAAEGDQETREGLLAKAYELVPSIRLGLTIEYAEDDDLAPLTDVILDLDDSCFTVKIEAALEAARPHDLLKDFWTASQRPKFEPIKWLRKNFTDYFASVFRAVSPVDEKVTKEIKRSAAQAIVSVKFVYAQTKVDDTPGDKARTLSKTFETYYKVKSGPEGRHQSIEQIEDALAAASLELDTSYKSLFDPVFEDLRSFGVGTITPVEKPRIVSLMEGSGILRGSTRLQYPSGDGDFHLPEGHNGLGYSKLIFTILQVISFHQAYERATPKPALQVLFIEEPEAHLHPQMQEVFIKNIQDFIKRKAPWKVQVVITTHSSHIVASGGFHTVRYFDRSEPDGKVKDLSTFQAKVKATPQGDETLRFLRQYMVLHRCDMFFADKVILIEGTAERLLLPEMVRRCAEGLLHQYVSVIEVGDAYAVRFRELLDFLNVKTLVITDIDSVSPTDQKACPPSTAQAVTSNSTLKNWLPGQSSIVKLLDVGTDEKEHGHVRVAYQVPERQAGVCARSFEDAFIIANAAVLARDLRHLELKRAFVQEVGADPTPENIEANAFAIAKRLSKHKTDFAFDVMLLEDWLVPRYIAEGLQWLA

SEQ ID NO: 63863 - protein, 544 aa, Streptomyces viridochromogenes Tue57
MARLNTFEAVVEELDARRSFLVEAGAGAGKTTDLVRALQYLLSHRRTDLEANGRQIACITYTNVAKKKILERISADPLVAVGTIHEFLWSVIQAYPRELWQQILDYNANLSKPEDLTEMAAPPVIEYSDRGRKLSEGRISHDDVIALSLRLVATHPKLIRIITSKYSVIFVDEYQDTSPKTIDLLLNHLAGAGKEPCVIGLFGDSMQKIYRSGVGAVRHDKLTPITKTENYRCSRPVVDVLNKMRPELRQQASGNQQKGEVHLFLNTDVPPGPRRLDAARATLASRDWTLENSKYLLLTHRGIAGTLEYANLLEQYRQLGSHGPDDLMARNEPYIQYLTQIEALCAAYQERDFVELTDLMGQGKRRITRHTDKRIISKAIRELDTVRATGTIGDVLDLMAGSPLLAVPGTVKDRERRRTAADLDERHKRQADFSNNIRGVSYREVISVTRFIDELTPFSTQHGVKGDEFENVVVVIDDSVWTMYNIGKMLAGTDKPERTERSRNLFYVCCSRARRGLAVVFINDLPDGAEATARDWFASGAVHP

SEQ ID NO: 63864 - protein, 634 aa, Pseudomonas syringae BRIP39023; identical to SEQ ID NO: 63508

SEQ ID NO: 63865 - protein, 583 aa, Pseudomonas syringae BRIP39023
MNFTKEQLEYIAAPLDQHSYLKACPGSGKTEVVAAMVSQTIQVWSRSPSGIAVLTFSNSATDELRSRVHKYLGGPIGLPHSISTFDSFVLTRLVASIASELTGYPGKDGDFRIRILEKEANIFQTQQRICGRRISACRYNYDLEAGRFKFSTGDRALDHQLNAVEVTDNMHRDLVATKRRFWLGGYATHGDIDMLALMAFKDHQFDRYFSRVARRFPVVIVDECQDLSAEQLQIVSKLSGFGIKFHFVGDLNQSIYGFRKSNPANVNKLMGVLQFKQYELTTNWRSGQAIVDLCSNIVGTGKVSGNPEIASIQPKILEYESCPSELLPTIRNLTAAYNEVVLVARGHATLQRLRNGKTFEGIELLAVACIGASSGSLSDLKVSLRTFAQWLARKLKLEVTKTGPYCPTSMESKLAWRKFIHQSLRFMVASGAGNSDQNWSAWVRCAKLALRQLPDQAFVPDEILNELQELRGLNLVTKRGQGDKPVSIRLSSQDIQDGESETLRYETIHQVKGETHDVTVVVSSRKRGKGESHWADWLQNRESEAARFAYVASSRPRHMLIWAVKTLKPRERPTLVNLGFQLP

SEQ ID NO: 63866 - protein, 634 aa, Pseudomonas fluorescens BRIP34879
MKLQTLRLSNFQSYGAGPTDVDLEAITYLIGPNGAGKTAALQALCRLFAFDPSQRRIQRSDFHVAFDEKDIPEERQLWIEADFLFPELAEDEDNSTVAPHFGHMRLDEPDGIPRVRFRLSAVMGQDGDIEETFVYVLDVNPDGSPLTTAQVPRAERNHIHVHYLPARRDPADHIAYGANALLGRMLRAVQWDKERDVIRGLTDGISDSLAANPSVNAFSEHLQMTWASLHKGSFFADPKITFAASEIEALLRHMSVSFTPGHDENFVDFSRLSDGQKSMLYLSLVLSSQAIGRAVLAEKDKSFDPDKLRPPVFTLVAVEEPENSLSPHYLGRIVSALNAMTSQGDAQALIATHAPSMLRRVEPEHIRYLRLTEARQSRVTCIQLPEKTDEAHKFVREAVQAFPEVYFSRLIVLGEGDSEEIVLPRLLRAKGAPIDESAVAIAPLGGRHVNHFWRLLEALRIPYLTLLDLDVARHQAGWGRFKYVNDQLGTFRADKVLPKDHGIPKWNSSEHKVREYPVYIEAFEERDVYFSDPMDLDFAMLLAYPDAYGVEKEVPDADVIKAVLGKSHHDSSQYSEDELKLFGTYHQRFKLGSKPAAHISALAQLSDQELLENMPASLSRLADTVIAKLAELPE

SEQ ID NO: 63867 - protein, 558 aa, Pseudomonas fluorescens BRIP34879
MIAVEAWQPADGLTLEPNALLAAKEQERCLALTAGPGAGKTEMLAQRADFLLRTGTCRYPKRILAISFKVDASKNLKERVQRRCGPDLASRFDSFTFHAFAKRIIDRFRPVLTGEDALDAGYKIADSKVGRSRTQIVFGDLVPLAIQILRKSKVARNAIRQTYSDVFLDEFQDCTNLQYELVKLAFQDTSIRLTAVGDTKQKIMGWAGALDGIFETFAADFAAVPLNMYRNFRSKPRLLRVQNEIIRVLDLASAMPDEQLAGDEGEVFAWQFEDSRREAEYLADLIANWIRVEQLPPSETAVLVSKQLELYADHLMAALEVRGIPFRNEQQMQDITVEPVARLIVDYLSCLYGQREPKAWVRLMNQLIPFADDEIQSSTRKNLDRLIKQQRKEAVVAELLEVPFSGWWESVRSFLKQVSIETLVALSSDYESHDRLKEVVRDTKMRIEELLKIEPDLPKALERFSDEQAVRILTMHKSKGLEFDSVILLGVENQTFWGKADEERCAFFVGVSRAKRRLIMTVSERRETPPSKPYKWVEQRVPHAEFLGYARLFLSNAT

SEQ ID NO: 63868 - protein, 778 aa, Pseudomonas syringae BRIP34876
MHIETVWVRNFRRLKDTRIDLASDISIFVGANNSGKTSAAHALQLFTSASKDRFTLHDFSSACWDVINAFGEGADGVELPTISLDIWFCVTPADLHRVVDLLPSLDWQGSRVGIRVELAAADAGLLRSSFQEARASARHAQSQPAGEGVAQGYVEPAIAQDGYNPRPRDLCDFIADTVGDRLRRDFELRYYVLDSAGFDTEFKQLDGYVPLRLVPDKGRSGRDVLGSLVKVDCLHAQRHLSDSNAGSRSEDLSRCLSRFYERNLEKRGEDYDAQRALYQSESLLNDHLERVFGPTLERLADLGYPGVNNPRLLIKTALNPATILSSHEGARVHYALGALGAAEVTATLPDRYNGLGFKNLIYMVVELLDVHGRWLDIEENRPPLHLIFIEEPEAHLHAQLQQVFIRKVLDILAVPEEDSPYCTSQPVVSTHSPHVLYERGFKPIRYFRRVADAGIQQSQVLSVAAFYEAAIDPNDPNDRTRDFLERYLRLTHCDMFFADAAILVEGNVERLLMPQMIAKAAPRLQSNYLSVLEVGGAFGHRFKGLIDFLGLTSLIVTDIDSVSPPAAGALAANGELPVDEDPADAEPDDNEGAEEAEARRKGRKACMVHEAGALTSNQTLIKWLPGHTTIDDLLAATAEQRTQLRDEEGGALVRVAYQTPVAVVWGGATQVRTGRTLEEAFALQNLAWTQHLDRKDLGLRIKGSNNLEIAGIAERLYRKVKSSSFRKTDFALGLLAQEPSAWTVPNYISDGLRWLEDLVAPPPPAVAEAEAPLNGGEV

SEQ ID NO: 63869 - protein, 632 aa, Pseudomonas syringae BRIP34876
MTARIGQPDTQADIELRLCLDQRPQRSFVMVAGAGSGKTTSLVKALAHLGQTRRLKLNMRGQRVACITYTEVAVKEIWGDVGNDPLFHVSTIHSFLWTVIRPFQVNLKAWVIARIHEKIAEAQQHHDKPRTRAATRERLVKDIARYQRHLEAVRHLTHFNYGAGSDFGRGVLGHFDVISAAVELIEQSQLLRDVIASRYPVLFIDESQDTRPEVVAAFRRIAETTPVEFCLGFFGDPMQKIYLEGAGVIETAAGWEQITKPENFRCPQRVLQVVNAIREPDDGLSQTRGRMNWVDGNPEPVMGSVQFFLLRADDHRSMKLAKVREWMRRTNDDDHWVSDDLAADFRVLVVVHRMAAARLGFPNLYAALNDNDAPPSIKEGLKDGTAWPLRPFLDYLLPLATAVSENRKLDVMTFLRSECPLLQPTALVGSDPVAVLRALQASTTELARLIFSSDALLQDVLVHSQAAGLLQLDEAWTKYLGPDRTADDDDPEIPAVSAFLRCGVGELAGYRHYLEDLSPFATQQGVKGAEFERVLVLIDDEEGRGQRQFSYEKYFGIVEPSDTDLENLAQGKDSVMDRTRRLFYVCCSRATRDLAVVMFVQDIETARAKIAETGIFDSADIVDEETLEAALT

SEQ ID NO: 63870 - protein, 778 aa, Pseudomonas syringae BRIP34881; identical to SEQ ID NO: 63868

SEQ ID NO: 63871 - protein, 632 aa, Pseudomonas syringae BRIP34881; identical to SEQ ID NO: 63869

SEQ ID NO: 63872 - protein, 685 aa, Vibrio campbellii CAIM 519 = NBRC 15631
MLLKKLKISGYKSISSGHPQTIEFEDDVTIFIGHNGTGKSTALEALNKLFSIDHSLRGLSPSDFHLPSGDKPDTARDLFIEAWFDLGNTEDPISIPPLLNGLTASGEDGSIIFRVRLEASLSFDYNPLGDVEESIWVIDSDMDEPIDDVKERLLTTQRNAIQVNYVPANRDPLTQLKFSSKAILGRLLKAIKWSEEEKGEFEEKAQELNELATENNALIQIKQAINETWSDIYRGQHLKEAILDFPVGDIDEILKLLQLQFMPDATKNKVDTSRLSDGQKSLVYFALTKALFDLDKAMRKAISDGEESYFDPEKLRLPVFSLMILEEPENHLSPHYLGRVMSLVRDYGSSESCQSIVSTHSASLVGRVEPRQIRHFRLENDTCSTRVQALSMPESGDEQAKYVSEAVKAYPEIYFSKLVVLGEGDSEQVILPKLLEHFGQHSDGRSISIVPLGGRHVNHFWRLLESLQIPYITLLDFDIDRNGGGFGRIKYAVEQLVTNDNDTPYLHEEMIENIPKWDSDEDPNLYLMTFVENDEDDEEEDVSLVEELEESNVFFSSPLDIDYSMICAFPEIFCTPDLAYGERGPMEGGEDESEEEQEARQASLIKAVLKQGNSGIRYDFGEDWERNFLWYRYRFLSNKSKPASHVRMFSKLEATYSSAEIIRRMPPELRRLIERVIECSEQVVE

SEQ ID NO: 63873 - protein, 561 aa, Vibrio campbellii CAIM 519 = NBRC 15631
MNEWKPTKGIEPTQELMDIITCDQSVSVLACAGAGKTELLAQKANYLLVTGICPWPKRILSLTFKTEAQANIKVRIGKRCGEASSRFDSFTFHAFCKSVVDRFKNILPLSQRPHDGYDIVFKESEAKNNSKILMERLIDMAIIILKEREDVRAMFSNSYSHVFVDEFQDTTNKQYELLKLLFQGTPSKLLSVGDINQSIMLWADARETVFDDFLNDFSAEQKYLLKNYRASDEIGRVLDVFIDYIKNPTEEVESSDVSSPNCSVSIFSNEVQEAKLVSQSIKALIDGGVNNKDICILTKQQSALYTERISGELARLGIEHADMNELQDAFKEPLGLIFSQFLKALFSPSLKNTMEIYGVALSLNRVEIGDKKEHEIVSTISQYIAQKREQLNEQTTIDELISYVVDFVHFLDLGKIKGRWKQYRSVGFYQKTWNTLETRLRQTYAQVEGVKDSVVLFNSPNTIHIMNIHKCKGLEYDYVYFVGLEDQAFWNYKSQTFEDNCAIYVALSRARKSINITYSMLRANRSYSQWRDNRPSSWSALSSVYKVLLHKCKFQRINHTE

SEQ ID NO: 63874 - protein, 565 aa, Vibrio campbellii CAIM 519 = NBRC 15631
MYIRKVTINNYRSFRTFEAKLQQLTVVIGENDTGKTNFFTALSLPLSGNLIDFNQKRLSVSDFNKDSVIDFLTSVVNDDTEENQLKKIPKVSVTVEFADPKDAYETALLAKWVVADGDKETYKIRYDFKPKDDKDLLEVVKKSFAGKILDDINWFTLPVELYDYQVVSVNNEKPIAYSDLKHVSLHSINAERDDFSESSSMKSNSIFTKLLMNTLNDDDKGQINTAYSEFFSAIEKTETFDKVIRTNDDFENYDSIIKQLECTPNLPNLKNILSNITLKYGNEFLYQKGLGQRNLIYILILFAYYKSCGDTFNLCCIEEPEAHLSVNNLRLVRDFIEKSSSNSGSLVQTIISTHNPSIINKLKISNVLAFTGEKAISLSDTPTKLVDYLRKRPNFDILKLLFANKVILVEGPTEEMLISTYLSKQPSLNDIDIIPIGQRGYATFLDIWLALNKDNQNKKIGVVRDYDNSDAAKAKHDAYDTAHANVTVRTTTNYTLEIDLVEAEDNLALLNDLFEMEGDLDAVSKYMINGKTARMLDVCDAMVDEENPLDIKLPAHIAEVIEAVS

SEQ ID NO: 63875 - protein, 458 aa, Vibrio campbellii CAIM 519 = NBRC 15631
MIEVQIAGAGAGKTYGLAKTLIEHIEACTSHKKTFALTYTNSATAKIEQEIIKQHGFIPSNLCIQTVHSFLLNEIIYPFSSFTLGDVYNDASIMMLPSDARFKNWHLKRLKDKNIIHAESVYNIAKQIVDETTSKHNNRAKKAKVRRLLAILGSCFDKIFIDEVQDLDKDALRFFEVLGSNDIDIYMIGDPKQAIKFPQDLEAFIQKLAQKKYATILPINNQTRRVPREILTVSNSFCYENQQQESLSEMVGELMYIESTDGRYDDLLTHYLDTKQLVCIDKKNGRYTTSSKHKHSFPREIEEMIRDSNHKKDKALFVKAAFSDFMDDAINEDNKKAISKLIARHSLALNKQHFAQLHELCNSCTKNDVQFKVQSIESIKGLDADVCVIILSPNTLKYLTQNGISKANRFNKEWKKIYVALTRAKKRLVLALDHDLLAKEDMAAVRDSIGELGFVTHN

SEQ ID NO: 63876 - protein, 619 aa, Gordonia soli NBRC 108243
MRVRQVEIENFRGIVAGHVLFQQHTLLVGGNNIGKSTVCEALELVLGPERLYRRPVIDEHDFSHGDYIGGEGDPREIRIRVVLTDLSDEQLRRFFQHVRRWDDETFSFIDEEPDSIQSADGDGTVWALPVIFIGRYDREEDDFIGDTFFDHPLPELDDLDEDERASLGAGRAQFSRLHKRVCGFIFLRALRTGSRALSLQRGSLLDSLLRLGGEGAEEMWRDALGALQNLDPAIGEIEQLRIIRENIRTRLGKFVNLAPSENAAAFFASDLTREHLREVVRLFVATQPSNHSVPFTKQGTGSINLLVFALLTIIADLKEDQSVIFVMEEPEIALPPHTQRRVTKYVVQQMGQSIVTSHSPYVIEQFDPENVVILSRDGNTFSGAPIDTTSVKPKTYRTQRRQFAEAILSRAVFVLEGQTEMVAVHAVSSALEQVRDDYSHVDLTGVTLFNAGNDREVPRYAPIFKALGKRVYGMRDKLNAPDAADAAENIKSFDEFWESPETGIEQILVKQVSTRVLRSFLDEVVQRDDYPSSHPYVAERVADDDLAELAVKVLKARKGDAFGFGYTGTLIEQCETEADLPAFIRDALLTINEQLQDEPELILDDDTAAPGAGAAEPEE

SEQ ID NO: 63877 - protein, 567 aa, Gordonia soli NBRC 108243
MELQLSETAQGAVDHDCPVLVLGGPGSGKTTLSLLKAQAMLPVLQPGQEILFLSFSRAAVRQVEIRCRDTLRSEERRQIAVRTYHAFAMEVLRAHGRLLTGHAPRIVYPGDENLSKAVFEGDWGTEIERLAREEGRYVFGQFAAAAAQLVAGSASIASLLANKYPVVILDEFQDTDDAQWALVRTLSERSKTVFMADPDQRIFDYDSRVDPERLNHLRAHLGPAEFDLSGENHRSPNAGILHYANAVLINRPLPDTKDVITRAYWANAFDSTVHAGVVWMLGSLRKAGIAHPSVVVLARTNALVGKLSMILAQEHNFNGQTIRPVEHDVLWDADLTAAAALVVASILEWPGCPKEVALGQTFDRIADYFDAKNAANASNAARQTSERYRTAADRARRGETQRLASAKALAASYDSGLVLQGDPAQDWLHARDLLAAGNDLSDLLANARFVRLFRATDEIGSRLASAWDLRGSYGRAIDLVRRALEAGRLQSDQRDLRGCVLMTIHKAKGKEFDGVLLVEGQYQGGFFRDTDTEAQRAAARRLLRVGITRARHQVAIIRPQGAAPLVG

SEQ ID NO: 63878 - protein, 583 aa, Enterobacter aerogenes EA1509E
MYLGSLKISRFRSCDDVTVSLRPDLTVLVGENNGGKSNVVDAIRLLTLPLSGRRERYPEDEDVRRYSTVPSFQIEGAFQGLSDTLKGLLISAVPDPTKSEATFGYRYESRSEHAPRGKTTVWAGRFDTNGPELGSSELIRHVYLPPLRDAHQVLGTSSGTRVMALLRNFLPKEREQDFLAGVRRADNRPEILTTINTDISAALGLLTNGVRPQIAALDFGSETLLDVARDLRFRMADTGLIPEDIRSSGLGYSNLLYMATVVVELTKAKEADLTIFLVEEPEAHLHPQLQVLVLEFLLDQARQSASRIIEPGKPEGRIQIVVTTHSPNLTAWVSPRHLVVMRSRHREQDGISISESVSVPIAEIGLKPKTLDKISRYLDVTRSALLFGNRAILVEGIAEALLLPVLAQKLVLADDLDGWLRFKGAVIVPIEGVDFRPYVEVLLRPYGDARIADRLIVITDADPTVLGNRKVDLENLAATHGAPDALIVLTNQHTLEHEIFGAGNESFLKSVFLRLHRNSRRDWEAQIEAIPEQDRPNAFLKLIEAKKTRKGDLAQAMASRIEAGEPFVVPPYLIDAIRGASRI

SEQ ID NO: 63879 - protein, 591 aa, Enterobacter aerogenes EA1509E
MTGIHNLTPEQETFAAHIGGAFVNACPGAGKTRTIIARLARIAATLPPRQGIAILSFTNSAVDEFRERCLAAGLDTLLQYPSFMGTLDAFVRHFVVLPSCAVSNQIRPIILDSWDTLGIEIRLSGQFAFRGEPVSLDLFDPETNIIVPDRIGHVGLQNHVRQHQLRYQQAAAHRRRSLLQAGYMSAGDARAQTLRLIRDNVIGGALARALAARFQEVMVDEGQDCNPLDLQILTWLRAHGVNVTFVCDPDQAIYEFRNGNPQGIQVFKDTYPIASHKELTGNFRSSPAICQLAASLRREGQVDRSLGESANVDYPILLLTYGGRGPTAMIGQIFLERITELGLDSTKAIILAHSGKVALRAAGVTSSNSIGNSRIETLARQVSTFWSPAATPKTKENVVQSVEILLLDLMGVRQPNEHLIKAIERLGMDRRAHRRCALSFLINLPKTCRDSDEERLAWIACVHAEMERLHLPLQAGVSVRRFFRQPPNAHWSKHLQVPAALGFACGNIHEVKGREYDAVCVVVPPNRAPENRVEALFESWQARVDAEAKRVLYVGLTRARNFVALAIPNAFAGRCVDLLATRQVPYTRVDL

SEQ ID NO: 63880 - protein, 641 aa, Pseudomonas aeruginosa VRFPA01
MRLQSIRLSNFQSFGAAPTEVLLEEITYLIGPNGSGKTAALQALCRLFAFDPSLRRILRSDFHVPFNEEAQPAERQLWIEADFLFPELDEDADNSTVAPHFGHMRLDEVDGTPRVRFRLTATMGLDGDIEESMVYVLDINADGSPLTTAQVPRSERNHIHIHYLPARRNPADHIAYGANALLGRMLRAVNWESERSAIKGLTDQISESLSANPSIKAFSTSLKSAWSALHKGSFFADPKLTFVASEIEALLRHMSVSFTPGHDEQLVDFSRLSDGQKSMLYLSLVLSSHAIGRAVLAEDDDSFDVDKLRPPVFTVVAVEEPENSLSPHYLGRIVNALNGMTGKGDAQALIATHAPSMLRRVAPERIRYLRLTQERTSRVTHIQLPESTDEAHKFVREAVQAFPEIYFSRLVVLGEGDSEEIVFPRLLQVKGAPIDESAVTIAPLGGRHVNHFWRLLSALQIPYLTLLDLDVARYAAGWGRVKVVNDQLAKHEPEKVLPDGWSLPKWNTKEAPIRTHHCFGDEKKSVFNELESRGVYFSEPLDLDFAMLLAFPKAYNVEEDKPDEATIKAVLGKKHHDASQYSADEQKLFTTYHQRFKLGSKPAAHIDALAQLTDEELLANMPASLNRLADAVIAKLAELPE

SEQ ID NO: 63881 - protein, 558 aa, Pseudomonas aeruginosa VRFPA01
MIAVDAWKPADGLTLEPNALIAAKEQVRSLALTAGPGAGKTEMLAQRADFLLRTGTCRYPKRILAISFKVDASSNLKERVKRRCGSELCSRFDSYTFHAFAKRIIDRFRPVLTGVYGLDAGYKIADRKPGPSRILIEFSDLVPYAIQILRQSVVARNAIRQTYSDVFLDEFQDCTNLQYELLKLAFQDTSIRLTAVGDTKQKIMGWAGAMDGIFQAFVADFSATPLNMYRNFRSKPRLLRLQNEIIRRLDPSSVMPDEQLAGDEGEVFAWRFEDSRKEAEYLADLIDGWVKTEQLPPAEVAILIRNQLDLYADHLMAALEARGIPFRNEQQMQDITVEPAARLIVDYLSCLYGQREPRAWIRLMNLLIPFADEEIQSTARKELDRLVKQQRKEIAIAELVDEPFAGWWEFVRAFLKQVRIETLVSLSPDYESHDRLKEVVRDTKARIEELLSLEPDLPKALERFSDDQAVRILTIHKSKGLEFDSVIILAVENEIFFGDQDENRCAYFVGVSRAKKRLILTHADQRERPAGHTKRWSVQRTAQNEYFGYATQFVRQEE

SEQ ID NO: 63882 - protein, 643 aa, Acinetobacter baumannii Naval-57
MYIKKLSITGYRCFSELFEINFRKGLNVIVGENGAGKTAIINSFRQLFIDTESGSYNVSSDDFNKPFKEASIAADSFKIKVEFDNLENAEPIAFLQWSDAANNVILNLEVLNKELRGRFKKSFWGGNSKASQFDVELFDKIHCIYLPPLRDAESKLVNGRQSRLSKLLKFIEAEQLKTCKKAKKKHPLEEKFKDFNKSLIEEEGSSIKEANRLITEHLLKAVGQNFSQSTHIQFVENEFSKIVENLRLIFFPKITTAEADQFRDLCQNSLGYNNLLYIASILAELTLTKEESLYRLLLIEEPEAHLHPQLQVRLLDHLEKVANEHKVQVIVTTHSTVLASSVHLDKIIHLTKNDNPTATPLAECGLADNNLNFLNRWLDITKSNLLFASGVILVEGIAEQMIIPELAKTVLKGKEINNIEDYGVSVINLNGIYFNHFMRLYCNITGVPDVQEDQVGLNVPIRCAGITDLDPDQFYYEEDTSTDTESKDKPEKKIKIDYKPHEDNILEGKNHALKLVDSINTSDFARLFVAKFKTLEYDLAMESNNAKEMAKVLIELWPSKTGDVKNGLQVIIDDDYSEITSEQKANHAFEILKRVDDKNIGKGYFAQVLADKISSEEIKLQVPQYLEDAILWACSLDKSSIEE

SEQ ID NO: 63883 - protein, 587 aa, Acinetobacter baumannii Naval-57
MKYTDEQLDYIERTQITENIFLNACPGSGKTETIAQRVANEVESWANFPSGIAVLSFTKSAAKEIEHRIKEKIDNNTTYPHFIGTFDSFILKNIVNPLSKDISKYEGHNGDYSFKVVNYDSQLFFLTKYPHGYQKISGHHVEIDNRTGRFKFHTPNKDTNRALNAMVLEQWQKDDIYRAKKKCRDAGFLTHKDIEYLAESALTTRTATQDYAKKLAKRFQLIIVDECQDLSFEQLNILKAMMLNGTKLHFVGDLNQSIYEFRDVDPNDIINFITDNGFREIQLTKNFRSCQKIVNIATNIMKSISIEADFTSPEQSCFVLQYKDSPSEVISQFNELTKQYSNRVLVARGHQTLNQLSIVDSTPAKPVEFLLSSILNFDETSYTSINQSLIDFSKYIKDKVKLETKSSDYNCPQIIASELDWRLFLHNSIQYLLNHDLQLDSCTWTNWCKKVNAVVINLFKQEFVLPEIYEALKNSDFKIRSPNGKATHCISNYHRKNDSLDIKFRKSTIHGVKGETHEATMLISNPTRNGTGTHWSHWIGDKTSEASRFAYVASSRPKYILVWCVKKLKSSEQKDLESLGFEILDIK

SEQ ID NO: 63884 - protein, 641 aa, Salmonella enterica; identical to SEQ ID NO: 62984
  subsp. enterica serovar 4,5,12:i:- str. 08-1739

SEQ ID NO: 63885 - protein, 553 aa, Salmonella enterica; identical to SEQ ID NO: 62985
  subsp. enterica serovar 4,5,12:i:- str. 08-1739

SEQ ID NO: 63886 - protein, 623 aa, Pseudomonas poae RE*1-1-14
MHLVRVRVRNFRGIAYGEVHLNGHTAFIGDNNAGKSTLLEAVDLVLGPERLSRRPVIDEHDFYAGTYVDPAKNEVVPIQIEVIVAGLSDEQLRHFRDHIEWWDSQAKTLLVGAPPEGTDAPHVGAAIRVFFNGWYDVEEDDFAGDTFYATPEMPDGSYLRFSAPDKRKCGFLYLRTLRTGARALSLERGSLLDVILRLKETRLTMWEDLLDQLRALPVGETEDIGELLVAVQDAVRHYVPSDWAEQPHMRVSDLTRDMLRRTLTVFMGTGAKRPDGSVYSAPYQHQGTGTINTLVLALLSIIAELKQSVIFAMEEPEIALPPHTQKRIINSLRQKSAQAIFTSHSPYVLEEFDPAQVVVLKRTAGVMTGVPATYPPAVKPKAYRTEFKARFCEALLARYVLVLEGRTEFDALPAAARRLAELDPTRFKSLENLGMAIVDARGETNVAPLGAFFRSLGKIVFAVFDKQSQEALATITASVDHAYESATKGFENLVLYGVSEVALRSYAAVVVAGGDWPQHLAAWTPTPATPLADLQAALSSYFSWAKGGGDAGDLLASCPTANDMPEYVRTTLAAIKNVIEPPPLPPLPPQLAGVPPLPEAAAKPPPLAAAYGKFQPSPPQPLP

SEQ ID NO: 63887 - protein, 570 aa, Pseudomonas poae RE*1-1-14
MTEVWSDQKRDFLECARHALALGGPGAGKTHVALVKARNEIRSGILKPGQKVLFLSFARPTVARIIEKASELISREDLKQLEVSTYHGFAWSILRSHAYLLNGRPNLQLLPPPEAAAHLADIDKAQHENEKRRLFEQEGRLHFDLFASLASELLSRSDRLGAIFSDTYPIIILDEFQDTNSDEWALIQQLGKCSRLIALADPEQRIYEFRGADPRRVGDFLENFGGAHFDFAGENHRSSGTDITAYGNDLLTGANKGKAYQQVKITRYDFMYGKSLHFTAKAAVFSALDRLKKVPDKSIAILVPSRRLMLEFSDYLSSAADGLPALHHDVAMDAEPPALAAGVIATLLAGGTAGDVASRMLGALHSHIRGRRGVRPTPQTELDLAGALSGFLSSGKIRGSKRLLIVSEVQRISELRRQLQLTGDPAEDWLHLRDLLASSTAEALKQVATDARYLRLLHRGSVLRTNLGALWRAQGEYMGAEEAVRSALMQEHFAAAQKDWRGIHLMTIHKSKGKEFDEVIIYDGLYQRIAKAPQDPKICAQDLLVLRVGVTRAIRRTTIVTPKRDPCPLL

SEQ ID NO: 63888 - protein, 672 aa, Rhodopirellula europaea 6C
MKISFLSFCNFRCFGPAPVSIDLNDISVLIGENGAGKSAALLGLARLFGLTKEQRSIRADDFHLPVGVSRSDADLKSLSLWIEARIEFDAEGGGDDTSAIPEHFKQMRVNEPGGRPYCRIRLEAVWQKGNLPEGEVEQSLNWIKTSSDISDEIDDEYRQPLSAFERQRIHVHYIPGARDPSKHVRVSSQSLLKRLLDAARWTDDLADSINAATDGIVSDFSREPAITELQRSLNESWNGLYNRSRFKELVLHLETQTIEDFVSSFTAGMKTEAKDDCVPVDRLSDGLRSLLYFSIVKSAFQIEQAAIDDFFGDHPFDEERLDPPLLTVFAVEEPETHLAPHLLGRVVKMFREIIKPPRAQAIFSSHSPSVLARIEPEEIRYLRLDSTTAVASAHKLSFPTEQSDADKFIRQAVRAYPELYFARLVVLGEGDSEQVVMARLLDANDLPSDPNVISVVPLGGRHVNHMWRLLNSLSIPHLTLLDMDCDRKGGDWGRIHYVCEQLIELGHKREEILEVVDDDNTSVMSDETFAEMPDWGLPHDDFTGWVKSLRKYGVYFSDPLDLDYSMLRKFPEQYQETADGAPRILSKKPELRSAQINGLFRTVFGKKNIAEPERLETQVKSLRWYRYLFLQRSKPATHMAALAEIEDEDLLAKCPDELKSLIRAIKRKIYNG

SEQ ID NO: 63889 - protein, 647 aa, Rhodopirellula europaea 6C
MARLRNRNLKIEKQSWQPVGIESLEDNALIAVKAERSSIVVAGPGAGKTELLAQRADYLLRTDTSKSPRRILAISLKRDAAKNLQDRVGKRLPAELAERFDSMTLDAFSKNLVDRFRLAIPEFWRPNDDYRIEFNIKEERADRMIREAAQRLNCEPADVAGIGPIRWYRECFSLRLPIDGSAILENGSIREQLAVSQWQHYLHGKYRYLNFHMIARLAELVLRTNPAVLHAMRATYSHVFLDEFQDTTNLHYDLLRTAFLESDSVLTAVGDTKQCIMTWAGALAGITKRYSEEFAADPYVLRANYRSEPELIHIIGSLAQQIEPEAILPICGRGRESGNGQCRVIAFSDDAEEAIAIALVLNELVEDEGVEPRDICVICRKFVGQYSSNLVEALQQINGLARVRDETKLQDLLAEPLVELVVDAFLVAVSDEPQPDSWSRLQSVLEKTGRSDSTQQQRIRNKLLSTLIDCLRLSLPQCEKTDDGIKVEVNRVIDAIGEKSFRQSHPQYRQGTFFEETVSNVVKQLGYRYGDEPHQFGTWTDVIGDLLGETSIPVMTIHKSKGLEYHTVIFVGLEDAAFNNLKDPAGDANAFFVAFSRAKQRVLFTFAKSRFRRKQSRKNVNLLYGWLEEAGVGIENASDIKFDESIW

SEQ ID NO: 63890 - protein, 688 aa, Treponema denticola SP33
MILKRMEVKNFRLLKNFELKFKDELSLVIGKNNCGKTSSLIILDKMLNSSKVMWEDINLEWQKELHEKIINFDISEQEEVSSLEAINLRLFIEYNDNDSYTNIQKFMMDLNPDNNTIVLEFISLISVKKIIELKDILNKKKIEDFISFSKYISKNFANFFEIKKYSRGFDVELNQITQDRSEEIDNKDIQKVIKVAGIRADRAVSNDDRNHVLSSLTGKYFSSYKAAKNKSELVFRKLEEKLEEADKELYKIYNGEKSESGEAIDGIFSGVIDVIKRYGGAENGIDIAIESSISEKNLLSDNTNLSYRQGGDCLLPETYNGLGYLNLIGILFEIETKIQELFEQPADINLLYIEEPEAHTHPQLQYIFIRNIKSHIKAHRKKLLEDKNKQLQIVITSHSSHIVSECNFDDIIYLKKNGNTVIAKSFNSLKEEYGGDEQKGFKFVKQYLTINRSELFFADKAICIEGDTERILMPMMMHKIDNKEEPEENIIPLLSQNISVIEVGAHSHIFIPLFEFLGIKVLIITDIDAANKNDNGRYVKSHPKEAKYTSNASIKDFFKDTCLDESNNEFKELVEKIPEDKIKNNIRIAYQIPETDGEYQASSFEDAFIALNKDFILKNKEGLCEYGALKDFSNDEIENGDYYNFALNNVKKKSAFASSLLYFDDENGEEDEKWAVPHYIEEGLLWIR

SEQ ID NO: 63891 - protein, 634 aa, Treponema denticola SP33
MDTLTLEKEVLEAIQCIKNGENFILEGGAGSGKTYSLISLINALTEELPDIRIVCITYTNNAVAEILSRIENENLWVSTIHEFIWALIRKYQNEIKDILVELINDENEENFKKPKDFSEDLISKKYFENIYVDYDEYYSVTPNDENRVKISHDHILIVAEKMFEKYKKIADILKDIADCIFVDEYQDTSPLVADILLKHLEQSSKKNVIGFFGDSMQSIYDNGVGDLNQYSLIKIVKTQNRRNPRVVIEVANKFRNDGIEQVPSEDINAPNMENGTIREGSIKFLYGTESDDFINVKGKNIFKNWDFSDGKQTKELRLTHKYNAEMGEFKDLYDLYNDDLIVTLISKIKEKMDKGDLGNDKNLGELALEVKPIFKKADLLNQIIGNETYKSIYSVLENMSWDEAYEKCRITKESLMSYKLNGMSGKYEANSYRDRILRRMDILDEIIELYVANRLNDFLRITKFSIRNKNDKIRLKRAMEYLINENNKTIEEVLEYAEENELLKEDELFNDYILNKGFYLWERLKKLPFKQYRKSVFYLKEFSPNCTQHSVKGSEYDNVLLVLESNWNKYDFNTLFGKGSKSDSVQLRTKKLFYVCVTRAKKNLIIYMPTDDFEIVDKAKILFGEGNVVDMSLI

SEQ ID NO: 63892 - protein, 485 aa, Cronobacter sakazakii SP291
MMENLRGVYLPPLRDASQGLRPNRNSQLARLLHLLTDDAGRDTINTALKQLDETLKQDKSIQSTHKAISTRHNSMMGNQLAQELAVGLSVTDFQRLSSRLTLTAEAMEIEKNGLGFNNLIFMAVVLSELAKNTDSAFSSLIIEEPEAHLHPQLQRVLLQYLAGIPTGEGEKTVQLFVTSHSPNFASNSKLDSLVCLIENESGVETFFPRDIKFEKGKREKLERYLDVTRAELFFARRVIFVEGAAELMLIDALAKKMNFDLREYGVSLISVEGLNFDSFLPLFGQQGLRIPVAVVTDADPFEEEIEAVVEGQVEEGIDDLLSEAAYQEETDAPDDEEPTGDAEKKKKVKRKEVYPALGDQVRLSANTIKMKNLEDDFVKVFHGLKTLEYDLALIEENRGPMLTALADPHPKISKALRKIVDAQPDNTAKTKALFCGMFERKDSSNIQKGRFAQALAEEISKDNDFKVPDYLKKAIQHACQGVIKP

SEQ ID NO: 63893 - protein, 575 aa, Cronobacter sakazakii SP291
MKLSKQQRDIIDAPLGPIAVTACAGSGKTETAIRRLIAVREKMETSRGRVVLLSFSNVAVNTFNRGYAGLASALPDDINRRRVEVDTLDGFFTKHILRPHAYRTMDTDRAAYLVSGSEPFLTSFQYWRKNSHPLPLKDIKVGMCNKKFYFITSKGDELELLDESEVLKIITRLGKTGAYTHELGRYWVYQTLVSQPAVLRALATRYPQILVDESQDLGTVHQEILELLIGAGVKITLIGDVNQGIYGFAGADGEFLKSYEDRAEVTGYKLTRNYRSLPPIINIANSLCRRNDEPDRQNEQGGAFFFGYKESELPKLTEAFKAHIDELNMRLQDSVILCRGAARAETIAGRASPPGQGMVKVLAEASLLRDQHNDYHGCFKLVCRAIIGLLDNAPPGLSSGLQGLSHENGMGGLKRLLWCFSRSTDAGLPSSGLPAKTDWHTKLLTNVKALLVEIEKQYEYKIAGTLGTKLTKKLLPDLPLSSVAVSQTHGFRVETVHQVKGESIGAVMYLAKKNHIEALLSGTGDEEGRIGYVAITRAKNLFWLAVPESCLKEFRDKLIRAGFQERTKPLVIAPA

SEQ ID NO: 63894 - protein, 679 aa, Streptococcus mutans U2A
MEIKKIYIQHYRLLNDFSLELKNDLSLIVGKNNCGKTSVLSVLEKIFNKNSNRNLVWEDINLNHRREIFENIKRVSDIPDSELSSILGINLQIWIQYSELDSYQNIQGFMMDLNPENNFIILEFSYIIPTQKLREISSLTCDFADDFSKFESFMKKNLNKFFEIQIYSRGYNPITQEMTEEKSDLHEMKDVHKIIKVRGISASREVSNKENNHSLSKTSNRFYKLNNGEEINSNANNLLQSAILKADETLTRAYSGDDSVEGIFTSVFKRVKRFGGNDSEAELAIHSSLSEKDILSNNTTLYYKHDDSLLPETYNGLGYLNLYGIIFEIETLMADIKNEPADINLIYIEEPESHTHPQLQYIFIKNIKDLLKEHNDELKESGDFSCIQTLITTHSSHIVSDCNFDDLIYFKRDAGTVISKVFNSLKEEYGKDQLGYKFVKQYLTLNNSELFFADKVICIEGDTERILLPTMMQKVDISNPLNQSSMIMPLLSQNISIIETGAHSHVFRKLFDFLGIKVLIITDIDPANKNENNRLTSCSAVDATSTTNTSIKNFFDISGDEVFSIVAQKSFAEKITSDDRIRIAYQIPEDENGYQPASFEDAFISLNKQFIIDQKVGFIQFEALKDFDDSEIEDFYKFARDKVNKKSAFASSLLYFEGEENTWKVPNYISEGLLWLRGQ

SEQ ID NO: 63895 - protein, 597 aa, Streptococcus mutans U2A
MEEPKKSIVCITYTNNAVAEIRSRIINDNLRVSTIHEFIWHVIENFQKEIKECLVELINDDAQILFVVPKEVLGEEPISLDYFDGVCVEYTEWYSMSITEQNKVRISHDHVLIVAEKMFSTYPKLCDILIDIADYIFVDEYQDTSPLVVKILLEYIQNRTKKNIVGFFGDSMQAIYDSGVGDLGSYNLIKIAKAQNRRNPKKVIDLANKFRDDGLVQTPSNDDTAPNMDNGSIIPGIVKFVYGNDINQLEILRGSQLYRKLEFNAPSKTKELRLTHKLNAEMAGFSKLFELYNTDLFVKLITGIKKKINENKIDDNGKLFKDLVEEAQIVVRRGGPLIVDEIKSNSELSAFYDEIKTCSFEEVSSKSKVNKESLLSYKFNGLSSRYEAGTDRDRILKRLDLVYELVELYKTGKHNEFLRITKFKITSSKDKISLSNVMTEISDDDDITIGRVIELAEECELISKDDLFTNFIKNRGHYLWSRLKIMPFQEYVNSIDYLREYVSVITQHKVKGSEYENVLVLLDNGKWNQYNFDTLFGKGSSNENVQNRTKRLFYVAITRAMKNLIVYMPSNDRQIIEKAKDYFEESDIVDVLSLVDE

SEQ ID NO: 63896 - protein, 677 aa, Streptococcus mutans M2A
MKIKKINIKNYRLLKDFSLELKSELSLIVGKNNCGKTSVLSVLDKIINKRSSLTWEDINLDHRKVIFENIKKVSDTPDSELESILGINLQIWIQYSELDSYQNIQGFMMDLNPDNNLIILEFSYIIPTKKLREISSLACDFIDDFSKFELFMKKNMSEFFEMQVYSLGYNPSTQELTEEKSNLLEMKDVHKIIKVRGISASREVSNKENNHSLSKTSNRFYKLNNGEDIDSNANNLLQSAILKADETLTKAYSGDDSNEGIFTQVFERVKKFGGNDSEAELAIHSSLSEKDILSNNTTLYYKHDDSLLPETYNGLGYLNLYGIIFEIETVMADIKKDPADINLVYIEEPESHTHPQLQYIFIKNIKDLLKVHDDELKTRGATSGIQTLITTHSSHIVSDCNFDDLIYFKRDNGTAVSKAFNSLKEEYGDEQLGYKFVKQYLTLNSSELFFADKVICVEGDTERILIPTMMQKVDISNPINQASNTMPLLSQNISIIETGAHSQVFRKLFDFLGIKVLIITDIDPANKNGNNRLTSCSAVEATSTTNASIKNFFDISEDEVFSIVAQKSFAEKITSDNRIRIAYQIPEDENTYQPASFEDAFISLNKQFIINQKDGLIKFEALKNFDDSEIEDFYKFARDKVNKKSALASSLLYFEDEGNTWKVPKYISEGLLWLRRQ

SEQ ID NO: 63897 - protein, 640 aa, Streptococcus mutans M2A
MVEKTIEPEVEMVFEAIKENKNFILEGGAGSGKTFSLISIIEKISRDEPDKSIVCITYTNNAVAEIRERITNDKLKVSTIHEFIWSIIEQFQNEIKYCLIDLINDDEQKAFIRPLDYPSEGQLTDTYFENIRVDYDERYSMSIIDNCVQISHDHILIVAEKMFSTYPKLCDILIDIADYIFVDEYQDTSPLVVKILLEYIQNRTKKNIVGFFGDSMQAIYDSGVGDLSSYNLKKIAKAQNRRNPKKVIDLANKFRDDGLVQTPSNDDTAPNMYNRSIIQGIVKFVYGNDINQLEILRGSQLYKELEFNAPSKTKELRLTHKLNAEMAGFSKLFELYNTDLFVKLITGIKKKINENKIDDNGKLFKDLVEEAQIVVRKGGPLIVDEIKSNPELSAFYDEIKTCLFEEVSNKSKVNKESLLSYKFNGLSSRYEAGTDRDRILKRLDLVYELVELYKTGKHNEFLRITKFKITSSRDKISLSKVMTEISAADITIGKVIELAEEHELISKDDLFTNFINNKGYYLWSRLKIMPFQEYVNSIDYLREYVSVITQHKVKGSEYENVLVLLDNGKWNQYNFDTLFGKGSSNENVQNRTKRLFYVAITRAMKNLIVYMPSNDRQIIEKAKDYFEQSDIVNVLSLVDE

SEQ ID NO: 63898 - protein, 423 aa, Nodularia spumigena CCY9414; identical to SEQ ID NO: 62974

SEQ ID NO: 63899 - protein, 774 aa, Nodularia spumigena CCY9414; identical to SEQ ID NO: 62975

SEQ ID NO: 63900 - protein, 727 aa, Clostridium ultunense Esp
MLLRSVQLMVVTIGCPGFYIQLYLEEDSIVVCEGDLMYISELILENYRGFKGRKSIFFKEGTNILIGHNNSGKTSILKALELLFSDGKSKSLSIDDFNKNISIEELKESPPKIRIAAKLTESKNEEEYSDDLITVSTWLTKLDKPYEALITYEFFLPEKEEKEYKNIINNINSDDVHDYWREIEYNFIRKYIYKIYVGNPDHKNVVEPETINKFDFQFLTAIRDVERDLFTGRNSLLKEVIDFFIDYEIKTDRDMENDEKTKKIEERKKKFSEDAGKLISSLQSRMELGKKYMLKYAEETGAAFDNLKPSFEGRILDTELYSALKLIVEDETGFKLPVSQNGLGYNNLIYISLLLAKMQKDASGEYLGSNAKIFSILAIEEPEAHLHPNMQYKFLKFLKQNQENQVRQIFITSHSPNITAAASLDDLIILCKEKDEINISYPGKVFTDCKEDIISKNYVQRFLDVTKSDMFFAKNIIFVEGISEQLLIHEFAKILGYDLVDFHTSIINIGGRYFEHFLKLFDTSKSSYAINKKVACITDLDPVKKKKGDTRWKKCLPFELDSDDKYEYKDCSNDIVSEYINNPEENNIRVFSQQKGISCTFEYDIILHNPTTKELITDSVMNSEEIKDLMDAIKNKTDVSDIINIIRNGKFKDTLSIHINNGNFNNEENIVHIVAARYLMSIKKGVVAQELADVISENQINKLLDEAHFDFIVPTYISEAIEWIYKG

SEQ ID NO: 63901 - protein, 573 aa, Clostridium ultunense Esp
MDLQRIITLESSDELLENIESHFKLCAGPGSGKTRFLINHIKNVIKNSNRLTNARKVACITYTNIGVDTIKRRLGNAINKVEVSTIHSFLYRHVVKPYLWIINDEYNIPLEKFEGHSEIMPTFSIMQEWLKRTNQQYVKDYNKLKKELLDLQWVVQDGDINLKFKYPSALMIRNDSLIEYKKVCWEKALIAHDDILYLSYKILTKNSRILEILRAKFPYIFVDEFQDTNPIQAMMLKMIADKETVVGVVGDYGQSIFSFQGADVQEFINFDLEGGKLYKLENNYRSTQEIINILNHVRNDTNFKQISPCNKTGPLPHILVGGFLDAYYKAVKISGDKKLCTLSYRNDVSNAMKFKYDSFFDSENINEPIFTDGNSDRGWIITYTITAIEHCIQGKIKDAIKYMKIAYRKTEGFSDKEALQNLKRLVNEYEKYKDSSVKDYYNNYIAGYYDIKSKITSGSINEYYSNLKYKKIAIGVKISDDDSLNRTIHKSKGDQFKSVLVIIPLDNDGFDEEKGLEFILNPNLDKEENRVYYVALSRAKKNLFINVSKLSKGNKQQLETIGFNVIDLENNKI

SEQ ID NO: 63902 - protein, 695 aa, Streptococcus tigurinus 1366
MKLTKMVINNFRSFGECQAINFNNQTVLIGNNSSGKTTVLQALSKLFSDKQSDRIIRKSDFHLPKGLKPGENTRNLFIETIFEFDELAGTVYRPAIPIFFEHFTVSQDGAKPFLRIRLESSWEDDGTVEGSIDTQIYYISSDEDTIRDEDKHRAPRKDLDKIRVLYVPASRTPEKELGNASGSMLSRLVNSINWTKDEINEIKDKIDELNNTFLSENGALIQINNEIQKSWELYHEDNRFSQAELIINSSEMAAALRQIALKFSPTTTEEAFTVSDLGDGLRSIFYFSLVDSILDIELEITKDREENPDNPRFKLVPPILTILAIEEPENHIAPHHIGKLVKRFKQLSNNDNSQVILTSHSPAIVKRIEPEELRYLRIESNGRVLQTIVSDIKLPQDTDESYKYIKGAIQAYPELYFAKLVVLGEGDSEELLLPKFFDLLGNEIDSSQISIVPLGGRHVNYFWKLLNSLKIPHITLLDFDNERYGGGWGRVQYVIQQLLKIGIARNDLVRMKDGRILDDQDIARISSNQISDILSQPLLSWINHLEKFNVFFSAPLDIDFLMLQYYKDYYLETLSTNEGPVVSYTDENSDNKKIKITKMDRTNDYQLIGFKNRISEAIQATLKDKSGPGDSFTEEEKELMIWYQYFFLGRGKPTTHMQFLLSIRDEELIESLPSVFEKIVKRAKELLGDIEYGEE

SEQ ID NO: 63903 - protein, 605 aa, Streptococcus tigurinus 1366
MVKSDDWLPKGDIILENAALEAVKNVNNCLVIAGPGAGKTELLAQKLDYLFSTNECIFPKKILALSFKTDAAANMKNRVKKRYGDEYASRFTSLTYSAFEKMILDQYINALPEEIRPDRDYLVDDWDVIKATLIKNGINVNGRRMSDIRKSVENNVLNDEANLKFKKDLLKGTRNNKAVLLYKQITKLATYIIYTNKYIRKALQMTYEFVFLDEFQDTTYDQYNLLKTCFLGSTCKLTAVGDNKQAIMRWAGANPDIFQDYKLDFKANEYQLLMNHRSVPKLIEFQKEVHQILNSNHSSIQSNYYPEFQEGEITLFEFENESLESKLIANDIESKIQGGIRPSEICILAKQKVDDYSSKLIITLSSKGIKARIENEYQELLKDPTCNLLLDLISCSQGKRDPLIWENISNFYGNINGIDELTDELILAKSYKEIDNIVSDITYLISNVIPNEESMLKLIDCIIEKIDEKRIISNFSTYNRKSDLDIIVKNFSKLLYKEYSQTQGEWLDTVSSFKGENSIPIMTIHKSKGLEYEVVYFLGLEDSAFWSFNDQPEEDKSAFFVALSRAKSHLIFTYCKLRNNSPQNNRNINEIYSLLTQSNLVDVIN

SEQ ID NO: 63904 - protein, 655 aa, Desulfovibrio africanus PCS
MFIERLTLSNFRCFGPAPHTIHLSQGLTAFVGANGCGKTAVMQALQRLFGVTGEQRRVRRQDFHVPNAEDSSPGHKRFFIEAIIAFPELDSPTGDHAAIPEFFHQMAADETGRLKCRLRFEASWTDDGSLDGAFEQHFWAIRTFGDFNDEDCIEIKPFDRTRIQLVYVPAIRDGASQVAAFLRGRLWRAAQWSERVKEAFSEAGRQLSDAFGAESAVARVTQAVTARWQEVFNAGTDTKPKFRPLDLRFQEFIRKVEVVFHPDEAGRERPLDDLSDGQRSLFHLAMTAATLDIEGYIAANPVTTGFQDDGVPLPALTLIAIEEPENNLAPFYLSRIIRQTESLASGNRAQALVSSHSASILARVNPANVRHFRLDPSTRTARVQAIQLPRDDMEASKFIREAVYSYPELYFARFVVLGEGASEEIVLPRLAEAIDFPIDRSFVAVVPLGGRHVNHLWRLLNDLEIPHVTLLDLDWGRAGGGWGRIKTTCEQLLKNGIAPHVLFGDQLSPEGSTANLAAFDSASLEDFKYLTEWVNYLRHFGIFFCTPLDLDYSMLHAFHEAYMVAEPGRRGPSDVGDPRIAVLGDDGVHALYGEHEDLWLRWYRYLFLGRGKPSTHVRVLSQLEPETLAKDMPEELRELLSVIIKRLEPARVIKA

SEQ ID NO: 63905 - protein, 627 aa, Desulfovibrio africanus PCS
MARPHPDDWRPSGIANLETNAWCALREANCTCVIAGPGAGKTEFLAQRAVYLLETGTCPLPYRVLAISFKRDAAENLAARVRKRCPPDLSKRFVSLTFDAFTKGLVDRFINAIPAIWRPTRPYNLVFLKSRQVQDFLSGVIYDAPRQWRSDIAALTSNEFEPRYIGSSQLPLILEKPTSGIQLAISRWWAERLPKNAKSSLTFTSINRLAELLLRTNSHIRHALRITYPFVFIDEFQDTTYAQYDFLLSAFANGHAVVTAVGDDKQRIMTWAGARVDAFQRFETNFRATRIPLQFNFRSSPDLIRIQHVVAQALDPGTAPTVAQATRIVDGDVAQVWMSSTKVAEAQYLAAWLSNDMAQRDRSPRDYAILVRQKADNYEAEISDTLVGAGLRLRNESHELGRTSLQDLLADELCRITVAILRLGLKRRSPDAWCIVAAALQDLRCIAPGDDIAVHRVERVLMAFIKELRENMDTLAPSRENAALLADRIFRFLDLGAVRRSYLIYGTGDLLNIMVEAFKLHFASCANNAADWATCLDAFEGVNHIPLMTVHKSKGLEYDTIIFIGLDDNAWWSHTPRNPEGLATFFVALSRAKQRAVFAFCKERGQRRLIADLYDLLTEAGVPEIPL

SEQ ID NO: 63906 - protein, 607 aa, Corynebacterium callunae DSM 20147
MATDPDSATVMWLESARIKGFRSCEKTEVALSPDLTLLVGENNAGKSNIIDALRLATAPLSGRRTRYFEIDDPSIGAATNPDIELVFADGDNFQQALFIGALDLETKKIHHHVRYFPPTDQYPRGRTERLAGLVASPDPESEVRSKINHVYLEPLRDAKRELDSANGRRLGAVLRYLLDEKEREEFLKQAHAATDQLSVSDAVQGVSKKIQEHLSSLTDAVRGQQVAIGFERPTLEHLARGLRLKMAEQGIDITDLASSGLGYANLLFMSTVLLELQEANKSELTLLLVEEPEAHLHPQLQGVLLDFLLEQAEESVKQAKEGRPAGRIQVIATTHSPNLASSVGIERTVVIRSAKRDIRSSSVALALKQVEFANDNDRRKIDQYLDVTRSDLLFTQRVILVEGISEAVLLPALARHCVFDRSDPEQAKRLRRFKATPIVNLGSVDFRPYLTLLLHDFGGGMRIADKVIALTDEDPPLEDSEAKSINRSEDLESIATKLKAENILRVETSKYTLEATLLTGASENNRILRKAFLEQHPKSGGKWDAIEEAKEPGREMYRRLQVKKGAENLDISKGQFAHDIALAIAEPGVVIDCPAQLKAAIEAAAEE

SEQ ID NO: 63907 - protein, 560 aa, Corynebacterium callunae DSM 20147
MSLEFTSAQRSLIESESGGFFEACPGAGKTQTIVERFARRGDSEDSRRGTALVTFTNAAAEEAQRRCAHKPELLQAPNFVGTIDSFINRFFAAPFYKGKHGKVPTFWDSWSSLDSAVVRIKGQPPVSLDHFQCHNDWATLLDEYRCRYSESQICALESAAYSKWNQLVRSGHLDADTSRLIARIEIEENRYGIVELLTSRFEEVIVDEVQDCDSADILVLKSLRDAGIRLISVGDLDQSIYEFRGTSAPEVRNFLRSASPQPRIDTNFRSSPAICKVVNSLREGPTIDIPVGEASTCDIPVHLIGYRNHSEIGPSVETVIDQYRGLAKPVFLAHSKDNAAFAAGGHGKGKSSKSKVAALAKSGNLLLDSSSTSAKRTKALAETGILLQQLHSDEQLAKAGEEIYLETLGLTKSSYHELCLRFVVAVGDPARQSRSAYREKLIQVAEGFGIALNRGRTKTPSADAWPWDGIPTAEHQYEHSTVHGFKGLETDSIVLVVPGDKRTGATIRGWGEGEGSEARRVLYVGASRAKRLLILAVHNKYTDAVKLILERDEVPLALSG

SEQ ID NO: 63908 - protein, 538 aa, Corynebacterium callunae DSM 20147
MKLIAIRLKNHSRLADLELQVRTHLVLVGANDVGKSSLLRCLNLILGSSTAALYSRITKDDFADPNKPFVIEVDLADFSLDEQAAFPDEIQIGNEHKPNILTIRLEAQLDEGETLQISRFAPNGGAQRQLSRVQLEMLGWKMVGAAHTGARDFRNDRNSSLDDILDAIELGDEEKLFKEVAEGFQYRLSESKVLLKLREKLAAQLSQAVPQEINTEELQFVSGSTAEDDLLADVRLQITRDGTSRGVQEQSDGARALFAIAMYDLVSSAANMVSIDEPEIHLHPTSQRSLARLLRGAQNQKIIATHSPDIVGAFPPEDIVVVSRGGIVKQPKETFLDGNSKLAAHWWVRNKLEPLTSNLVILVEGVSDRIVLQRVAELLDKDPDRLGVSVVETDGGNEIPNARKVFGPDGFDIPLLMLIDEDAKVKTAEKLGVQNADLARHNVVISDPDLEGEYTSAIGGKELWKRLENSNEFTRNQLRTCEASGRNGERTDEDVAAFCRKNKNKVQASLIVAQTLTQEEAACIGSISTLLNKVEQGE

SEQ ID NO: 63909 - protein, 560 aa, Corynebacterium callunae DSM 20147
MKPTIPQEQIRDYEPLGLIITAPAGCGKTEALALRVRGMIDRRVVTPPRKILLVTFTNRAKENIGERLRTYLTPQEITRYITLHNLHGLSARIIAAHGQVIGLDSSWKLPDSDWIASKFRERGLDYHQKTLISSHLQQAKLETRTDDEVLDYLRLIQDQDAIEIERERQDSKQLTYDDLPRLADLILRNEQIAALYQEHFSCIVIDEFQDLTLQQLSILQRIGRGRITYAGDLAQGIYGFTGAKPEQVLAAARSEGIDEITFTESHRSSPAVLELVNSLRPRTGGVELKCSSPESWPGGGFASHQVFESEKDEADGIVRFAAGILSRGKEQRIGVLTRTKKRRENLDELLTRGAPFSWYRWDDPIFDSHIAPLLRSALRKANPAQLGGADAQQHLLEFVDPLELQDPSTYEGLVQGCAWIYDLASEGISKSEINQRIKADENETLLSAPGLHLVTGHAGKGQQFDWVIVMGLEQGSIPSFQAKTERAIVEESRVLSVMISRARHGVLTTFSKVGIKPWGARFKNNPSVFMDLLCDSDSYTDWEGGRDWLNAADWEAISIR

SEQ ID NO: 63910 - protein, 380 aa, Meiothermus ruber H328; identical to SEQ ID NO: 62682

SEQ ID NO: 63911 - protein, 809 aa, Meiothermus ruber H328; identical to SEQ ID NO: 62683

SEQ ID NO: 63912 - protein, 613 aa, Stenotrophomonas maltophilia AU12-09
MYLAELSISNFRKINNAVLHFQSGLNVLVGANNAGKTAIVDALRSLLAGHDEPYPRLDSDDIHRPKTGSPSGNIVFKYIFRGLSPDDEADFMTALKPAKDGQMEAHITISFSEADKTGRLRAKRWCGDHDDVGLTADMMENLRGVYLQPLRDASQALRPGRTSQLSRLFQLLVDDDGKIEINKALKLLDDELKTKAPIVSTHKAITTRHSEMLGPQLSQLLELGVSVSDFQRLASRLSLTVDLFELEQNGLGFNNLIFMAVVLSELTKNPQASYRGLIIEEPEAHLHPQLQAVLLGYFETIKAVDKEKPVQLFVTSHSPNFASIANLDSLTCLVDTGIKVETFFPRDIKFSVGKREKLERYLDVTRAELFFARRAILVEGAAELVLVSVLAEKCGHDLRKHGVSLISVEGLNFDSFIPLFGEKALKIPVSVLTDADPTGPSEEDEEEEEKGDGSAEADDHAPEDGTSSGKKKAAPVYPSIGDKVQVSANTLNMLRFADSYLKIFHGLKTLEYDLALYASNRKIMLAALKELHPKISANLEKKVDAATGDAEKARVLFSGMFERKNGNVQKGRFAQALAYLIAKAKKEEFTVPEYIQAAVEHACQPGPKKAEDE

SEQ ID NO: 63913 - protein, 599 aa, Stenotrophomonas maltophilia AU12-09
MSTDTTPSVEQGEIITAPLHPMSVIACAGSGKTFTAVRRLAHIRQCLGDHRGRVALLSFSNIAVETFRREYQALAMGSLKIPSHQRVEIDTLDGFITTNILRPHAHRTMGCTTTPFLLSGSESFLLGKDYRFWVESPRTDSYPVPQGHIHRVVIGPSGAATGFFYQNSGMLARINNGPKVAAALGKLGAYTHELARYWVDLTLREQPEILRVLARRYPHILIDEAQDIGILHQVIIERLSQAGSQISLIGDPNQGIYEFMGATGSFLSSYHSKPGVSAAALTRNYRSVPAILDLANAISARTDDPDRTAPPTLHGAYFVPYTTADTKKVMAAFQATLVSAGLDPARSAVLCRARKWANELAGHEGAPGVGTTKILAQAAMARDIHSDYSTAFRLVATAIMGLTDNAPKGIVARLTQPARYPEERALRRVIWAFTRDPVSGLPSAALPAVSDWQPALLQRIRVLMTNLSTAHGLNHTSSTLGARLSKRSLPGSPLMSPPDLGADQPLRVKISTVHQVKGESLDAVLYMATKPHVSALLGGGSTEDGRIGYVAVTRARDLLWLAVPATALKSLRADLQAKGFKDATATAATPTAGHDNGSL

SEQ ID NO: 63914 - protein, 396 aa, Bifidobacterium thermophilum RBL67
MIPSDFSTTQLEPGRKTIVDDYLKEVDASGDESKLAEAIESLSDAIDESDAFKEALGSLADQLDPVLDGGITANKLHFVPEAAISGDLLNDVRLQIEGKSGTVRQATEQSDGTKALIAFSIFGLLNSDGMIAIDEPETHLHPSAQRNLMRILKSTGRQLVIATHSGVVAGEFDPVSVAVTHEGIPPVQPSRGFLSGNKDQTTLARWWISSKVELLTAKQIIAVEGPSDRMVLEEAAVKMGRHLERDGIEILEAGGCTEMQHVLDIFGENGFGIRVDILIDEDDGRNLGKLANRLDVTVDNLAEKSVFISRKDLEDEYVSAIGADRLWSAMNDSSLFTRNMLSNCKIAPGASVPNEQDLAEYCRSNKIISAVVACGTFDKATAEKVSSVAEVLRNAI

SEQ ID NO: 63915 - protein, 572 aa, Bifidobacterium thermophilum RBL67
MPSNSYGVTDEQQEIFDYEPFGMVITAPAGCGKTEALAYRAKGLLERYDFSGNGRRLLITSFTNQAKDNINERLKKYIGVQTLRDHVTVCNFHGLASRIIKAHGQLIGIGGDWTLANVDWVGRELRTGGYTRDDSKQAGQALRDAKLTCLTDDDVMKQLESIGGQAGEIARTIEKKRINEKMISYDDQIRVALWLLSDHRVAGLYRNHFFAALVDEFQDLTPQQLKFVQTLCGKNITFAGDTAQSIYSFAGADVAYVQQEITKDSGRQIKLLRSFRSAPRILNAVNSLSPLTGSEHLSAAFPNRWGSGGVVGLSSFDDEGSEAAWVAGMSKSILRHCPHQRIGIITRLDNRAITLKRTLTQNNIEYTDWKSGIFRPEVAGVLSDICSDIQARTFENNLEALQYIQQKAATYHVGQIEELEEGCGWLFDQLFQRGFDSSKACEIKEKITVRRGNETIATRDGIHCLTGHAGKGQQFDWVFVLGMEDGTIPDFRAKSFEEKCEEARVLSVMISRARIGVFGTYTKGKVDRWGNHHVNTPSEFFEYLKKVPGLLCGKDDIVTWCRKADWPAIALM

SEQ ID NO: 63916 - protein, 565 aa, Vibrio cholerae O1 str. 95412; identical to SEQ ID NO: 62564

SEQ ID NO: 63917 - protein, 458 aa, Vibrio cholerae O1 str. 95412; identical to SEQ ID NO: 62565

SEQ ID NO: 63918 - protein, 566 aa, Edwardsiella piscicida C07-087
MEISSLKLKGFRNFKDAHINFNSNTLIIGANDVGKSNMLHSLRMLLDKSISDSEIEPNELDFHLENGKSCEEFEIIIHFKDINEDAVLSILKGNVSDSGESFIKYIAQKSDLSYKLFIGESLESLQEINSRYYLKFVNLKYIQSQRDLERFIRKEKRQLLKIAQQSLNSEEREEDDDLLGEISIDLQSINDKISQLIYVERATKDVNDELKKLAHHYSEYSVQLDTGAIGINDFIDNLQLGANTNGSNVMLGGDGRNNQILLALWKAKSIKEHDIENEVIFYVIEEPEAHLHPHQQRKLADYLISELPGQTIISSHSPQIAVNFEPDSVIRLLDRAGHTVAASEGCSKDISDGWEGMSYRMSILPAESFFSNGVFLIEGPSEVLFYHSLAENLNIDLDYLNISLVSVDGISFKIYVAILDALEIPWVMRTDNDISKLKDQDKWQYSGINRCLDIAGLEKFEHSDIQIVPINTLTNGDWQTVSEEINKCGVYLSKVDLETDLVGELSAPILNALGKKNDQGAIEYLQNKKALRMRELLKDIKTDLHMLNSGELIKPLNHLVKIIRGE

SEQ ID NO: 63919 - protein, 541 aa, Edwardsiella piscicida C07-087
MSSFSPTPQQTLAIDYTGSMVITACPGSGKTTVIKEKIRNITDCLPEHKGVIAITFTKKASSELERRCKAEGHNVKHSFFGTIDSFCLKEIIIPFLSRVWGGTSTECKVLKKLESPYNHFIESNFAGTPSVININQDPGYKKLYDEGILWMGSFSALALKIINESSAAKRYIKARYSHIFIDEYQDSSLSQHELFLKINELGLCSIAVGDVWQSIYEFRGGNSELLLELVSNTECFKHFEINFNHRCHPSISNYASRLLEPSYVLLPADEIRVFRRRLNGNLKDAAVTISSWISGWLSSGEWNLEKANQIAILARKEKSLILFCSGLNLNFRLYVDTPLDKIGTDCSDLYKDLLAYKYGSISTAQEFINKVFDGVIVDDNTLLLLRKKIKTIRNELKNEDLIHKFHDIAYILGINSTEHTDGAVIRTISDDILVKQFKPLDDNEIQVMTLHKSKGLEFKLVFHLDLDEWSFPFREYNSEDRYTPRYPTLQQELNLHYVGITRAENCCILINSSLRENASGDFKNTDESYFFKLPQLNNLYS

SEQ ID NO: 63920 - protein, 676 aa, Klebsiella pneumoniae 700603
MQLKKIFISGFKSISNQNPQTIDLEHELTTFIGHNGTGKSTAMEALNKLFSVDNSLRSLSINDFHNADDGKDEKTRSLIIETWFSFPKPKEGKISIPPLIEHLTIDKSDGNILFRVRLEGKLSFEANPMGDIDEDIWVVSTSDEVVEESSKQKLSAAVRNAIQVSYVPANRDPLLQLKYSSKAVLGRLLKAIEWVGGSQEVLEEQAAKLNALTKSNPALNEIAAAINASWGNIYKGRYLSQASLNFPLANIDEILKLIQLQFNPDETGNTINVDRLSDGQKSLVYFSLIKAMFDIDKKTRELISSGAASNFNPEKMRLPIFSMISLEEPENHLSPHYLGRIIKLVKDYGRNELCQVIISSHSSSILSRIEPEQIRHFRLDQISKSTVVSALTLPEKEDELSKFIKEAVKSYPEIYFSKLVIFGEGDSEEIIIPKVLELYSTEIDSHSISVVPLGGRHVNHFWRLLKSLQIPFITLLDFDIDRNGGGFGRLRYAIEQLSIFCGGKYGKTKEKIPAWDDERDPTTFKIPRTDGDSYNVVAALENHNIYFSSPLDIDYAMIEAFPDIFCEKDVVYGERGPKNIEQEEQEEQEEQKKELINAVLKKGNSGVRYEFSVDYLKYFLWYRYRFLSNKSKPASHVRMFSKIEEKYTPDEIREKLPPVLIRVADKTVSLLAEVIE

SEQ ID NO: 63921 - protein, 557 aa, Klebsiella pneumoniae 700603
MTSQWLPSEGIEPTQELMDIIFCDQSVSVLAGAGAGKTELLAQKANYLLQTGKCMWPKRILCLSYKKEAQENIKTRVMKRCGQRGERFDSYTFDAFCKSIVDRFKDVLPENKRPLNNYDLVFNQKANNGKDKISFDLIRSLALDILTIRTDIVDLFSLTYSHVFIDEFQDTRSDQYEMIKLLFKDKGTQLLAVGDINQSIMLWAGAKKTVFEDCEKEFHTTKKLLVHNFRASEEIQEVLRCFIHFVQNDANFTPIIKSIDNCTIHYYDNELSEADDIADKIARFITSGIEEKEICVLVKQQSEQYTEKLRDKLTTKGIRNLDLSELQDVLKEPLGQIFSALFKVYTSRSSSSYTELCNLYLELHRVSRGDEKEDALIKVLSDNIAENKKNLGDEPSPDSLITCIKDIITLFGVKRMVGRWNQYRSADYWDKIWRNLEQHLRYTIDATHSLNEAALMFQADNSVQVMNVHKCKGLEYKVVIFLGLEDQAFWAYKNAKFENDCALYVALSRAKESIIITSTKCREHRITNWRDDRTSTYKNIGPIYSFLTKHCKFREVR

SEQ ID NO: 63922 - protein, 598 aa, Halanaerobium saccharolyticum subsp. saccharolyticum DSM 6643
MYLSKLKLWNFRKFGSKKFDIESPDFNLDFNKNLNVLIGENDSGKTAIIDAIKMVLKTHSYEWIRVTEDDFYNNSDRFRIELEFKDLQPEEAKYFTEWLSWEGEKEEAEPFLKVNYDVSKNEDRILPSDIRAGSDKDGYPLNAEARHYLKTTYLKPLRDAESELIPKRYSRLSQILKGHDIFKDEEDNKLYQEFEKFNEKISNYFKKANNEEFQNEGYQIKKVIDEFIRGFYDKDSKSEFRTSEANLRSVLETLELMISDVDNPGLGTLNRLFMAVELLHLKRDSWPGLKLGLIEELEAHLHPQVQMKVIEKLQNNNDIQLILTTHSPNLASKIKLENLIICTNDNAFPMGSDYTELNEKDYIFLEKFLDVTKSNLFFAKGVILVEGWSEEIIIPTLAKEIGYDLTENEVSVINVGNVGFDHYYKIFLRKDNPDAMNVRVSVVNDVDVTAYTKDNMEKKDEEFYQIKCKEEITKKKNKIKYLGKSSVEKPQTIVKPFISSGWTLEWCFYESDFLNRIFVKSTKQVHPQIFDTEDYEEELAIRLLDSNLRFNKTKIAYQIEESLRNESVLKGINLNEEETYQDDTISYLIEAIKYACGD

SEQ ID NO: 63923 - protein, 653 aa, Halanaerobium saccharolyticum subsp. saccharolyticum DSM 6643
MPAETNITDKDIKYAESILLDADESFEDDKNERIDFIRNLETIDLHAVPGSGKTTALLAKLLILERKLPFEDGSGIMVISHTNNAIDEIKNEIGEYCPKLFSYPNFIGTIQSFVNQYLAKPFFNQVTKEKISKINDDFYNERVENYYNNVLRDNFWLNKRANTLGFLQNIRFNENNMLISGINSKTDDFALKNTSGKTYRKLSKMKNILLNQGILCYDDAYYLANKYLKKYPEIKNLLQKRFSYVFVDEMQDMDIHQHNILEKIFYNNGNSKSIYQRIGDRNQAIYSGGTNFKLEEIWKSRENTLKITGSYRFSKNIATVLQNFALNSADIKSIKSENTKLKPHLLIYNDYNSQCEVIQRFIRLINKFKTENKIPEDYKYPIKAVSWITKEKEGNKITLPDYCPKFNKNRSTSKTEYNSLESYLINSKNNFKEINNDLLNMLLKILRIEKVVNSDNDRYYTKSSLFWYLKKNNKEQYEKLKLKLYDWSTKIIKGNNSEVSEDIKDYLDGFLGVFGIEKNKSIEFINKDPKKIIIEDETDFDCHLCKINNKKIELGSVHSVKGETHTATLYLESFYQKDGSGENAKSYESQRLNKQFKNEKITDSDNKRTKKSARIAYVGFSRPTHLLAFAVHKDRYDKYLSDINEDVWEVIEV

SEQ ID NO: 63924 - protein, 677 aa, Clostridium termitidis CT1112
MYVSKLIIRNFRVFDSKGITATFKKGVNAVIGENNCGKSALVDALRLAFSTTSYRKEIYFNLSDFHTDSRGIRSNEAFIDVYLDEIPADLFEIWNPENNTKGEFHIKYFAVQLPDGKEKIRYQIWGGPVEGNNLSSETLESIQTAHLGALRDSESELKPTKSGKLANLFSSIVNTDEAKEQVLAAVKLANVNIEGQQSVNQLRDIINTNLSVLEQDLLRQKVGVGLVEPKFEAIAASLRAWLKPRWIYIRNDNLILQLVKDLYSEDEWNQATDSGAEGVFVDVWTTESKTLSDEIKEALSSELSKKFEIMQNGLGYNNLLFMAAVLGDIEAATTETLFSLLLVEEPEAHLHPQLQELVHSFFEKNSDKDNVQVIYTSHSPTLISRIGIDKIVLLFENKHNIDCLSLSESNLDDKDKYYLERYLDVTKSQMLFAKGIIFVEGICEALILPYLAKIIDRPFDKYAVTVVNVDGVSFEPFSKLLCFANDPQRQTIKAAIVTDDDRCTDKSNQTQYISKDIDYDCSQADLNTVISKLEAGSPSDRYNKIVALCQTAHIGVFGAPKTLEYALALTEANIPYMLSAIIDVYPQAGKTLFNQVEQLTDINAKAACIWLFMRERLQQKAEVAQALTKRIADKKIWIKKDDGTFEDSTSNGDFIVPEYIQNAIFLVTKEKTDGRAN

SEQ ID NO: 63925 - protein, 586 aa, Clostridium termitidis CT1112
MVELTDEQNAFLDVEGKVVLCACPGSGKTFIVGKKLLKYLETWTYAYRGIAVLSFTNVASEEILRQIKELSEAKFQNIGFPHFIGTLDSFINTFIFLRFGYMIYEDDRKRPRVIYENFGQFLYPQRECHLNGCVKNLNWFHWSDNQLLKNGQPISCGVSKKPCVAFKKVMINRGYATQREVPALSLRLLKKYPDIANEIAYRFPVIMVDEAQDTSREQMEIIELLAEKGATTVILVGDPDQAIYEWRNATPEYFKVKLTDAQWNSLYLTANFRSSQHICNATAKFSAVLSGKRPAEAKGEHSNFGTKPVLLQVTDKKTKGEVINWFLQLCKRNGINPEGASVAILTRGRIHLNTDIPDLWQTTEIHLLALATYLWHCASKKEAYTQCEKALFYIMIGDANGLSTDDMRRVIENTMEYSVWKKKLISLLSSLPKANSTLRDWKSSLTTKMEELKQQGIICISDSRNITDIMKLKTRVKVGQSFSTEFLDRTLNEYFEKRTITGITRSSVHGVKGESFDATLLMVESSTGGTITPSLLNTGHLDSELMRIAYVAMTRPRKLLAVSIPKQNAKNSINRFPPELWDYQEI

SEQ ID NO: 63926 - protein, 707 aa, Desulfotignum phosphitoxidans DSM 13687
MRLSRIEISNFRLLKHFCLDLEDNLSLVIGKNNTGKTSILTCLEKLVIQSESKAISFEDFNVDLKFLLQKILSDEDEIGSEQDYSPLGIELKLYINYSSSDDLSMISPLIMSLDPDDNTVVLSFEYKISFEKLTEMKSDYRTEAEKFDNKPDLFLKEKLPDYFGSIARKSLLYSDHSQFIDLRKERINLRDILSIQLISAKRSVTNKQNDKTLSNQTSSLYKQVDEFEEQEEASDEFKHELRKTDGKLSGIYQKMFAGIIKKVNKFGGISPNDTDLKIASTLQHRELLEGNTTVMYAQQQHDLPEHYNGLGYMNLISMIFEIEMLMSRLRRSVKEKPAAINLLFIEEPEAHTHPQMQYVFINNIKTLLKENRLREDGLEIHLQSVITTHSSHIVSESCFDDIKYLKKSAQAQQVDAKNLKDLEKAYSADDDPDKDKALKRAYRFLKQYLTLNRAELFFADKAIFIEGDTERIILPAMMKKIDQEEPCGDEEQPLLSQNISIVEVGAHSQTFEKFIDFIGIKSLVITDIDSNKEVPDEKDPEKTKRDKCRPSDTDASQTSNASLKFFFGTKDLDFYKNLALEDKSLRKSEDGTGWQQSADGLLKIVYQVEEDGYYARSYEDAFFSLNRSILSVGHEAFPSLVKKHLDAFTSDTIDPYDFADSAVGSKPSLAIEILLNSETNEVGEKFSNWQVPLYIKEGLLWLRQNSL

SEQ ID NO: 63927 - protein, 635 aa, Desulfotignum phosphitoxidans DSM 13687
MVAPKFSLEKLSEEANQIVNLINEKKHFLLSGGAGSGKTYSLVEVLHAVTDKYPSFNIGCITYTNAAVDEIEDRISYDSIHVSTIHDFLWANIRNFQSELKETLVEMINDPTQSKIKIPNVESVEADFFDDIESIQYKEYLRLAKGIISHDEVILLASQMYEKYEKLCSITKDKFPFIFVDEYQDTNPLVVKILLEDMEKSPKENVVGFFGDAMQSIYDGSVGNLDTYIDTEPKRVVEVQKLQNRRNPGKIINLANKIRTDGLTQQPSDDASAPNMDENGVVKSGDIKFIYSANLNIDPVREYLGWEFEDNTLVKELNLTHNLIADKANFPELMRIYDKDKILEFLRNKVRRHLKENDPELDTSEKTLSQVLEHVGAAVKPTKGQQEYIDNYPEIHAYALSLPYDLISKLYVDKDQLLDDKKNFAEDEGKPGSNRDDLIKHLFKIETCIRLYQSNQFNQFIKLTDFSISSIADKIRLRDAIQSFTIDNNSTIRQVIDMADDLGIVIKDDRLNKFIEKRIYLYKQVCDISYQEFRNVYDYLEGYSPFSTQHKTKGTEFPNVLVVLDNGRWNQYNFKYLFEGNGTDSVRQRSEKIFYVCCTRAMEKLAVFFPNPTALVLGTAATWFGKENIVNLDEL

SEQ ID NO: 63928 - protein, 710 aa, Escherichia coli KTE212; identical to SEQ ID NO: 63848

SEQ ID NO: 63929 - protein, 558 aa, Escherichia coli KTE212; identical to SEQ ID NO: 63849

SEQ ID NO: 63930 - protein, 594 aa, Escherichia coli KTE228; identical to SEQ ID NO: 63846

SEQ ID NO: 63931 - protein, 593 aa, Escherichia coli KTE228; identical to SEQ ID NO: 63847

SEQ ID NO: 63932 - protein, 659 aa, Escherichia coli KTE234
MKITEMEIKGFKSFDNVGQTININSFTSLIGGNGTGKTAVLLALTRMFGVKSSDRIIQVDDFYVPPGDEIDTQDERELSVRVKFEFADLKDGEDDSVADFFKHLISSEAGEIPFCIAKLKAKWTKTNLAEGDIESDLVWEIGESEKNITAYERSKIHVHYVPAYRDPAQQLKQTAGTIMHRLINAVEWSEQMGATVDEVAVSIGNQFQEEVGVQTITSSLGRNWKSLFTGGYFEELQIKPVVNGIDDVLKHIDTVFLPSPDTQPLPTERLSDGMKSLFYLSLVKSAFDIEDEIINSEGKHLSISVEALDPPNLTIILIEEPENHLSPQYLGRIVKLCEEISENDRAQVVLTTHAPSLLNRVEPENIRYFRLNDNKNTVVKEILLPSKGEGDAENVDTFTYVKEAVKAYPEIYFAKVVILGEGDSEEIVIPKIAQVNGIELDTSLITFAPLGGRYVNHFWKLLNELSIPHVTLLDYDFRRGGGGWGRIKYAVKQLISIGADKNELLRVTSGTLSDEELEEMHTWDENPDSESGWIECLKDYNVYFSYPYDLDWIMLNKFFEDYKTFVPVNGGPRLPKDDDPEYNKKVEAAIASVLKKEEKDIDIKKFDDFEKYFWYRYLFLGRGKPLSHNYVLSKMEDDRLRDNSPEVLNELIETVRGLL

SEQ ID NO: 63933 - protein, 615 aa, Escherichia coli KTE234
MPTIKDADWVLKDIQEVEDEAMKVIRNSTEHNLVLAGPGAGKTELLAQKACFLIETGKCRSKKIIALSFKKDAAKNLQDRVNSRLDTKYRHKFESTTFDAFCKSIVDRFKSTIPESYRPSNDYEIIFPNNNDLVEEIKREAVGFEGLTSEELNKLQPYNFEENYIVTPYNKALEHSVDGRIRRFVWLHLLKPKSRLSFKMINFLANYIISRNQYLSNAINSTYDYAFIDEFQDTTYRQYEIFKSIFLGKKIKITAVGDTKQRIMGWAGAMHNAFDVFKKDFGIEQSNELVSNRRSLKNLINYQRMMEAFMNHADIKPDMMLIENEGSAKLLQFDESSIEGAYIALCIQQWIAEGVNERDICILLRNPAKQYTDDIISALQYLKIQCRLENEYQDLLNEAVVQLLLQMLMFVCNRKSIESWATTMELLCNIRGVSKRGDVTRLEKELSQFIKSHRVIKGEIVDYLYSLLSIFGVDKIKSYFPQYMSGNGLEYSIELLSRHFDKLDVKENTSEAIDLLLGNKTIPLMTIHKSKGLEFRKVIVVGLEPGAYFGKEEEQIENQKTVFVAFSRAIEEVLMTRCKIRNNSYGRSIKQNCNDIPLITNMITYCGIEAEDYQG

SEQ ID NO: 63934 - protein, 603 aa, Escherichia coli KTE119
MYLSRIKIKNFRNFSDLDVALGGNVVIVGENGVGKSNLLLGLRLIFDPSLPDSSRQLGLADFWDGLEDITTETTITISIEIKDFEEDLDVLAVLTDYRLDDDPQTVRLTYQLRAQPNLTHAPVSDDNFSFLCFGGEDESKRFGHELRRRITMDLLPALRDAEGDLAAWRRSPLRPLVEEAFIGVDKNALKEIGDKIAQASAAAINFKEVKMLESNIAALLMTMAGSKQNIQPSLGFSATDATRINRQIRLLIDEGRRGVADASLGSANLIFLTLKLLDLQRLITANKRDQSLLAIEEPESHLHPHLQRLVYKHLFETIIDDEDVENWKTSGPLSVILTTHSPHIASVAPLSSILLLRAHSIEGTVGYSTANAGFTTNDIEDLERYLDVTRAEMLFARGVILVEGDAERFLIPAFAKNMEVSLDEHGVSVCSVAGTNFLPYVKLLCALGIPFSVITDYDEVDSIPRAYNRALKLVRKITDAADGNNTNAIIQSIKDKETWEETFDEIQKFGIFVNWSTLETELFEEDYAQEMIDTLREHNFSDNRKAALDAWEMQPEDFDADELLKMIEQMGKGRFAQRLATRIPQKPVPSYIEGAINYVIDHV

SEQ ID NO: 63935 - protein, 598 aa, Escherichia coli KTE119
MSSIMSNEKLYLRAAADLFSNTKQWQAYESTGHCVLLAGPGSGKTKTLTIKLARMLSEDVEEPRGIACITYNNECARELENRLAALGIAPSKRVFIGTVHSFSLTQILLPYAKVANIGLPDKFTVANRQQTKACLAAAHAKIIGGSENPQNWEMRLGNHRRRFINRERPEWKSFNPVLTKLTETYEAELRARGLIDFDDMPLLAVRALTTNKWLRTAMVAKFPILAVDEYQDLGIALHGMVMGLCFSAGMRLFAVGDVDQSIYGFTGATPELLRRLSDRDDVETVQLDLNYRCGSRIVSASEYALGEARGYKTPENAEKGTIFFHPCAGDYARQARYLIEGLIPEICERRPHINLGEIAVLYPAAFLGDEVANAAAEHGYSVIRTDGNALYPRGSRLMRWLEQCAMWCCGGWRSGTPSLSRVISEGIRLFHESITDEDERLIFQRDLTAVLWGNRDEMLGLSNWLTELRDDIIRPHVAITRTLVDEYATLNNFLTRLKPGGDIEDFPIAEFAGIGSGLQRITLSTLHSSKGREFDVVILFGIEEGRLPRNRASGNDLREARRLFYVGFTRAKHEIHLMYGQQNPSRFVTEVSKRLEEE

SEQ ID NO: 63936 - protein, 690 aa, Escherichia coli KTE45; identical to SEQ ID NO: 62940

SEQ ID NO: 63937 - protein, 577 aa, Escherichia coli KTE45; identical to SEQ ID NO: 62941

SEQ ID NO: 63938 - protein, 754 aa, Escherichia coli KTE45
MRINFIEIKNFRKLKSVRIDIAEKTTLFVGANNSGKTAAMEALGHFLVDASRFSVNDLTLCNWAKIKDITEQWLTEENIDLDKSQEALSDLFPFMDIWIEAKENELQYVNHILPTLEWNGGLIGVRLRYEPKKFDVFFEDFISSRQNSLDIHDRISERIDKENYTIALWPKDIYEYLSRKLNSLFTIKCYSLDPSKLELSDNGIAKPQRIDSKQTLLDGIPLKDLIRIDEINAQRGFGSPSAADKENSKLNTQLRDYYSKHLNPIESPELSDIEALQAIRDAQDTFDERLKNCFSQAIKEVEGLNYPGVTDPKLKISTKIEPIDGLNHDSAVQYELTNALSNVSLDYLRLPESYNGLGYQNLISIAFRLMGFRDSWMKVGKATNKKLADDNQEDFPAPLHLVLIEEPEAHLHAQVQQIFIRKAYDILRNHNNLGDKEELHTQLIISTHSSHIAHECKFSSLRYFRRIPACKEHEIPVSTVINLSNVFGVNDDTEKFVIRYLKATHCDLFFADAVILVEGPAERILVPHLIRRHYPFLNQSYITLLEIGGSHAHRLKNLIVSLNLLTLIITDLDPKDSQDGKVKPSKKGSGFVTSNTTLASWVPEVTGVDELYKLTEDKKEKKYNEFFYVYSAFQIPVLAEFKGVNQEFLPNTFEDSLVYNNLDFFSNLTGNGLVKKFKASITNCKNAEEFGEESFSHLSKGNKAEFALDILYHDESDKLNTPNYISNGLKWLEEKIKIKQLELVSDLASDGETK

SEQ ID NO: 63939 - protein, 612 aa, Escherichia coli KTE45
MTIKQTEEILDSNIYNYLTGTQKHSFLLYAGAGSGKTRTLVNVLEMILKSHSEEFRLRGKRIAVITYTNAACDEIKRRVKFNKLIDVSTIHSFLWELIRYHSSDIKSWLMENISAEIADLRDKQSRTTRVSQASLERERKIVSKEKRLQNLSDVYKFTYNPTGDNRTKDSLNHSEVIKLGSYFLDKKYTMQKILVNRHPILLIDESQDTNKLLMNALLEVEKNNRDTFSVGLLGDMMQRIYSDGKSDLEACLDEHWKKPEKSINYRSPKRVVALINLIRSQVDNHKQKAKEDAEEGYVRIFIKECHSDNKDRDESFVKQRMREITLDDDWENHDSLVNTLILEHHMAATRMGFIDMFTPLYQIERLKTGLLEGSLGNINFICGIVSPLISACIKNDTFTITNILRTNAPLLKREHLLKNTNNASPLTQIRSSLDMLKSFISKNPELITINLLHKINEIKLLDIPDSIQEILESNDNSQDDIIEAWQKSFSSPLCQFDKYYNYVKGKTNIDTHQGVKGLEFPRVLVLIDDSEAKGFMFSYDKLFGIKEKTKTDLDNEKEGKDTSEDRTRRLFYVTCSRAQKSLAILAYTDNTEMLRKNLLHKGWFDSSEIEII

SEQ ID NO: 63940 - protein, 690 aa, Escherichia coli KTE46; identical to SEQ ID NO: 62940

SEQ ID NO: 63941 - protein, 577 aa, Escherichia coli KTE46; identical to SEQ ID NO: 62941

SEQ ID NO: 63942 - protein, 754 aa, Escherichia coli KTE46; identical to SEQ ID NO: 63938

SEQ ID NO: 63943 - protein, 612 aa, Escherichia coli KTE46; identical to SEQ ID NO: 63939

SEQ ID NO: 63944 - protein, 712 aa, Escherichia coli KTE48
MHISKLTLVNYKNFKNTSLRFHKGVNTIIGENGSGKSNILRAIRLLLDDTMVRAAYRLDESDFSRSLGQWQGHWIVISMEFDDITTDESVQALFLHGTAPLDDVPIHKATYNLIFRPKKEIRLKLAALRMFEHEQLSEIRDSITIDDYETIFTGRSWADFGNPAVYKSIVGDFDVCNFSSETEFPEIGAKVPGFLSVTKEVSLTFIQALRDVVSEFHNNRTNPLLTLLKSKSGEINPAKMEPITEMVRELNTSIEGLEDVQSVRNHIRETIKDAAGETYSPASLSIKSDLPEEADKLFKSLRLFVGESEEGYEGAIHELSLGGANLIYLTLKLLEFKYQREKLTIANFLLIEEPEAHIHTHIQKTLFDRISYSDAQIIYTTHSTHISEVSNVSNVNILGRHGSFCEAYQPARGLEPTQINSIQRYLDAVRSNLLFAKSVILVEGDVEEILIPILIKLVLGVSVDELGISVINIRSTGFKNVAVLFHNLRIKKRCAIVTDLDQAFFDITEQTTDTESMAKIKAKAAGSQKAGLERQADLTEFTVDNPWLATFYAKYTFEVDFVAVGNHEAVIQTIPKVYKDEGTRKEAKQQLQSGDLRQMGCRTLTMAKQVGKGWFALLLAEYLTPQVHIPAYIMQAIHFAHGTFPLPLLARMLQHRAEYRYGSDALNSAVKQAFLLEVERFARGYIGLAELRIAIEHMLPGDAIDAFLAEMQ

SEQ ID NO: 63945 - protein, 593 aa, Escherichia coli KTE48
MFVWDPRDLNPEQAEAVIEPSSIFLNACPGSGKTRTLTYKIAYELTRRTDKRIVVAITYTHRAADEIQERIEDLGVDTSGLWIGTIHAFCLEWILKPYGIYSPELAHGYRVIDPHDRERLLERLCSPYKGVTHWDCDYYVTETGYQLGCVDKGKHHIIHKILKAYFDELSVNRQIDFELILWHAYRLMHDRAQIAVLLSRVFSHILVDEYQDTKQIQYTILTSILRAGSGKTKTFIVGDPNQAIYGSLGGYAMPVDEFRTRAGILIKEFALSRNYRSSERIISYFSNYSVHATKINGAGKHAKYPSRVTYNQNVTCSDVHDEIVRLIRVSLANAHSPENICVLAPQWVLLASTTRKLVAMLPDQQFDGPGLVPFSNNFDNFWFKVSKILLTDSSPRLLVRRMRWANDVIKDLDSFGVDTKSLTPRILLREINALTIDETDGLSYLDQAFNDLLKRLDIPQEIHPALLTHREAFFSSSAARIARLQKEGATYINQVSFFKKVFRERAGITVSTIHGVKGAEFDVVIAFGLLEGMVPHFNEANRHIAASKLLYVLSSRARKNLHLISESGRQRGKYGVYTSTELLTTCQFSYDLD

SEQ ID NO: 63946 - protein, 656 aa, Escherichia coli KTE165
MLIESVKLTNFRSFGPQGQQIKLDPMLTTLIGANGTGKTAVLQALQRLFGVTSEQRTISRQDFHVPSTETDLPNARNLSLEAIIAFPELDDAQGDHSAIPEFFRSMSIADEHGRLKCRLRLDAQWDDDGTIDGYVTSQFHAITCWGNDEPDDSDFHKVRPADRAKIQLIYIPATRSATAQVSSFLKGRLWKAINWSTQVRASFAEKAHELNSAFESESAIDAITGRLTQRWQQLHSAGTDSTPKFRPVDVRFEEFVRKVDVLLHPDESGRDRSIEELSDGQSSLFHIAMTSATLDVEREIRLNSRGSAFLYDDLPLPSLTLLALEEPENNLSPHYLSRIVSQLNELTGNIHAQAIISSHSSSILARIAPTQIRHFRLDVVSKNTIVRALTLPKEDNDAAKYIQQAVRAWPELYFAKVVVLGEGASEEVILPAVAGAMGTPIDRSFVAMVPLGGRHVNHMWRLLNDLQIPFITLLDLDWGRHGGGWGRIKNIISQLIEVGTVPQVFFQNVDPRGYKYNLLEFDTYSPSNKAHIDSWVDFLKRFSIFFSNPLDIDYSMLKAFSGYYQTPPEENASGPSMAGDPRDAVLGNEGIPAFYADDIHILRWYRYLFLGRGKPSTHIRVLGQIPSDQLAQNAPDELKALVQTLQHHLSNRGSQQ

SEQ ID NO: 63947 - protein, 633 aa, Escherichia coli KTE165
MKFISPEQWRPKEIDDLEPNAWNALRTSGSVSIIAGPGAGKTEFLAQKAAYLLETGICPPSQQILAISFKTDAAKNLADRVKLRCTEELSHRLVSMTFDAFTKSLVDRFRLALPQEWRPSKKYSISYPNKRDVAQFWARRQHRVSSSDARDIEYETRHMDAASFESHVVGSYRIPENMSPPQSIKHYLVFWWLREQIKNENEEESALSFMTINRLAEYIVRSNIHILRALKATYPFVFVDEFQDTTYGQYDFLLSAFGQAKTTITTVGDYKQRIMGWAGAKTDAFHQFEHDFSATRYQLQLNHRSSPELVRLQHIVAREIEHGVCMAHTKVPQRIENGCAFILNSRSVALEVNYIAKWISRNMQSRELRPRDYAILARQKPENYYDQLNQSLINYHLKLRNESVKIGNTTLQDLLTEEFTILFSNLLRFVIGQKEPRIWGQVYSSIEQLRGTLPDDIRAHKTIENQLVNLKHSMQALLEQPYSTTTAQPVLERIISFISPSDMRKAFSRYNTGDLLKITLEALEIHFLQCVSSTSNWQDCVDEFDGVDHIPLMTIHKSKGLEFDTVIFIGLDDNAWWSHQPGNAESMATFFVALSRAKQRAVFSFCSERGERQKISDIYALLEKSGVKEYNIN

SEQ ID NO: 63948 - protein, 690 aa, Escherichia coli KTE194; identical to SEQ ID NO: 62940

SEQ ID NO: 63949 - protein, 577 aa, Escherichia coli KTE194; identical to SEQ ID NO: 62941

SEQ ID NO: 63950 - protein, 663 aa, Brevibacillus borstelensis AK1
MQISKVKIRNFRSFGETETTIHLSKLTTLVGANSSGKTALIQALLKLFGMNPSDRTLARGDFHVPHFFNVDECKELELSIEVRIDLPELISHDKTIAKKSIPPFFNQLVVNSPGEVPYLRIRLSGKWIQGNTPEGEIEQHLHFITVAEGEDETNALVAVSPHQRSTIQMIYVPAIREPLTQLKNASGTILWRILNKIKWPENIDEQIKDKMKIVNDLFDGIEGVDQIKKIIQEEWEKFHRDFRYKTTNIEFNSTTLSSILKKIEVQFTPTQEPGVYTIDKLGDGLRSLFYLSLVSSLLKVEEKINGESSAAFTILAVEEPENHISPHLLGRVMDNLKTISSRENAQVLLSSHSTAIIKRIDPEDIYHLRIDSNNGSTIARKIELPLKADEAYTYIKEAVKAYPEIYFAKLVILGEGDSEEIILPKILEANGVIADDEGISIVPLGGRHVNHMWKLLHQLNIPHITLLDLDRERGGGGWGRIKYVLQQLLKNGHDRNELLGVTRNGKSHTITDDELEKFHERPLTEKHIETMQKLWISRLEKYNVFFSAPLDIDFLMLESFQGPYKQTVPRGPNLPDKNTNPEQYRQKLQNGVKTTLKNENSTGETYTEEQHELMVWYNTLFLGRSKPSTHIEALLALDKEHLIRNCPKVLNDLVLRVKTILEL

SEQ ID NO: 63951 - protein, 636 aa, Brevibacillus borstelensis AK1
MTIFVSPEQWMPADGLILEPAADIAVRSQNNTLIVAGPGAGKTELLAQRACYLLQTGKCEPPQKILAISFKVDSAENLAKRVEKRCGKELARRFESRTFDSFAKHLLDQFRLAIPIEYRPARDYDIAFSVRDIREIATSYLTERHPTHPNWQYEIDFDELFKKLTRTPLPLKEVNSDIYDWIVIQLWGILIHGKKSLKSTLTFPIISRLAELLLRSNSYITAALRATYSHVFLDEFQDTTFIQYDLLKTAFLGSSAILTAVGDDKQRIMGWAGAMPNAFAQFIHDFNASEIHLERNHRSAPRLVEIQNILAKIIRENSVEVSSSDKWKQEDGICQVWTFSDHLQEANYVASKLDELINKQKVPPRDLCILVKQQEHIYAKALLTELEQRGIKARIEKEYQDLLADELIQLCIDALTLAVYLHSPETWQRMISFLVDLNGIEANDEQDQILRMEYQLSEFIETLREKTKQIQTKNCFESIKELNNYILDYIGIEKIIGAFPKYARKRYLTEIIEKGAEKLAESFELYGDWKESIEDFLGFNSIPIMTIHKSKGLEYDTVIFLGLEDDAFWSFRNQTDADLCAFFVALSRAKRQVIFTFSGSREVLRGRQLQTVEQFKIQISSLYQMLEQANVEVISH

SEQ ID NO: 63952 - protein, 556 aa, Acinetobacter baumannii ABNIH19; identical to SEQ ID NO: 62630

SEQ ID NO: 63953 - protein, 593 aa, Acinetobacter baumannii ABNIH19; identical to SEQ ID NO: 62631

SEQ ID NO: 63954 - protein, 556 aa, Acinetobacter baumannii ABNIH6; identical to SEQ ID NO: 62630

SEQ ID NO: 63955 - protein, 593 aa, Acinetobacter baumannii ABNIH6; identical to SEQ ID NO: 62631

SEQ ID NO: 63956 - protein, 566 aa, Escherichia coli MP021561.2; identical to SEQ ID NO: 63124

SEQ ID NO: 63957 - protein, 540 aa, Escherichia coli MP021561.2
MKLTKEQLDAIDYEGNLVITACPGSGKTTILVHKIAACLSHSKDYQGVVALSYTNKSSEELKARCRKLGAELNSSFFGTIDKFFINEIILPFVRQVWGRNESALEVVKYIDLSQELKDKTNKYFDRVDFYSNTSFEGMGSLRDIYLKGMLILDFLPHLAFYIVRTSYSCQRYLMAKYIGFFVDEYQDTGYFTHQVFKFIPTLGMPLIIVGDLDQSIYLYSHRSSDSLKDFMNDSGFCHKEITVNHRCHPSIVNYANRIKDFECQLAPCDEIFVYRKCVDGNQIDIAKWIGEILDNVKNKFSISDNKEIAILVRSNACAELVSDNLVVSNRAYLDNDLTKAGGKVSGLVNDLLCYRYNLNKTAQSILEGVLGRSVKRSEATRIRKAIKQVRSVTDAFLIDVINKIVVTLLGTEIEQHHKSALSEILVTPRMQNNYLDVRSDEVQIMTLHKSKGLEFDFVFHLDLYDWILPKRVFIEGSYDVVFENEQQCINLHYVGITRARKGIMLMHSTKRYNGSGDLKNGAPSQFLLKPGLDGLYKKIN

SEQ ID NO: 63958 - protein, 566 aa, Escherichia coli 180600; identical to SEQ ID NO: 63124

SEQ ID NO: 63959 - protein, 540 aa, Escherichia coli 180600; identical to SEQ ID NO: 63125

SEQ ID NO: 63960 - protein, 710 aa, Escherichia coli 2860050
MFIKTLSVRNFRNFKATSLSFKKECVNTIVGENSSGKTNIFEAMRLILDDTLPYYKRYLVENDFHRGLGTAFGHWVIISLEFDEIGGDEESELLCQLNTTVNGGGTGRITYIYRPQFYIREQLFNLNDIEDIDQRRSAYNILKEQYSIDKTTYESLVLCQGTADFTDDGLYSHVVGDFNDCLFPDPKLERIDLIGNRQRGYNIQDNISCTYARALRDVVSELKNNRFNPFQKLLEYVSKGIDNDDALSENIKSVNDRISSIEEVKRLSEGILLSITNAVGTTYSPVLNVTSELPCELKELVKVLQLKAGDSLCEGYVSELSEMSLGGANLIYLALKLYEYEEGISKNLLANFLIIEEPEAHIHTHIQKSLFSNLKNNKTQVFISTHSTHISSVSNISTTNVLVKNGLETISCSPSNGLEKEKINRIERFLDAIRTDILFAKNVILIEGDAEEILIPHLVRNSFGITLDELGISLISVRGTGFELLSSLFHSDRIKKKCAILTDDDINLYGDNKPDYLSQDDYNKAVNSAESGVARKVILDEIVRNNAFIRAYFSKYTFEIDLVLSGAVRYFDAIAAESFEKKAYYTPYQEAFQSSDRQKIGCYALKLANKHKKGWFAMMLVDKLDADFPIPKALCQSLGFTGDFNKFTLAKMVRYRSEIIKNKDGSDLLNNILGQDDLAFIIDNIDAALDIFKAHYPNDPLTTLLEVHHG

SEQ ID NO: 63961 - protein, 558 aa, Escherichia coli 2860050
MDDQKRQLINIKDNLLVSACPGAGKTKLLIGMLEDNLYRNESFRWHIVLTHTNAAADEISSRIDNLSIEVDRVWCGTIHSFFLEWVVKKYAGAISRLKDGFSLLSEYKQKKIIKSIESDKKLGVRIRYNCDERGNAFVEPYCHSLDDKHKELLVIQEYNAFKENNRLIDFDDIIKLGVEFLENNQNICEHLSKLIGNIYLDESQDTSLIQLKALSYITRYNRVSVFIVGDNDQAIYQDLGVSIKDKDIIKSELQLSELKHETLSGCYRSSELLVKYYKKYSASRNDVTSLREFEGKSPIIKDISQDELPQRVFNLINQYQAKYNSVSGIAIIGPDKYYLMALINALYDLSENFVYDFQSTNPLYCARNTVFYELISLVVLDVNVINYQRRSSLARKIVDSVPELSHLTPLQLKRDLKEFQSVKNNFILWLRELYDFLEMKYQKSIKLETDYKICNAAASVAKIRAGMGAISKMINKDKNVVSVSTIHGSKGEEYDYVISIGYHDQVVPHKSSFEKGNEYARDIANRLMYVAFSRAKNYMNIFIDDRRKVSPFFIREPD

SEQ ID NO: 63962 - protein, 566 aa, Escherichia coli P0304777.1; identical to SEQ ID NO: 63124

SEQ ID NO: 63963 - protein, 540 aa, Escherichia coli P0304777.1; identical to SEQ ID NO: 63125

SEQ ID NO: 63964 - protein, 594 aa, Escherichia coli Envira 10/1; identical to SEQ ID NO: 63538

SEQ ID NO: 63965 - protein, 605 aa, Escherichia coli Envira 10/1
MPSRSVSAAYLAQAAELAGNPGQLSAYHSQGHCVVLAGPGSGKTKTLVLKLARILAEDVQAPRGAACITYSQECARELTRRLEALGLREAPNLFIGTVHGFCLRHLLMPYGRLADLPIPFPLSVASQRESERLLRQSGDRLFGANHPYKAIDLGRHRRSVLNRNSVAWRTEEELAAWAEAYEAALRQQGLIDYDDMVIFGQRLIIEHDWVLPLVQAKFPILAVDEYQDLGVALHRMVKRLAFEGGVRLFAVGDADQSIYGFTGADGALLLELAGRRDVETVRLQLNYRSGADIVNASEMVLGEVRGYRANDPNRQTTIAFQLCPDGLGDQAVYAVEQIIPAALAAKPGRTLGDIAILYKDYRAGDVVADAVTASGFDYIRVDTAAPYRKVALTSWVEDCAAWCAGGWRIGRPQLRGLIDRYLAFHRARLDDACARSKGQELTRLLWALRADQHSASDFVASLRNGLVDSLLATEPTLSDQAEQLDRMTAALAEGGALAMLDITSLGGRDGSPEHLNLLTLHSAKGCEYDVVIMVGLDLGNLPWRNETPEKLRESRRLFYVGLTRARDEVHMLYSGFVDGRYGPMRLGRSPFLDELEERMRGAGLR

SEQ ID NO: 63966 - protein, 594 aa, Escherichia coli Envira 8/11; identical to SEQ ID NO: 63538

SEQ ID NO: 63967 - protein, 605 aa, Escherichia coli Envira 8/11; identical to SEQ ID NO: 63965

SEQ ID NO: 63968 - protein, 566 aa, Escherichia coli Jurua 18/11; identical to SEQ ID NO: 63124

SEQ ID NO: 63969 - protein, 540 aa, Escherichia coli Jurua 18/11; identical to SEQ ID NO: 63125

SEQ ID NO: 63970 - protein, 566 aa, Escherichia coli 199900.1; identical to SEQ ID NO: 63124

SEQ ID NO: 63971 - protein, 540 aa, Escherichia coli 199900.1; identical to SEQ ID NO: 63125

SEQ ID NO: 63972 - protein, 659 aa, Escherichia coli P0299917.10
MKITQMEIKGFKSFDNVGQTININSFTSLIGGNGTGKTAVLLALTRMFGVKSSERIIQVDDFYVPPGDEIDTQDERELSVRVKFEFADLKDGEDDSVADFFKHLISSEAGEIPFCIAKLKAKWTKTNLAEGDIESELVWEIGESEKNITAYERSKIHVHYVPAYRDPAQQLKQTAGTIMHRLINAVEWSEQMGATVDEVAVSIGNQFQEEVGVQTITSSLGRNWKSLFTGGYFEELQIKPVVNGIEDVLKHIDTVFLPSPDTQPLPTERLSDGMKSLFYLSLVKSAFDIEDEIINSDGKQLSISVEALDPPNLTIILIEEPENHLSPQYLGRIVKLCEEISENDRAQVVLTTHAPSLLNRVEPENIRYFRLNDNKNTVVKEILLPSDDEDDADNVDTFTYVKEAVKAYPEIYFAKVVILGEGDSEEIVIPKIAQVNGIELDTSLITFAPLGGRYVNHFWKLLNELSIPHVTLLDYDFRRGGGGWGRIKYIINQLLKVGCDEDIVLQTEGGKLTLKELNGMHEWKENEKDEKSWIDFFETYNVYFSYPYDLDWIMLNSFPTSYHSFIPDNGGPKILPKTDAQYIDKTKNAIASVLKKDAEDIDIDSFEDHEEYYWYRYLFLGRGKPLSHNYVLKKLDNNSLKNNAPDVLKNLIEKVRGLL

SEQ ID NO: 63973 - protein, 615 aa, Escherichia coli P0299917.10
MTIIKDDDWVLKDIQEVEEEAMRVIRNSAEHNLVLAGPGAGKTELLAQKACFLIETGKCRSKKIIALSFKKDAAKNLQDRVNSRLDSKYRHKFESTTFDAFCKSIVDRFKSTIPESYRPSNDYEIIFPNNNDLVEEIKREAVGFEGLTSEELNKLQPYNFEENYIVTPYDKALEHSVDGRIRRFVWLHLLKPKSRLSFKMINFLANYIISRNQYLSNAINSTYDYAFIDEFQDTTYRQYEIFKSIFLGKKIKITAVGDTKQRIMGWAGAMHNAFDVFKKDFGIEQPNELVSNRRSLKNLINYQRMMEAFMNHADIKPDMMLIENEGSAKLLQFDESSIEGAYIALCIQQWIAEGVNERDICILLRNPAKQYTDDIISALQYLKIQCRLENEYQDLLNEAVVQLLLQMLMFVCNRKSIESWATTMELLCNIRGVSKRGDVTRLEKELSQFIKSHRVIKEEIVDYLYSLLSIFGVDKIKSYFPQYMSGNGLEYSIELLSRHLDKLDVKENTSEAIDLLLGNKTIPLMTIHKSKGLEFRKVIVVGLEPGAYFGKEEEQIENQKTVFVAFSRAIEEVLMTRCKIRNNSYGRSFKQNFNDIPLITNMITYCGIEAESYPG

SEQ ID NO: 63974 - protein, 654 aa, Escherichia coli P0299917.2
MEIKGFKSFDNVGQTININSFTSLIGGNGTGKTAVLLALTRMFGVKSSERIIQVDDFYVPPGDEIDTQDERELSVRVKFEFADLKDGEDDSVADFFKHLISSEAGEIPFCIAKLKAKWTKTNLAEGDIESELVWEIGESEKNITAYERSKIHVHYVPAYRDPAQQLKQTAGTIMHRLINAVEWSEQMGATVDEVAVSIGNQFQEEVGVQTITSSLGRNWKSLFTGGYFEELQIKPVVNGIEDVLKHIDTVFLPSPDTQPLPTERLSDGMKSLFYLSLVKSAFDIEDEIINSDGKQLSISVEALDPPNLTIILIEEPENHLSPQYLGRIVKLCEEISENDRAQVVLTTHAPSLLNRVEPENIRYFRLNDNKNTVVKEILLPSDDEDDADNVDTFTYVKEAVKAYPEIYFAKVVILGEGDSEEIVIPKIAQVNGIELDTSLITFAPLGGRYVNHFWKLLNELSIPHVTLLDYDFRRGGGGWGRIKYIINQLLKVGCDEDIVLQTEGGKLTLKELNGMHEWKENEKDEKSWIDFFETYNVYFSYPYDLDWIMLNSFPTSYHSFIPDNGGPKILPKTDAQYIDKTKNAIASVLKKDAEDIDIDSFEDHEEYYWYRYLFLGRGKPLSHNYVLKKLDNNSLKNNAPDVLKNLIEKVRGLL

SEQ ID NO: 63975 - protein, 615 aa, Escherichia coli P0299917.2; identical to SEQ ID NO: 63973

SEQ ID NO: 63976 - protein, 659 aa, Escherichia coli P0299917.4; identical to SEQ ID NO: 63972

SEQ ID NO: 63977 - protein, 615 aa, Escherichia coli P0299917.4; identical to SEQ ID NO: 63973

SEQ ID NO: 63978 - protein, 659 aa, Escherichia coli P0299917.5; identical to SEQ ID NO: 63972

SEQ ID NO: 63979 - protein, 615 aa, Escherichia coli P0299917.5
MTIIKDDDWVLKDIQEVEEEAMRVIRNSAEHNLVLAGPGAGKTELLAQKACFLIETGKCRSKKIIALSFKKDAAKNLQDRVNSRLDSKYRHKFESTTFDAFCKSIVDRFKSTIPESYRPSNDYEIIFPNNNDLVEEIKREAVGFEGLTSEELNKLQPYNFEENYIVTPYDKALEHSVDGRIRRFVWLHLLKPKSRLSFKMINFLANYIISRNQYLSNAINSTYDYAFIDEFQDTTYRQYEIFKSIFLGKKIKITAVGDTKQRIMGWAGAMHNAFDVFKKDFGIEQPNELVSNRRSLKNLINYQRMMEAFMNHADIKPDMMLIENEGSAKLLQFDESSIEGAYIALCIQQWIAEGVNERDICILLRNPAKQYTDDIISALQYLKIQCRLENEYQDLLNEAVVQLLLQMLMFVCNRKSIESWATTMELLCNIRGVSKRGDVTRLEKELSQFIKSHRVIKEEIVDYLYSLLSIFGVDKIKSYFPQYMSGNGLEYSIELLSRHLDKLDVKENTSEAIDLLLGNKTIPLMTIHKSKGLEFRKVIVVGLEPGAYFGKEEEQIENQKTVFVAFSRAIEEVLMTRCKIRNNSYGRAFKQNFNDIPLITNMITYCGIEAESYPG

SEQ ID NO: 63980 - protein, 654 aa, Escherichia coli P0299917.6; identical to SEQ ID NO: 63974

SEQ ID NO: 63981 - protein, 615 aa, Escherichia coli P0299917.6; identical to SEQ ID NO: 63979

SEQ ID NO: 63982 - protein, 659 aa, Escherichia coli P0299917.7; identical to SEQ ID NO: 63972

SEQ ID NO: 63983 - protein, 615 aa, Escherichia coli P0299917.7; identical to SEQ ID NO: 63979

SEQ ID NO: 63984 - protein, 659 aa, Escherichia coli P0299917.9; identical to SEQ ID NO: 63972

SEQ ID NO: 63985 - protein, 615 aa, Escherichia coli P0299917.9; identical to SEQ ID NO: 63973

SEQ ID NO: 63986 - protein, 566 aa, Escherichia coli P0304777.10; identical to SEQ ID NO: 63124

SEQ ID NO: 63987 - protein, 540 aa, Escherichia coli P0304777.10; identical to SEQ ID NO: 63125

SEQ ID NO: 63988 - protein, 566 aa, Escherichia coli P0304777.11; identical to SEQ ID NO: 63124

SEQ ID NO: 63989 - protein, 540 aa, Escherichia coli P0304777.11; identical to SEQ ID NO: 63125

SEQ ID NO: 63990 - protein, 566 aa, Escherichia coli P0304777.12; identical to SEQ ID NO: 63124

SEQ ID NO: 63991 - protein, 540 aa, Escherichia coli P0304777.12; identical to SEQ ID NO: 63125

SEQ ID NO: 63992 - protein, 566 aa, Escherichia coli P0304777.13; identical to SEQ ID NO: 63124

SEQ ID NO: 63993 - protein, 540 aa, Escherichia coli P0304777.13; identical to SEQ ID NO: 63125

SEQ ID NO: 63994 - protein, 566 aa, Escherichia coli P0304777.14; identical to SEQ ID NO: 63124

SEQ ID NO: 63995 - protein, 540 aa, Escherichia coli P0304777.14; identical to SEQ ID NO: 63125

SEQ ID NO: 63996 - protein, 566 aa, Escherichia coli P0304777.15; identical to SEQ ID NO: 63124

SEQ ID NO: 63997 - protein, 540 aa, Escherichia coli P0304777.15; identical to SEQ ID NO: 63125

SEQ ID NO: 63998 - protein, 566 aa, Escherichia coli P0304777.3; identical to SEQ ID NO: 63124

SEQ ID NO: 63999 - protein, 540 aa, Escherichia coli P0304777.3; identical to SEQ ID NO: 63125

SEQ ID NO: 64000 - protein, 566 aa, Escherichia coli P0304777.4; identical to SEQ ID NO: 63124

SEQ ID NO: 64001 - protein, 540 aa, Escherichia coli P0304777.4; identical to SEQ ID NO: 63125

SEQ ID NO: 64002 - protein, 566 aa, Escherichia coli P0304777.7; identical to SEQ ID NO: 63124

SEQ ID NO: 64003 - protein, 540 aa, Escherichia coli P0304777.7; identical to SEQ ID NO: 63125

SEQ ID NO: 64004 - protein, 429 aa, Escherichia coli P0304777.9
LSLRYINSQRDLEKYIKIEKKHLLRLAQEVRSEKDTENDGAVFTELNKLLTEVNEKVKGISYVASATEELNEELRKLSYTHDRLTVQLDTGAIGIDQFIEKLELSANTNGKKLMLGGDGFNNQILLALWKAKSVREHDVESEVVIYCIEEPEAHLFPHQQRKLAAYLIDKLPGQAIVTSHSPQIAVNFKPDSIIKLYYDDGETLAASNGCSDCISSAWDGMGYRMSIIPAEAFFANVVFLVEGPSEVIFYTELAKALSIDLDYYNISILSVDGIQFEVYRKILTALNINWIVRTDNDASKVPHKNEWQYAGVNRALALCGENKEPNSSIPIDSKALHTKWGTISPIINPNGVYISFFDLEGDLANDFSKHVLDYASKDNLDDAADYLRGKKAIRMRELIKEKKAFLTELKSKDIARPLIHALKIARGEL

SEQ ID NO: 64005 - protein, 540 aa, Escherichia coli P0304777.9; identical to SEQ ID NO: 63125

SEQ ID NO: 64006 - protein, 659 aa, Escherichia coli P0299917.8; identical to SEQ ID NO: 63972

SEQ ID NO: 64007 - protein, 615 aa, Escherichia coli P0299917.8; identical to SEQ ID NO: 63973

SEQ ID NO: 64008 - protein, 781 aa, Mesorhizobium sp. STM 4661
MHIEFVEISNFRKLISTRVGLSKKTTVFVGANNSGKTSAITALRYFLVQREKNNFAFNDFTLTHWPTINTMGLAWEQALVAQKPLPDPDWGAVLPSVDIWLDVPETELHYVQPLLPTLEWVAGRLGVRVRYEPSDAKQLRMDYVSARGDVLALQKEAAALAGEAGAAVPAFEVKLWPENLVDFLQRRLTSYFTHRYYVLDPEAIADPVHGVAQPQQLNGNEPIEGDPFKGLIRIDEISAQRGFGNGEDGFEDDKAATASGSRKLSTQLRQYYAHHLDPYEKPDAKDLHALRAIEQAQQAFDGRLTDGFESPLKEMHTLGYPGVTDPRLNISTRLRPVEGLNHEAAVRFEIAVHDGEKHVNLHLPEESNGLGYQNLISMVFRLMAFRDSWMKVGKAKAKGGDETVIAPLHLVLIEEPEVHLHTQVQQVFIRQAYKILRNHDELGAKEPFRTQMVVSTHSSHVAHECEFDSLRYFRRLPGDATSIPTSCVLNLNDAFGGDPETKRFVTRYLKVTHCDLLFADAAIFIEGPAERILVPHFVNEHAEFTKLSESYITWLEIGGSHAHRMRSLVERIGLTTLIITDLDSCDADGKVAVPVRGQNYTSRNQTLRTWCPAATLLDELLDKPDADKILTYTDERFAICVAYQSPVQITFKGTAAEALAYTLEDSIVYANLPLLAGLDGTGLIAKFRTAITDSADSAALAVALKEHLKEGNKAEFALDLLEIENPIALAPPPYIRVGLLWLAKQLEHKQLELGIVKVIENPLPIENPLPAAGNEIAGVAA

SEQ ID NO: 64009 - protein, 633 aa, Mesorhizobium sp. STM 4661
MTELVQSNSNMSMDDHVDGTIADALRLDDPKSFFLFAGAGSGKTRTLVKALQHIREKFREKLRLRGRQVAVITYTNAACDEIIRRTEYDPLLVVRTIHSFAWQQIQGLNADIRTWLRDALRRQILELQEEEVKGRPGTKASISRLAQIESKGHRLDRLDQIKTFTYNPNGDNRERNALNHSEVIKIFSSFLQTKPLMQRLLVEKFPFLFIDESQDTHGALVDALLSVQQAHKERFSLGLIGDTMQRIYADGKDRIEDEIPAGWAVPAKKLNHRSPKRVVRLINQIRSSADVHTQEPRDDAIEGWARLFVFPTGTDNKPALEQKIREYMAEITSDLLWKRIDDCKILTLEHHMAARRMGFERMFEALASVDEFRTSFLDGTFGPARLFTHCVLPLVTAQKKRDKFAATRVLRELSPLLSKDSLKASQKPADQLAAAQTAINNLMGLWEAGEPSCGQVLESISATKLFDVPERLKAALAVRMTSMENVKAEDERADPPSEDMAALLEFLECPFSMIEPYAAYVAHEASYDTHQGVKGLEFDRVMVLMDDSEARGFMFGYEKLLGAKAPTPGDLKSQQEGKDNSIERTRRLFYVTCSRAKRSLALVAYTENPAAVRAHVLANRWFDVGEVLLALPD

SEQ ID NO: 64010 - protein, 696 aa, Lactobacillus brevis KB290
MFLKTVKLYDFRKFVSRVNGEPGLIVKFHPGLNIIVGENDSGKTAVIDAIKMLLGTVSDDRTSIQDEDFYFDGTEFSNDFKIEAVFCSLNKYEAGTFLEWLSFDDNNEYELHVKLTVERKTSEAGRQYLDRNLVAGDEGAESSLASGARVYLRVTYLKALRNATDELTPGFRSHLPQLLAAHSEFRNHPEHKLKLVQALEEANAIIEEYLSDGFPSESNPPKDNDHLSDNNLEKQSINKELHSVLRQLFDSQDQDKSDTRFQLTQVTLDQIFKQLSLSSESVNLGLGNLNLLYISTELALLKDHSSSVVYGPNIMLIEELEAHLHVQAQIRLIKYIERYILSTEDNSSQQFILTSHSVALTASIDQRSLIYMNANKAYSMAPEDTMLKEADYDFLNRFLDATKSNLFFAKGIILVEGYAENILLPALADLINLPLHRSGISIVNVGGTSFNQYIKLFSQKGKSEKIGIPISIITDSDINPTVYGIDSESAEKIQELISGPSDLSVGLFGEEYATFAKLVDAFKLRFENTKIKDLIIQVKKFRSDSDWASKTAERQECLNQKYEEFSANSKVFMSPLWTLEYSLLRSSLRHLTIQAIAETQFVREDNREKFIKKFEEDYKTSPNKAAYNAYAALNKGSVSKTQVSEQLAKLIMGLSQDEKEELKNKIIGDTTHSQNEECKYLINAIKFASGQEVEQD

SEQ ID NO: 64011 - protein, 595 aa, Lactobacillus brevis KB290
MNLMQIESILLHGAHFTAEQREVIQAIGRIDVVAGPGSGKTTVLAAKVLRLLTTRNYEDKGICCITHTNVAVKEILARLKLAGVDEIEYPNFVGTIQSFMDKFLGKTAFAAVLPGVTLKLLDDEKFYEKYDKNFRRIVQDYRSDWNVPKPSNNGCKLVILDDGSFYYTNRHQNQRCQYAINCACEWLLRDGYVSYSDLKSLSYWYLSKHRDELSVAFEERFSYLMIDEAQDTDWIQFAIINGLANGKQLNVQRFGDPYQALYTIYGSETEDSWNPRPDNEFYQTKEIAETTRFGSLIAAVVRHVCVQEYEQFHSNRELNFFPKYFMTYETGDELKEKHTRLIEEAASSNPDFRILQKPDAIVGIMHSDIIKVEPKYSKEGSKQRAHERSVSEIYALVIKLLANANGVSFMEESVLIRDNHDSNLELADIIQKLAKQNISLNEVQNHLYSLIDSETISEDYLQRECKHLLQDVSNLEGEPERMNLSTVHREFATIHGVKGETHRSTLLLLTSCVHMKFNEEDKINNFFKTIFPYLLGDRPDFSSDPEIEQLQRDCLKLTYVALSRPKYLLAVAIPSQDLADEKKTSLLTHGWVEAK

SEQ ID NO: 64012 - protein, 592 aa, Rhizobium freirei PRF 81
MRIARVQIENFRGIKQAEVHFSGTSVLLGDNNTGKSTVFEAIELAIGADRLARTQAIDEHDFYGGDYLPVEGALQKHIKVEVVIAALDEQHCTKFRNNLEFWRQADRSLLGAGQGVNLGQPGIEPAVRIRFEGAYDPENDDFTAKTWFAVPRHEDGTSINECRSSDKREFGFLHLRALRTGNRALSMERGSLLDIILKTYEVRTRMWEGLLRQLRDLDVVGANDPEFGRILTAIRDAMRDIVPGEWADAPHLRVSELTREDLRRVLKSFLATGVPGYAAPFQHQGSGTINALVLAMLGLIAERRNGRVIFAMEEPELSLPPHVQKRVVDKVRGIAAQALFTSHSPYVIEQFQPEQMMVMTRSAAGVLTGSNIELPQNLKLKTFRDGFRTRFCEALLARRVIVVEGKTELVAYSAVARRAAELAPAHYQRLDSLGWVPFDAGGQTAVASFATFFRSLGKTVATIFDQQADAERQAIVASCDSTFEQPYAGFEHLLAAEVSVAMQAWFVRFFVDVGEWPQALNNLVPPQGSPDETYRPAFVALFKHKKGDDYLTVFLEQCQVGHFPQTMLGIISALKNLAAPPPPPPAQPNIFE

SEQ ID NO: 64013 - protein, 568 aa, Rhizobium freirei PRF 81
MALVLCEHRQRLLRTDGNILVRGGAGSGKTTIALAKACADLDAARLGPLGKALFLSFARATVARVAEQATATLPRALMSRIEINTYHGFAWTILKSHGYLICAKQGVTLLLPAQARAHLAGLDGDARSARQRELFDTEGLIAFDLFPTLLTELFRAAPMLARAYARAYPLIIVDEFQDTNTEEWQMISQLGQHSRLIALGDPKQRIYDFKGAHPRRFDEFIAAFNPTPFDFASENNRSPGTAIAQFANDIIAGEYTAAAYAGVSVSRYRGRSLRPLKQEILRTVARLRRNPDWSLAVLVPANALAASVFHYMAEAAHGLPAYPVDILVAAEGPMLAADLIALLMEPRPSDQDHAAAILEGLAAFELGRSEEASATAIRKAGRYKDIARAVRARGFNGLGARGIGPGVRSLLANIEAIQLTGDPWSDWRAVRAQLDANDRDEFKALAKEARHLRLLTRGARIESKLAEAWRTHGSYNNARALLAAAVVEDQFAATTRPEQGVTVMTIHKAKGKEFDEVIVFEGLFSRYVQRPGADGERSARFNLHVAATRARRALTIMTPEIQPCQLLP

SEQ ID NO: 64014 - protein, 729 aa, Staphylococcus aureus M0221; identical to SEQ ID NO: 62500

SEQ ID NO: 64015 - protein, 597 aa, Staphylococcus aureus M0221; identical to SEQ ID NO: 62501

SEQ ID NO: 64016 - protein, 729 aa, Staphylococcus aureus M0312; identical to SEQ ID NO: 62500

SEQ ID NO: 64017 - protein, 597 aa, Staphylococcus aureus M0312; identical to SEQ ID NO: 62501

SEQ ID NO: 64018 - protein, 729 aa, Staphylococcus aureus M0340; identical to SEQ ID NO: 62500

SEQ ID NO: 64019 - protein, 597 aa, Staphylococcus aureus M0340; identical to SEQ ID NO: 62501

SEQ ID NO: 64020 - protein, 729 aa, Staphylococcus aureus M0424; identical to SEQ ID NO: 62500

SEQ ID NO: 64021 - protein, 597 aa, Staphylococcus aureus M0424; identical to SEQ ID NO: 62501

SEQ ID NO: 64022 - protein, 729 aa, Staphylococcus aureus M0468; identical to SEQ ID NO: 62500

SEQ ID NO: 64023 - protein, 597 aa, Staphylococcus aureus M0468; identical to SEQ ID NO: 62501

SEQ ID NO: 64024 - protein, 729 aa, Staphylococcus aureus M0633; identical to SEQ ID NO: 62500

SEQ ID NO: 64025 - protein, 597 aa, Staphylococcus aureus M0633; identical to SEQ ID NO: 62501

SEQ ID NO: 64026 - protein, 729 aa, Staphylococcus aureus M0831; identical to SEQ ID NO: 62500

SEQ ID NO: 64027 - protein, 597 aa, Staphylococcus aureus M0831; identical to SEQ ID NO: 62501

SEQ ID NO: 64028 - protein, 729 aa, Staphylococcus aureus M1007; identical to SEQ ID NO: 62500

SEQ ID NO: 64029 - protein, 597 aa, Staphylococcus aureus M1007; identical to SEQ ID NO: 62501

SEQ ID NO: 64030 - protein, 729 aa, Staphylococcus aureus M1064; identical to SEQ ID NO: 62500

SEQ ID NO: 64031 - protein, 597 aa, Staphylococcus aureus M1064; identical to SEQ ID NO: 62501

SEQ ID NO: 64032 - protein, 729 aa, Staphylococcus aureus M1223; identical to SEQ ID NO: 62500

SEQ ID NO: 64033 - protein, 597 aa, Staphylococcus aureus M1223; identical to SEQ ID NO: 62501

SEQ ID NO: 64034 - protein, 729 aa, Staphylococcus aureus M1462; identical to SEQ ID NO: 62500

SEQ ID NO: 64035 - protein, 597 aa, Staphylococcus aureus M1462; identical to SEQ ID NO: 62501

SEQ ID NO: 64036 - protein, 273 aa, Marinobacter nanhaiticus D15-8W
MPYSEVINLADVFGDDFKTLAFAERYFHVQHTDLLFADAAIFVEGTAERMLVPFFIDGEFEELSRRYLSFLDIGGSHAHRLKPLVERLGIPTVIITDIDPVEVTKSKANRTVRKATVIRSPKNLECGNDTLTKWHPRKICLDDFGALSGEDLTWVSENGTRVRFAWQLPIFSNGPWPSSFEDSFILSNLDWFKRQMDETGPLGKACEVARECEGPNELNEALHEMLHGSFKKGDFASTIFEKLSIGEPLTCPSYISDALGWLQRELDPKKGGG

SEQ ID NO: 64037 - protein, 456 aa, Marinobacter nanhaiticus D15-8W
MLADKHPIILIDESQDTMKRVLGALMELNRDDSAAIALGLIGDHRQRIYLDGHKDLPSLVPGGWATPSLQMNHRSQQRIVSLVNNIWQADIMGRTQPKTGILQKARSEKSEGTVRIYVCDTNINAEDKIRMERSCAKDMSSASGDSCWLDHQHGYQLLALEHKLAARRGDFLDAYNALSLIDKEATRPQGNIENTGPAAVQILLRELPALAACKNSQGEIDDFAIIELLNRYNRLENLAKADRDFLNKLKEFHEAAKEIIEVSSNPDSTVKEILAPVIRSHLFEVDDRLRHAFRDNEDIPTTASPKESKEERRQRGWRALFDVRWAELSRYHNYLHGKSNLATHQVVKGSEFPNVMIIMDDLEAGGNLFAYDRLFGAVKLSKSDLENIENEEETSIDRTLRLLYVTCSRAQESLALVLWSSDTKAAIKRIKDSGWFSEEEIKEVPTPWLPRPVGTY

SEQ ID NO: 64038 - protein, 566 aa, Erwinia amylovora Ea644
MEISSLKLKGFRNFKDAYIKFNSNTLIIGANDVGKSNMLHSLRMLLDKSVSESEIEPNELDFHLEKGKSCEEFEIIIHFKDINEDAVLSILKGNVSDSGESFIKYVAQKSDLSYKLFIGDSLESLQEINSRYYLKFVNLKYIQSQRDLERFIRKEKRQLLKIAQQSLNSDEREEDDDLLGEISSGLQSINDKISQLIYVERATKEVNDELKKLAHHYSEYSVRLDTGAIGINDFIDNLQLGANTNGSNVMLGGDGRNNQILLALWKAKSIKEHDIDNEVIFYVIEEPEAHLHPHQQRKLADYLIAELPGQTIISSHSPQIAVNFEPDSIIRLLDREGHTVAASEGCSKGISDGWEDMSYRMSILPAESFFSNGVFLIEGPSEILFYHSLAKSLNIDLDYLNISLISVNGISFKIYASILDALEIPWVMRTDNDISKLKGQEKWNFAGINRCLDIVGIEKFEHSDKKITSLDTLTNGDWQTVSEEINKSGVYLSKIDLETDLVEELSASILDALDKKDNQSAIEYLQKKKAIRMRILLRKIKKDLHNLNSGDLAKPLDHLVKIVKGE

SEQ ID NO: 64039 - protein, 395 aa, Erwinia amylovora Ea644
MSFFSPTTQQILAIDYPKSMVITACPGSGKTTVIKEKIRNITGCLPEHKGVIAITFTRKASSELERRCKAEGHDTKHSFFGTIDSFCLKEIIIPFLPRIWGGKPTECKVLKRLESPYKHYLKEEFIGTPSVVNINEDSGYKKLYDEGMLWMSSFTALALKILNESPAATRYIKARYSHIFIDEYQDSSLSQHQLFLKINELGLCSIAVGDICQSIYEFRGGNAELLLDLVRDKQVFAHFEINLNHRCHPSVINYASRLLDSNFVLLPSESINVYRKRLSGNLKDVSMTISSWISKWLNEGKWGLEQANQIAIFAKKEQSLLLLCSGLTSNFRVYIDTPLDKLGTECSDLYNDLLAYRYKAISTAQELINKVFDGLIINDNHQFLLRKKLKPSGVN

SEQ ID NO: 64040 - protein, 210 aa, Erwinia amylovora MR1
MSYRMSILPAESFFSNGVFLIEGPSEILFYHSLAKSLNIDLDYLNISLISVDGISFKIYASILDALEIPWVMRTDNDISKLKGQEKWNFAGINRCLDIVGIEKFEHSDKKITSLDTLTNGDWQTVSEEINKSGVYLSKIDLETDLVEELSASILDALDKKDNQSAIEYLQKKKAIRMRILLRKIKKDLHNLNSGDLAKPLDHLVKIVKGE

SEQ ID NO: 64041 - protein, 376 aa, Erwinia amylovora MR1
MVITACPGSGKTTVIKEKIRNITGCLPEHKGVIAITFTSKASSELERRCKAEGHDTKHSFFGTIDSFCLKEIIIPFLPRIWGGKPTECKVLKRLESPYKHYLKEEFIGTPSVVNINEDSGYKKLYDEGMLWMSSFTALALKILNESPAATRYIKARYSHIFIDEYQDSSLSQHQLFLKINELGLCSIAVGDICQSIYEFRGGNAELLLDLVRDKQVFAHFEINLNHRCHPSVINYASRLLDSNFVLLPSESINVYRKRLSGNLKDVSMTISSWISKWLNEGKWGLEQANQIAIFAKKEQSLLLLCSGLTSNFRVYIDTPLDKLGTECSDLYNDLLAYRYKAISTAQELINKVFDGLIINDNHQFLLRKKLKPSGVN

SEQ ID NO: 64042 - protein, 702 aa, Acinetobacter sp. NIPH 809
MLIEKIKVEGFRLLESVEFGLEENSTVIVGRNNSGKTSFTSIFDCFCGESGARFRLEDFSVLSREKFLKAKELREEGGSPEKILEALPRISLTLTFRYNKFSPDLGSLSPFVIDLDEDSTTAIVRIEYRPILKNMHLLFDLTLSSATVEPRTHFYKNLKSNLSKAYGVHVSAIDPTDSTNIRDFEGTSALTALLQCNFVLAQRNLDKTKLGDADVIGKLLSELFKTATAPSAAEADQDLAIRLKQSVESIEHNVQLDFDGMLKELLPVMNVMGFPSLNDTEIRPETSLNVESLLSGHTKVVYSGVDGVHLPEGYNGLGTRNLIYMLLQLASYHKIYRSKSIRPATHLIFIEEPEAHLHPQMQEVFINQLNVAVQKLSDSYSNEDKWNIQFIITTHSPHVANAATFDAVRYFYNERDKVENIRHTKVKDFKKGLSSVSDTDQKFLHQYMTLTKCDLYFADKAILVEGTTERLLMPRLCQLVDETLDESQKLARQYVTCVEVGGAYAHIFYPLLDFLELKTLVITDLDSTKKEMITKNGKQVEAWVKCPVADGENISNAAIKNWFYPKDVDDTGKVKKKAESDDSQISPSVLIAKTAEEKQVKFRRIAYQIPEDPESNICGRSYEDAFILANLSKFKLPIEQDIAIAAWEKAKGLKKADFALEYAIQIKDWLAPRYIKEGLIWLSEMDTIENSNFELITGEKVA

SEQ ID NO: 64043 - protein, 579 aa, Acinetobacter sp. NIPH 809
MSEILNNPAIIAAQVAEAKINAAIKEGRSFRLEAGAGAGKTFSLVHALKSIIKERGTSLMQAGKKVACITYTEVARNEIAQEIEDHPAILVDTIHGFSWAFMRQFQKAIREILIEDHLRKEKVEQGGGIGSKSVEYELGFFGVNDQKITLSHDDIPMMMAKLLSKEKFRQIFSNQFPVVFIDEYQDTNRQFMEAITEYFLKPKVGPLFGLFGDHWQTIYGNEYGLAEYPIEEIAKGSNFRSVPAIVNILNNLRPDLPQAVSLPDAKGEARFFHTNSYRGTRTNERHSKEDLPINIARSTRASLIQRLKNEGWDIEKTKILMLSHNVLASEQGYPQLIKVFEGRNDQFAKKEDPVIKFFAEIVEPMSANYGLSNYGEMFKIFGSKPAITKHEDKSCWRRDMDQLLKLRQEGTIGQVIDHLKHTKRPSPPDRVLRRDDELISFRNSPDTEMSSKLLRYNKLREIPYKEVIEVTKFIEKQTPFATQHSVKGAEFENVLVILGGGWNNYKWPQLFELLETKKLTTANFDGFHRARNLFYVSISRPMTRLAVLATQTLSDTALVTVNNLFGSENIEDLCFDKLK

SEQ ID NO: 64044 - protein, 350 aa, Acinetobacter sp. CIP-A165
MLTGKNTLLKNVFDFFMDYDIKSDSIKSEENKTTEIKARKNNFLSDIEPVINSIQERMELGKEQILSYADGTGASFNKAKPNFEGNISDIEMFSFLRLIIEYETGIKIPATHNGLGYNNLIFMSLLLAKMQVNSDGKYMGDNAKVFSVLVIEEPEAHLHPAMQYKFLQFLKKNKKEGKVRQIFVTSHSTHITSAVSLSEIICLYKEADETKISYPDTIFPLDGKSKRYVQRFLDATKSDILFAQKILFVEGIAEQLLMSIFARYIGKSLEDHHVAVVNVGGRYFTHFLHLFDSNKPKTISKKIACITDIDPERKMKPTDPTDPTDPTDPTDPTDPTDPTDPTDPTDPTDP

SEQ ID NO: 64045 - protein, 566 aa, Acinetobacter sp. CIP-A165
MSIIQIDSNKRLDDIEHHFKVSAGPGAGKTHWLVEHIRNVLHHSNRLGKVRKIACITYTNIAVETILNRLGTSATQVDVSTIHSFLYRHILKPYAFLIADEYGLDYSKLDGHDELNHSHSKISNWLKSTSQQSLLKGKANILKALDTIQWQMTDSGELFLGLPINKTYLGKVTNISIKKNSYIEYRKEHWKLGNIHHDDVLFFSYQLIEKYPFILEVVRAKFPYFFIDEFQDCNPIQLSIIEKIAETETIVGCIGDPAQSIYKFQGAELGLFLSFSLNGMSHYQILKNNRSTIKIIKVLNFIRSDLTQEPVREVDGENPCLIVGSTKNSIQEVRKLCVDEDFYTLSRDNITAKALQNELDNTFNIDNLFESLSEIDSDRDRKQAVCSSIKAIELVREKKFKDAFKELEKIFPRSHYNISISIEYISTLIGEYDSYKNENLINFIEIIQKLFHSRLTKVSRGKVKEFYENTLYNQLSVCINIPDDMSLNKTIHKSKGDEFNNVLLVLKSEQELDFILSPQLADPKAEEHRILYVAISRAKNRLFISVPSLKVKNEPKFSEQFEIVRC

SEQ ID NO: 64046 - protein, 607 aa, Acinetobacter sp. CIP-A165
MSIQIDVVRICGFRGIANIEITLPRVAVLLGQNNAGKTSVIKALQLALGDYSRYLTDEDFHIGDDEKRQELITVDVRFIATNESGRVNEFPTAWQNEFGDKIQAEADGKQYVAIRTRVKPDKVKGGYTVERFHLEVWAAISGWQDVPVNTKNRLTKRLEATPFISIDAQRDIHNELKEKTSFIGRVLSSVEYKEDDVAELERMVAKVNQEAIMKSDHLNSLKTHLDKLNQSFAGSGQTELTPFPKKIRDLSKRFSVHFGESDKDSFSMEYHGMGTRSWASMLTVKAFTELMVKKHEDEVEPFFPILAAEEPEAHLHPNAQRTLYKQLIDTTGQVIISTHSPYIAGLAELHEIRSLRKTGNSVEVYQLRDNFEDDDLRKLKREVVHSRGELLFSKAIVLSEGETEEQALPELFEAYTGQHPFALGINFVGVNGSGAKYRPFFILAKDLNIPLFVFSDGEVETIKALKKNYEKIFGDTDVENTSNIFILTGTDFEGYLFSQGFNDLIEQTIREVDGEGKIDEWIQKKNGELLKRIKTNKPPCTTCNQPIFEDVLRDFSGKDGVNQAILEIIDKKKPQYAKAITGNLIKLPKESFPQKIIDLFKEIESGV

SEQ ID NO: 64047 - protein, 634 aa, Acinetobacter sp. CIP-A165
MNLSQAQRQIVEAPIGGAIQVLASAGSGKTRVLTERIRYILETTKKEGVIALTFTNKAAEEMNTRLAHSEHIQDRAWIATTHSVAQRILEKYGHTIGLPTDLHIYDRDRDRMEVFLQSLRDDGIEVDKYLDISDSNELKNREKKLQTYMDIFSKIKRELLTESGISSIYPNNNIWKKFQDYQQSLLNSGGIDYDDILIYAHKILLTHEWIAKIYRSKYKHICVDEAQDLNKTQYEFIKVLCGDVIKSVLMVGDPNQMIYGFNGSSDRYLNEEFIHDFYPQQFELKENYRSTKAVIGAANKLRPNSQTEVEYALDGNVQIKDFDTEEAEANAVVDEIRKLLDLKSHAEIEGEISLNKMVVIARNRFVFHKLEAILKDKGIPYSLRKGERQLEPSTTFGKVLDCAIRIKLNPKDWVNGKKLCQVLGIVEPEKWDVDVLSNMAVQVDETIEGESSALLAKLLLTIDGLDVENPNIPKFIKELDIALKSSVENQQSALSDEIEEVRLSLEELNEFSCAWTKFKRKGLGDSLTAFRNALALGQLSDHDIDGGLTLSTVHTMKGLEKDIVFLIGMCEGVFPDYRAKTAKELEEEKNNAFVAVTRARRWLYMSYPKQRMMPWGDIKFQAESCFIRLLRAGK

SEQ ID NO: 64048 - protein, 568 aa, Acinetobacter sp. CIP-A165
MIYLKIKTVHLVGFRNFNDAIINFNDDTLIIGANDVGKSNMLHGLRLLLDKSLSEADLEPSELDFHICKRKACDEFSITISFNDVKEDAVLSVLKGYVSDDGCTYLRYEANRADLNYRIFVGHSLIDLEEINSRFYLKYLNLKYIQSQRDLQRFIQREKRQLLKLSQQSLTADQKDEDNNLLAEISGNLNDLNEKISQLYYVEHATKEVNAELKKLAHSNSNYSIQLDTGAIQVSDFIDALQLGASTHGSSILLGGDGRNNQILLALWKAKSIAEHDINHEVVFYVIEEPEAHLHPHQQRKLARYLIDELPGQAIITSHSAQIASHFLPDSIVRLFIKDESTIAASQGCSKCIEAGWEEMGYRISILPAEAFFSNGVFLVEGPSEMLFYSALAKEIEIDLDYLNISLLSVDGVAFKVYIQILNALEIPWVMRTDNDISKVAGKEQWQYAGINRCLAAINENSWEHSETEILHTQIFFDDRWQEFCKITRKKGVFISKVDLETDLVSNLTEEVLDGLGSDNPESAIAYLQQKKAIRMRTLLGKIKSRLHTLKGTDISIPLEHLRDSIIK

SEQ ID NO: 64049 - protein, 504 aa, Acinetobacter sp. CIP-A165
MKVRNLTPQQESAITYSSNMVITACPGSGKTTVVEEKVRNILPTIKAHQGIVAITFTRKASQELRRRCKRNNYDTKQSFFGTIDKFCLEELIYPFLSHLWGKSARECEVVEKLDKEYSELFLHKQIPKIFDIQADDGFKKLYDKGVLWMSSFAGLANFILEGSKSATRYLQAKYTHIFIDEYQDSSKEQHKLFLKLVDLGLIGTAVGDADQSIYEFRGSSVQYLNSLITDKEKFKFFRIDINHRCHQSISNYASRVKDPLAPIFPVPDTECRVHRFTLEGNHKQAAKSISKIITHILNHTEGLNSSNIAILAKSNKTLREVSEGLLVDYRLYVDLDLEKIKTPIARILYDLLAFYFGKISTMQEVLDNNSIKNYVSEKESLLSLKQKIKKLKELEENQLIQAFEEIITQMRLSNFSQEFEVVTRILADETLKKLFKPISPSEIQVMTLHKSKGLEFHTVIHVGLEEWVFPYRKVTSDWSPFYPELEQDTNLHYVGITRAQELCI

SEQ ID NO: 64050 - protein, 601 aa, Acinetobacter parvus DSM 16617 = CIP 108168
MYLSNIKLWNFRKYGEVATTFDLTKPNLDLNFTKGLNVLIGENDSGKTAIIDAIKLVLKTHSYDYIKVEDKDFFDGSTRFRIELEFCGLTDDEAKNFTEWLGWKGTGADTQTFLKLNYDVTRNKNKINPSDVKAGADSEGYLLTAEAKEYLKTTYLRPLRDAENELISKRNSRLSQILLGDPTFKNKDQNHELVHMFEGLNTNLKKYFKGEEISFIDKDGKKTTETYEDGKIIKEKIDGYIKKFYNDEIFTEFNVSSTELKSILEKFSLFLESQRNVGLGTLNRLFMAAELLHLNKEDWHGLRLGLIEELEAHLHPQAQMQVIEALQQQKQIQLILSTHSPNLASKVKLENLILCNKGNAFPLGKEYTMLKPDSYKYLEKFLDTTKSNLFFAKGVILVEGWAEEILIPSFAKAIEIDLTAKGISVVNIGGVGFQHFVDIFLRKQEPHMTIPVAVITDSDVRTYEKVGEDYNPKSSKVLGSEIANKLKEINEKSNQNVKYYAAEQWTLEYSIFKSKKLTSSFQIHAKAIHTKTSWDSNFELELAKKLINQGLKKTEIAYRLAHDLDVEMKKEKPVRTINLHETDSTDSIYYLIEAIRYVTNS

SEQ ID NO: 64051 - protein, 665 aa, Acinetobacter parvus DSM 16617 = CIP 108168
MSQTVEITDEDIRYAENILLPQGKTFDDERRKFICNLSTIDLQAVPGSGKTTALLAKLLILETKLPLSDGSGILVLSHTNAAVDEIKERIHQYCPKLFRYPHFIGTIQSFVNEFLAIPYYLFKLKKKPLRIDNEIYAEQIEFALSYNTKIALSKRSINYIDILSNSFISNKQILQHFWSNDEVTIPKIGSHTNTYKELATIKINLLKTGILSFGDCYALAQKYLSNYPIIHKIINKRFQYVFIDEMQDMDTHQYELIEKIFTENNDTNTIIQRIGDKNQSIYNSIKAESIWQDRGNVLHLSNSQRLSRPIANIVKNFALYPEHCTDIQGMNECQLKPHILLFSDSSIKNVIPYFSQLVQQYKGSGELNCLQDKPLEIKVISWNTNWKDDEDSRSNLTKLRLEDYHQAFKKNEQKPKEDYKCLKSYIHFYDKKHTTLSMIRKNIFHALLKVLRIENISTNENRLYTISNLINHLKVNSELNYSDLNLKVYQCCLKVVRNEKNQALSDLQTYIPVFISYFKENHRLSPKCSDFINNDKTGLDQSSQNHSSVSNMIEENNLKIEIASVHSVKGQTHDATLYLESFFNQGYGNYESERLRNQFLGIQTIPQTLGTQKTSHDKIIQSTKMAYVGFSRATQLLCIAIHKARFEQHLKTIDRDIWEIKDISS

SEQ ID NO: 64052 - protein, 576 aa, Acinetobacter johnsonii CIP 64.6
MFKSLILKNFRNFEQINIELKDKNIILGMNDVGKSNLLHALRLVFDKKIRLEEIHSTDFHNKNDRNPIEIIVGLDISQPEKEDVQKLKARAHEAVTQEESEVFYIKLIIENRKEEGILKQFFWGDELSALKEIKGKGVNYLILDDVFSVIYIPSHVETLKVFSDIKKEVLKDIVLTEDDSILKVEIKDNFENINENIQKLTSVSRIEEEINQNLKIFDETYKVKITSQSIVDDLYKQLRIYTIENDHDHLYPASGDGRQKKIMYAMLHYFLEKEAIKKIPILILEEPENHLFLSAQIDLSRTLFDDLNIKYIFCSSHSSELLYHIDIDCNLVRLYRQKNMPLRKTISSSAQISSEYHNLKKMYAEGLSKGYFADCVLLVEGYSEKLLCDSILSCVLSKNQFQKLYVLPVLGTNFKPYRDLLKKLGIKIIVRTDNDIYKNDIYGLKRCLKIVNKNLTEIIPEELKGRKDEGEIILNKKKKDLHKHFQPLIENLKLEHDIFLAEIDLENDIVNALLDEGISDCSLNGEVVDLEELKSELQYKKWHNMFLFLEENEELFEIIFKNSRFDFLKEVKACLV

SEQ ID NO: 64053 - protein, 444 aa, Acinetobacter johnsonii CIP 64.6
MPSLDFTLEQQRILDCTSENIIVSACAGSGKSSTLVEKAKREILLSRPWKKLAVLTFTNKSKDDLISKVNHPSIIITTFHSFIFENLFPFDPQVSDQLKEMFRVEVDNYTKWLDILYNKKTIVGSKGKSDFVLEHAIKLCNKKNVQHFFKSKFHAIYIDEAQDNNIQQYQLIEFFIRLGIKILMVGDANQTLYGFRGACSNTFTRYVHDNRFSSYDLKQNFRCHHIINRIANSYSFPDEHVYEENMGYFVININMLNQVVEKLVDESIVFLKKTNYELSDHDGKFSILKDISFSPDLDVMVKKIVICLLKIKFKENYFMYNFLDELQIDIEKFKKNEIDFFRNCVEKYIYENGNSLDGALSLIGFAELNNQICETYSSLSQLEETKNFFQNTNKHVTMTIHSSKGLEFDNVILKKDDLYHNGVLQKNNFYVSMTRARSRVLVIL

SEQ ID NO: 64054 - protein, 565 aa, Acinetobacter nosocomialis NIPH 2119
MKISSVSLKGFRNFKDSTIKFNGDTLIIGANDVGKSNLLHALRILLDKTLSDSDIEPTELDFYISPCEAMNILEITICFEDIQEDAVLSILKGNVSSEAKTFLRYQAVKNNLSYQILIGPSLENLELINSRFYLKYVNLKYIQSQRDLQRFIQKEKRKLLKLSQSNLTESQREEDTDLLNEIGFDLKEINEKITQLYYVDHATKEVNEELKKLAYHHSEYSVQLDSGAIQVSDFIDNLQLGANVHGSNILLGGDGRNNQILLALWKAKSIAEHDIDHEVVFYAVEEPEAHLHPHQQRKLANYLIEELPGQAIISSHSPQIASHFLPDSIIRLLVKNYSTVAASGGCSNCISEYWDDMGYRISIIPAESFFSNGVFLVEGPSEVLLYTALAKALEIDLDYYNISILSVDGIAFEVYTNILNALEIPWVMRTDNDVSKVPRKSEWQYAGVNRCLRAIGLAEWPNSTTDINHIDVTNDKRWNSFYASIRDKGVFISNVDLETDLINSLEATILPILDKENKQDAIKFMQQKKAIRMSYLLKQIKGKLIDLENNELAEPLKYLKSLITG

SEQ ID NO: 64055 - protein, 543 aa, Acinetobacter nosocomialis NIPH 2119
MKTLNLTQEQIEAIEYSSNLVILACPGSGKTTVMKEKIRKSIPTLLSHQGVIAMTFTKKASAELKKRCKSNGFITKQSFFGTIDSFCLEEVIYPFLSHLWSGYPNKCKIITELTGLQKNFFKQPYIAPTLKNIINDEIGFLTLYKHNFLWIDSLAGLALYILENCTAAVRYIKAKYKSIFIDEYQDSSRAQHELFMKFIEIGLIGTAVGDIDQSIYQFRGSDPKCIEELKANPLFKFLSISQNHRSHVSIVNYASRLLNPSYPIKPCKEIRIFRGLFTGNPTQAAKKISELIKRITSSHESVNYSDIAILAYRTSSLNYIARGLELDYRLYTDTPLEKIETPEAALIRDILAFRFGKITTMQEIFDLHFAYSNLSKGNLLKIRKILLELKNLELSQVRNKSIEILALSGVESDCHSELEALTSTLGSENYIKNFMPILTNEVQLMTLHKSKGLEFHTVFHIDLDDWSFPYREYTGSWDDPPLYPQYKQDLNLHYVGITRAKEYCLLVQTTKRFNKQGVEKNTQPSNFLTLPHLETLYKDFLSS

SEQ ID NO: 64056 - protein, 402 aa, Acinetobacter baumannii NIPH 615
MNFQQIVENLRLIFFPKITTAEADQFRDLCQNSLGYNNLLYIASILAELTLTKGESLYRLLLIEEPEAHLHPQLQVRLLDHLEAVANDHNVQVIVTTHSTVLASSVKLDKIIHLTKNEKPQATALAECGLAPNNLDFLNRWLDITKSNLLFASGVILVEGIAEQMLIPELAKIVLKDKEINNIEDYGVSVINLNGIYFNHFMRLYCNIKGVPDVQEDQEGLNIPIRCAGITDLDPEQHYYKEEIVKEEKKQVKYNHKPPSEKNEIVGKNHALKLVKSINSSEHARLFVAGYKTLEYDLAMEECNAKVMAQILFDLWPSKTGEVKKGLQKIVNDDYLKITPEQKADHAIEILKRVDDDNIGKGYFAQVLADKISSGIVKLKVPQYIEDAILWACSLENSSVEE

SEQ ID NO: 64057 - protein, 587 aa, Acinetobacter baumannii NIPH 615
MKYTNEQLSYIKQAKITENVFLNACPGSGKTETIAQRVANEIESWGNFPSGIAVLSFTKSAAKEIEHRIKEKIKGQSTYPHFIGTFDSFILKNIVNPLSKDISKYQGDNGDYSFKVVNYNSQLFYLTEYSHGYQKISGHQVEIDSRTGSFKFHLPNQDANRALNAMVLEQWRKDDIYRAKKKCRDAGFLTHKDIEYLAESALTTRTITKDYAKKLATRFQLIIVDECQDLSFEQLNILKAMMLNGTKLHFVGDLNQAIYEFRDVNPNDIKQFISDNSFREVRLTKNFRSCQKIVNISTNIMKSGSIEADFTSPEQSCFVLQYKDSPSEVISRFNELTKQYSNRVLVARGHQTLNQLSAVESTPKLPAEFLLSSILNFDETSYHSIDQSLIEFSEYIKNKIQLETKSSDYNCPQNVESELDWKLFLYNSIQYLLKNDLKLDSCSWTNWCKKVNAVIINLYKQEFAPPEIYEVLEKSNFKIKSPSGKASNCISNYYRKKDSLDIKFRKSTIHGVKGETHEVTMLISNPTRKGDGTHWSHWIGDKTSEAARFAYVASSRPKYVLVWCVKKLKPLEKTELESLGFEILDIK

SEQ ID NO: 64058 - protein, 601 aa, Acinetobacter sp. CIP 102529; identical to SEQ ID NO: 64050

SEQ ID NO: 64059 - protein, 665 aa, Acinetobacter sp. CIP 102529; identical to SEQ ID NO: 64051

SEQ ID NO: 64060 - protein, 642 aa, Acinetobacter sp. NIPH 758
MYIKKLSIEGYRCFSEIFEINFRKGLNVIVGENGAGKTTIINSFRQLFIDTESGSYNVSSDDFNKPFKEKSMVVDSFKIKVEFDNLEGPEPIAFLQWSDAKNNVILNLEVLNKELRGRFKKSFWGGNSKSSQFDIELFDKIHCIYLPPLRDAESKLVNGRQSRLSKLLKFIEANQLKICKRDEKKHPLEEKFKEFNQSLIDEKDSSIKKANELIAEHLLKAVGQNFSQSTHIQFVENEFSKIVENLRLIFFPKITTAEADQFRDLCQNSLGYNNLLYIASILAELTLTKGESLYRLLLIEEPEAHLHPQLQVRLLDHLEAVANDHNVQVIVTTHSTVLASSVKLDKIIHLTKNEKPQATALAECGLAPNNFDFLNRWLDITKSNLLFASGVILVEGIAEQMLIPELAKVVLKDKEIDNIEDYGVSVINLNGIYFNHFMRLYCNIKGVPEVQDDQMGLNIPIRCAGITDLDPDQFYYEEETSEDTESKNKPVKKIKIDHKPHEKNMLEGKNHALKLVESINSSEFARLFVARFKTLEYDLAMEESNAKELAQILFEIWPGEGPVKKGLQEIVDFDYSTITPEKKADHAFEILKRVDDDKVGKGYFAQVLADRISSGSVKLKVPQYIEDAILWVCPLDDSLAAE

SEQ ID NO: 64061 - protein, 589 aa, Acinetobacter sp. NIPH 758
MKYTNEQISYIKDAKITENIFLNACPGSGKTETIAQRVANEIESWSNFPSGIAVLSFTKSAAKEIEHRIKKKIKGQSTYPHFIGTFDSFILKNIVNPLAKDISKYEGDKGDYSFKVVNYNSQLFFLTNRKYGYSFQKISGHHVEIDGRTGDFKFHTPDQKLNRALNNITFDQSQKKDIFDAKKRCRDAGFLTHKDIEYLAESILNERANTQEYAKKIAKRFPLVIVDECQDLSFEQLNILRAIMLNGAKLHFIGDLNQSIYEFRGVDPDNIIEFISENNFQEIRLTKNFRSCQKIVNIATNIMKSDPIVANFESLNPSCFVLQYDNSPSEVIHRFDELTKEYTNRVIVARGHQTLKQLFIVDSTPKLAAEFLLSSILNFDEASYTSINQSLIEFSEFIKNKVQLETKSSDYNCPQVIESELDWRLFLYNSIQYLLNNDLKLDSCTWTDWSKKVNAVIINLHKQEFVLPEIYEALEKSNFRIKSPSNKASVCISNFRREDTVSNISFRKSTIHGVKGETHEATMLISNPTRNGDGTHWSHWIRDKTSEAARFAYVASSRPKHILVWGVKKLKSSEKTELKSLGFEILDIK

SEQ ID NO: 64062 - protein, 564 aa, Acinetobacter sp. CIP 102082
MLIGENDSGKTAIIDAIKLVLKTHSYDYIKVEDKDFFDGSTRFRIELEFCGLTDDEAKNFTEWLGWKGTGADTQTFLKLNYDVTRNKNKINPSDVKAGADSEGYLLTAEAKEYLKTTYLRPLRDAENELISKRNSRLSQILLGDPTFKNKDQNHELVHMFEGLNTNLKKYFKGEEISFIDKDGKKTTETYEDGKIIKEKIDGYIKKFYNDEIFTEFNVSSTELKSILEKFSLFLESQRNVGLGTLNRLFMAAELLHLNKEDWHGLRLGLIEELEAHLHPQAQMQVIEALQQQKQIQLILSTHSPNLASKVKLENLILCNKGNAFPLGKEYTMLKPDSYKYLEKFLDTTKSNLFFAKGVILVEGWAEEILIPSFAKAIEIDLTAKGISVVNIGGVGFQHFVDIFLRKQEPHMTIPVAVITDSDVRTYEKVGEDYNPKSSKVLGSEIANKLKEINEKSNQNVKYYAAEQWTLEYSIFKSKKLTSSFQIHAKAIHTKTSWDSNFELELAKKLINQGLKKTEIAYRLAHDLDVEMKKEKPVRTINLHETDSTDSIYYLIEAIRYVTNS

SEQ ID NO: 64063 - protein, 665 aa, Acinetobacter sp. CIP 102082; identical to SEQ ID NO: 64051

SEQ ID NO: 64064 - protein, 699 aa, Acinetobacter bereziniae NIPH 3
MRIEKIKVEGFRLLENVEFGLEENSTVIVGRNNSGKTSFTSIFDCFCGESGTRFRLEDFSVLSREKFLKAKELREAGESSEVIFEALPRISLTLTFQYNKLSPDLGSLSPFVIDLDEDSTTAIARVEYRPILKNMHLLFDLTPSSAVVEPRTHFYKNLKGNLSKAYGVHVSAVDPTDITNTRDFEGTSALTALLQCNFVLAQRNLDKTKLGDADVIGKLLSELFKTATAPSAAEADQNLAIRLKQSVENIEHNVQLDFDGMLKELLPVMNVMGFPSLNDTEIRPETSLNVESLLSGHTKVVYSGVDGVHLPEGYNGLGTRNLIYMLLQLASYHKIYRSKSISPATHLIFIEEPEAHLHPQMQEVFINQLNVAVQKLSENYSNKDKWNIQFVITTHSPHVANAAKFDAVRYFYNEIHKIENVRQTKVKDFKKGLSSISVKDQKFLHQYMTLTKCDLYFADKAILVEGTTERLLMPKLCQLVDESLDEPQKLARQYVTCVEVGGAHAHIFYPLLDFLELKTLVITDLDSTKKGKITKNGKQEDAWVKCPVVDGQNTSNAAIKNWFYPKEVDDTGKVKKKAKNEDSQISPSVLIAKTAQEKQIKFRRIAYQIPEDPETNICARSYEDAFILANLSKFELPEGQDIAVAAWEKAQGLIKSDFALEYAILIEDWSAPRYIKEGLIWLSEMDTIKKSNYELTTGE

SEQ ID NO: 64065 - protein, 577 aa, Acinetobacter bereziniae NIPH 3
MSEILDNPAIIAAQLAEAKINAAIKAGRSFRLEAGAGAGKTFSLVHALKSIIKERGRSLTQTGKKVACITYTEVARNEIAQEIEDHPAILVDTIHGFSWAFMRQFQKAIREILIEDDSRKEKVEQGGGIGSKSVEYELGFFGVNDQKITLSHDDIPTMMAKLLNKEKFRKIFSNQFPVVFIDEYQDTNRQFMDAITEYFLKPKVGPLFGLFGDHWQTIYGSEYELAEYPIEEIAKGSNFRSVPAIVDILNNLRPDLPQAVSSPDAKGEARFFHTNSYKGTRTDERSSKDDLPIDIARSTRTSLIQRLQNEGWDIEKTKILMLSHNVLASEQGYPQLIKVFDGRNDQFAKKEDPVIKFFAEIVEPMSVSYSLSNYGEMFKIFGSRPAITKHEDKSCWRRDMDQLLKLRQEGTIGQVIDHLKQTKRPSPPDRVLRRDDELISLRNSPDTEMSSTLLRYNKLREIPYKEVIEVTKFIEKQTPFATQHSVKGAEFENVLVVLGGGWNNYKWPQLLELLETKKLTNANTKGFYRARNLFYVSISRPMTRLAVLATQTLSDTALVTVNNLFGSENVIELSLDT

SEQ ID NO: 64066 - protein, 535 aa, Acinetobacter gerneri DSM 14967 = CIP 107464
MFISAIKIENFRNFKHQEINFNEGVNVIIGHNNAGKTNLLTALSLVVNPDKNKRLDVDDFNKNVPFSELKTSPPKISIQVTLKKGCDSLPDDLAMVANWLTKLESDFEAKLTYEFFLPEKEVPKYISAMSEIDGTQENCRNTAWKTIKNEFIRLYSYKIYGGEIANRAIADGESLSKFDFQFLDAIRDVERDMLTGKNTLLKNVFDFFMDYDIKSDSIKSEENKITEIKTRKNNFLSDIEPVINSIQKRMELGKEQILSYADGTGASFNKAKPNFEGNISDIEMFSFLRLIIEYETGIKIPATHNGLGYNNLIFISLLLAKMQVNSDGKYMGDNAKVFSALVIEEPEAHLHPAMQYKFLQFLKKNKKEGKVRQIFVTSHSTHITSAVSLSEIICLYKDADETKVSYPDKIFPIDGKSKRYVQRFLDATKSDILFAQKILFVEGIAEQLLMSIFAEYLDKSLEDHHVAVVNVGGRYFKHFLHLFDSNKQNTIYKKVACITDIDPVRKKKNTADTADTADTADTADTADTADTADTA

SEQ ID NO: 64067 - protein, 563 aa, Acinetobacter gerneri DSM 14967 = CIP 107464
MSIIQIDSNTKFQDIEHHFKVSAGPGAGKTHWLVEHIRNVLHCSKRLGKIRKIACITYTNIAVETILTRLGTSATQVDVSTIHSFLYRHIVKPYVFLIADEYGLNYSKLDGHDELNHSYSKINNWLELTGQKYFISEQNKLIQALDSVQWQLQSDGEIYLQLPATKAYLGKITHLYIKKASYIDYRRQHWSSGKIHHDDVLFFSYQLIIKFPYILEVIRAKFPYFFIDEFQDCNPIQLAIIKKIAESETIVGVIGDPAQSIYEFQGAVYAQFNSFRLPQIGFYEMNQNNRSTSKIINLLNRVRADITQIPVRQIECDLPYLIVGNQNQTIYAIKNNYGIDDFCSLSRLNIDSNALKIELDKTSLVNNLFDRLAEDNNPIRRKILICSVKAIELAREKKFKDSIKELSKVFPLKEFSLNISLAYLVNILNEYNDFKDKSLSDFIEILRKYSGLEIPKLRKGKAKDLYDAHLYNQLSICINIPDDMSLNKTIHKSKGDEFDNVVLFLKSENDLEFIKNPNLMINEEHRINYVAISRAKNRLFISVPSLEVTNEPKFSEHFEILRC

SEQ ID NO: 64068 - protein, 699 aa, Acinetobacter nosocomialis NIPH 386
MRIEKIKVEGFRLLENVEFGLEENSTVIVGRNNSGKTSFTSIFDCFCGESGTRFRLEDFSVLSREKFLKAKELREAGESSEVIFETLPRISLILTFQYNKLSPDLGSLSPFIIDLDEDSTTAIARVEYRPILKNMHLLFDLTPSSAVVEPRTHFYKNLKGNLSKAYGVHVSAIDPTDSTNTRDFEGTSALTALLQCNFVLAQRNLDKTKLGDADVIGKLLSELFKTATSPSAAEADQNLAIRLKQSVENIEHNVQLDFDGMLKELLPVMNVMGFPSLNDTEIRPETSLNVESLLSGHTKVVYSGVDGVHLPEGYNGLGTRNLIYMLLQLASYHKIYRSKSISPATHLIFIEEPEAHLHPQMQEVFINQLNVAVQKLSENYSNKDKWNIQFVITTHSPHVANAAKFDAVRYFYNEIHKIENVRQTKVKDFKKGLSSISVKDQKFLHQYMTLTKCDLYFADKAILVEGTTERLLMPKLCQLVDESLDEPQKLARQYVTCVEVGGAHAHIFYPLLDFLELKTLVITDLDSTKKGKITKNGKQEDAWVKCPVVDGQNTSNAAIKNWFYPKEVDDTGKVKKKAKNEDSQISPSVLIAKTAQEKQIKFRRIAYQIPEDPETNICARSYEDAFILANLSKFELPEGQDIAVAAWEKAQGLIKSDFALEYAILIEDWSAPRYIKEGLIWLSEMDTIKKSNYELTTGE

SEQ ID NO: 64069 - protein, 577 aa, Acinetobacter nosocomialis NIPH 386
MSEILDNPAIIAAQLAEAKINAAIKAGRSFRLEAGAGAGKTFSLVHALKSIIKERGRSLTQTGKKVACITYTEVARNEIAQEIEDHPAILVDTIHGFSWAFMRQFQKAIREILIEDDSRKEKVEQGGGIGSKSVEYELGFFGVNDQKITLSHDDIPTMMAKLLSKEKFRKIFSNQFPVVFIDEYQDTNRQFMDAITEYFLKPKVGPLFGLFGDHWQTIYGSEYELAEYPIEEIAKGSNFRSVPAIVDILNNLRLDLPQAVSSPDAKGEARFFHTNSYKGKRTDERSSKDDLPIDIARSTRTSLIQRLQNEGWDIEKTKILMLSHNVLASEQGYPQLIKVFDGRNDQFAKKEDPVIKFFAEIVEPMSVSYSLSNYGEMFKIFGSRPAITKHEDKSCWRRDMDQLLKLRQEGTIGQVIDHLKQTKRPSPPDRVLRRDDELISLRNSPDTEMSSTLLRYNKLREIPYKEVIEVTKFIEKQTPFATQHSVKGAEFENVLVVLGGGWNNYKWPQLLELLETKKLTNANTKGFYRARNLFYVSISRPMTRLAVLATQTLSDTALVTVNNLFGSENVIELSLDT

SEQ ID NO: 64070 - protein, 599 aa, Acinetobacter junii CIP 107470
MYLSNIKLWNFRKYGEVGSPFDLAEPNLDLNFTKGLNVLIGENDSGKTAIIDAIKLVLKTHSYDYIKVEDKDFFDGSTRFRIELEFCDLTDDEAKNFTEWLGWKGTGVDAQTFLKLNYDVTRNNNKISPSDVKAGADSEGYLLTAEAKEYLKTTYLRPLRDAENELVSKRNSRLSQILLGDPTFKNKDQNHELVHMFEGLNMNLKKYFKGEEIKFFNKDGSETIETYNDGKAIKDKIDGYIKDFYNESIFTEFNVSSTELKSILEKFSLFLESQRNVGLGTLNRLFMAAELLHLNKEDWHGLRLGLIEELEAHLHPQAQMQVIEALQRQTNIQLILSTHSPNLASKVKLENLILCNKGNAFPLGKSYTKLADENYIYLEKFLDVTKANLFFAKGVILVEGWAEEILIPSIANAIGIDLTAKGISVVNIGNVGFKHYENIFLRQTPPHMTIPVVVITDSDIRTYKKDSLKKIPSRKIKRKTNLKLISIKNKSKQNILYFPAPKWTLEYCLFQSSKLSELFKNHASAIHSKTDWSTNFELALAKKLINKTLNKTEISYRIARDLDEEMNRNESDRTLNLHEAESTDSIYYLIEAIQYVTNS

SEQ ID NO: 64071 - protein, 662 aa, Acinetobacter junii CIP 107470
MSQTVEITDEDIRYAENILLPQGKIFDDERRRFIRNLSTIDLQAVPGSGKTTALLAKLLILETKLPLANGSGILVLSHTNTAVDEIKERIHKYCPKLFRYPHFIGTIQSFVNEFLAVPYYLFRLKKKPLRIDNEIYAEQIEFALSYNTKIALSKRSINYIDILSNSFISNNGIFQHFWSNNEVNIPKIGSHTNTYKELATIKINLLKTGILSFGDCYALAQKYLSNYPIIHKIINKRFQYVFIDEMQDMDTHQYELIEIIFAENNDTNTIIQRIGDKNQSIYNSIKAESIWQDRDHILHLSNSQRLSRPIANIVKNFALYPEHCMDIQGMNECQLKPHILLFSDSSIKNVIPYFSQLVQQYKASDELKFRQDKPLEIKIISWNTDWKDDEASRSNPTKLRLEDYHQAFKKNEQKPKEDYKCLKSYIHFYDKKHTTLSVIRKNIFHALLKILRIENISTNKNRLYTISNLINYLKVKSELNYSDLNLKVYECCLKIIRNEKNQALSDLQTYIPVFISYFKENHKLSSMCSDFINNDTTGIDQTSQNHIPASNIIEENDLKIEITSVHSVKGQTHDATLYLESYYYEDGRGNNAKSYESQRLANQFLGNPFNLTTERAKQSTKMAYVGFSRATQLLCIAIHKDRFEQYLNTIDRDIWEIKDISS

SEQ ID NO: 64072 - protein, 539 aa, Acinetobacter junii NIPH 182
MFISKIEIKNFRNFKHQEISFNEGVNVIIGHNNAGKTNLLTALSLVVNPDKNKRLDVDDFNKNVAFSELKTSPPKISIQVTLKKGCDSLPDDLAMVANWLTKLESDFEAKLTYEFFLPEKEVPKYTLAMSEIDETQENCRNTAWKTIKNEFIRLYSYKIYGGEIANRAIADGESLSKFDFQFLDAIRDVERDMLTGKNTLLKNVFDFFMDYDIKSDSIKSEENKITEIKTRKNKFLSDIEPVINSIQKRMELGKEQILSYADGTGASFNKAKPNFEGNISDIEMFSFLRLIIEYETGIKIPATHNGLGYNNLIFMSLLLAKMQVNSDGKYMGDNAKVFSVLVIEEPEAHLHPAMQYKFLQFLKKNKKEGKVRQIFVTSHSTHITSAVSLSEIICLYKEADETKISYPDTIFPLDGKSKRYVQRFLDATKSDILFAQKILFVEGIAEQLLMSIFARYIGKSLEDHHVAVVNVGGRYFTHFLHLFDSNKPKTISKKIACITDIDPERKMKPTDPTDPTDPTDPTDPTDPTDPTDPTDPTDP

SEQ ID NO: 64073 - protein, 563 aa, Acinetobacter junii NIPH 182
MSIIQIDSNKRLDHIEHHFKVSAGPGAGKTHWLVEHIRNVLHHSNRLGKIRKISCITYTNIAVETILARLGTSATQVDVSTIHSFLYRHIVKPYAFLIADEYNLDYSKLDGHDELNHSYSKINNWLELTNQKYFISEQSKLIDALDSVQWQLQNDGEIYLQLPATKAYLGKITKLYIKKASYIDYRRQHWLSGKIHHDDVLFFSYQLITKFPYILEVIRAKFPYFFIDEFQDCNPIQLAIIEKIAESETIIGVIGDPAQSIYEFQGAVYTQFNSFSLPNIKFYEMNFNNRSTIQIINVLNKVRSDITQISVRQIEGNLPSLLIGNQNQTIQAVKKCCGDSGFCSLSRLNIDSNVLKSELDSNTVVNNLFDRLVEDSNQERRKILAYHVKAIELAREKKFKDSFKELSKIFPVETFSLAFSLTYLSNLLSEYDDFKDKSLSHFIEIIRQLSGLTVAKLQKGRAKELYDNHIYNQISICVNIPDDTTLSKTIHKSKGDEFDNVVLFLKSENDLEFITNPNLMINEEHRINYVAISRAKYRLFISVPSLDTVNEPKFSEYFEIVRC

SEQ ID NO: 64074 - protein, 693 aa, Acinetobacter junii CIP 64.5
MRIEKVRVEGYRLLEDIEIVLEKNSTVIVGRNNSGKTSFTSIFDCFCGESGARFRLEDFSSLSREKFLNARKLKEEGASPEQIYNTLPIITLSLTFRYDSDAPTLGPLSPFIIDLDMDSTTAIACIEYRPVLAKMHLLFDLPQPPVGMEPQIHFFKCLRNNLSKIYEVHVSAIDPTDKSNKRNFEGTSAFAALLQCNFVQAQRTLDKTKLGEADVIGKLLSELFKTAAAPTATESDQELAAKLKKSVEDIELNVQSDFDKMLKKLLPVMGVMGFPSLNDTELRPETSLNVEALLSGHTKVVYSGTDGVHLPEGYNGLGTRNLIYMLLQLESYHKIYRSQITRPSAHLIFIEEPEAHLHPQMQEVFINQLNAAIQKLSSAYPAEDVWNVQFIITTHSSHVANAACFDAVRYFYNQKDSVKSIRNTKVKDFKKGMQTISSADKGFLHKYMTLTKCDLYFADKVIMVEGTTERLLMPRLRELVDISLPEHQKLASQYVTCIEAGGAHAHLFYPLLDFLELKTLVITDLDSTKMVEKENKKKVKTKIWEKCPVAQGERTSNAAIKDWFRPKDLDEKVIWQISPADLIAKNAIEKQVNFRRIAYQIPEDPKTNICARSYEDALILANLNQFPLPSEDDVATEAWEYAQGLTKADFALEYAIRVKEWVVPRYIREGLIWLSESDVPIQNLEPLDKGGAA

SEQ ID NO: 64075 - protein, 577 aa, Acinetobacter junii CIP 64.5
MSQIKENPALVAAQEAQRKINQALDAGYSFRLEAGAGAGKTYSLVAALKRLIDERGSTLVQSGKKVACITYTEVARNEIAQEIEDHPAILVGTIHGFCWAFIRQFQKAIRDLVIELKDKKEKVEQSGGIGSQLVEYDLGFFSVDEMRITLNHDDIPELMAMLLAKEKFRMLFSQQFPVIFIDEYQDTHRQFMDAITDYFLKSKTGPIIGLFGDHWQTIYSSEYELAEYPIEEIAKGSNFRSVPAVVNVLNALRPELPQVVSLPEAKGEARFFHTNSYNGPRTNTAHSKEDLPSDIARSCREELMARLRVEGWDLKKTKVLMLSHNVLAVEQGYPKIVELFRGRTEQFTKKEDPVIRFFAEVIEPMCMAYSSSHYGDMFKILGARPAITKHEDKMLWRRDMDRLLKLRIEGTIGQIIDHLKITKRPSLPDRILRREEELISLMGIPEVEMSSRSQRYKKLREIPYKEVIEVTRFIEKLTPFATQHSVKGAEFDNVLVILGGGWNHYNWPQLLELLETKKLTKTNMKGFYRARNLFYVSISRPMTRLAVLATQSLSDTALLTVSNLFGSENVEELSFGT

SEQ ID NO: 64076 - protein, 408 aa, Acinetobacter ursingii DSM 16037 = CIP 107286
MNGLGFRRLISITLTLIDFRETWLRKNKLDQEPIEPLHLVLIEEPEAHLHAQVQQVFIKKAYETLCLGQPSHCGTQLLVSTHSSYLARELDFSNLRYFKRKNSDAIPHAEVVDLSRTFDENSSQNEKFVTRYIRTTHCDLFFANGVILVEGDAERLLLPHFIKNHFPKLNSSYISILSVGGAHAHRLKNLIEKLALPCLIITDLDSVRMEIQTDEDGNIKMNNNNNAEKVKYKKCVPLPNANQLTNNDTLKTWFPIKEKIDDLLSLKYEDKTNGNIRVSYQTQVSLNFNDENKIVFPYTFEESIYFENRTWINTIFKKDVDKDDPRIKATGVLLKMMKAEGCEDFNDFRQSIFSALESNKVDMAMDLIYGLEPKDLKTPRYIDEGLTWLENKILGIDDLAQGEANEVC

SEQ ID NO: 64077 - protein, 613 aa, Acinetobacter ursingii DSM 16037 = CIP 107286
MKSVNSLVLEDLIFDYVSSSPPQSFILYAGAGAGKTHTLHQVLNKIKEDILLSLGRENKKLAVITYTNAACDEIKERVNFDNNFFVSTIHSFAWSLISPFTKEIKDIIKENLKEIINEEEKALKKSRDLNNKTSIGRQERIRKSLKRLSSLESTRCFNYNPNYSNVEESSLEHSEVIDIFSKLLVEKKSFRKILVNKFPILFLDEAQDTYEKVIDALVQTQIEFHSQFVIGLFGDNMQRIFTNNKKDLSKFIPENWKRPEKIENWRCPKRVVTLINKVRFDADKFQQESKVNHNGFARCLIVDTNKPNLDKLLVEDEICKTMREITNDDKWNIRSEIKTLILEHHMAATRSGFHKFYKPLYDSALRSKLSAADTQSLRFLVGTFCEFINSVKSKNNFNIIRILRSSSDIFLDFSTVEDQLSYLKNIRDKKNELFDLLMDSSNSIKIILNYIYQTNLLNIPPLLIQALILDNYAVDADSSSSELIAYSQALDAKIDQLFKYASYIDGSSAFDTHQGVKGLQFERVMAILDDDEAGGFLFNYDKFLGIKSLSDSDKKNEAQGEDNALSRTRRLFYVICSRAEKSLAVVCYTKNSELLKGKLIEKEWFDESEIHLI

SEQ ID NO: 64078 - protein, 698 aa, Acinetobacter ursingii ANC 3649
MRIEKIKVEGFRLLENVEFGLEENSTVIVGRNNSGKTSFTSIFDCFCGESGTRFRLEDFSVLSREKFLKAKELREAGESSEVIFETLPRISLILTFQYNKLSPDLGSLSPFIIDLDEDSTTAIARVEYRPILKNMHLLFDLTPSSAVVEPRTHFYKNLKGNLSKAYGVHVSAIDPTDSTNTRDFEGTSALTALLQCNFVLAQRNLDKTKLGDADVIGKLLSELFKTATAPSAAEADQNLAIRLKQSVENIEHNVQLDFDGMLKELLPVMNVMGFPSLNDTEIRPETSLNVESLLSGHTKVVYSGVDGVHLPEGYNGLGTRNLIYMLLQLASYHKIYRSKSISPATHLIFIEEPEAHLHPQMQEVFINQLNVAVQKLSENYSNKDKWNIQFVITTHSPHVANAAKFDAVRYFYNEIHKIENVRQTKVKDFKKGLSSISVKDQKFLHHMTLTKCDLYFADKAILVEGTTERLLMPKLCQLVDESLDEPQKLARQYVTCVEVGGAHAHIFYPLLDFLELKTLVITDLDSTKKGKITKNGKQEDAWVKCPVVDGQNTSNAAIKNWFYPKEVDDTGKVKKKAKNEDSQISPSVLIAKTAQEKQIKFRRIAYQIPEDPETNICARSYEDAFILANLSKFELPEGQDIAVAAWEKAQGLIKSDFALEYAILIEDWSAPRYIKEGLIWLSEMDTIKKSNYELTTGE

SEQ ID NO: 64079 - protein, 577 aa, Acinetobacter ursingii ANC 3649; identical to SEQ ID NO: 64069

SEQ ID NO: 64080 - protein, 712 aa, Acinetobacter beijerinckii ANC 3835
MHISKVSLVNYRNFKNSSFLFKEGVNTVIGENGSGKTNLFNAIRLLLDDSCIQYAYKLNENDFNRELGGDWKGHWIIISIDFDKLDSNEAIQSLFVHGAGVLESESVSKACYTLFFRPKIHIRHKLADLDEGDIVGLQQVLEKINIQDDYETVFHGKSSANYNDPSIYESLVGNFTDVKFPRDIDASKFGVRVPHQLSVSKEISFTFIQALRDVVSEFKNNRTNPLLTLLKRKSDEIKQEEYQPISELVLTLNGAIENLSDVQEIRNDIKNTLLGTIGRTYSPSSLSIKSSVPNEAEKLLQSLKLFMSEPDEEYEGGVHELSLGSANLIFLTLKLLEFKYRKSKDTFANFLIIEEPEAHIHNHIQKTLFDKLDYENTQIIYSTHSTQISEVSNVENINIVSKKTNNSEVYQPSTGLSSKSINQIQRYLDAVRTNLLFAKGVILVEGDAEEILIPILIKNVFGLSLDELGISLINIRSTGFENVSQIFHDSRIRRYCSILTDLDSAICDTNVLPKDSDKVKKYKEKVARSAKSGAERKIKLDELEKDNDWVKSFYANYTFEVDFIAAGNSFEIKRIIKDIYTDPATCIKAKEDISDGDVAVFGRRVLTMANSVGKGWFAILLGGHITYQTEIPDYIMDALIFSKEDYSKFLLADMIEYRIGRYEAADDCDIDFSPLRETLEEYKFSGLSLNSVIEEIQSVIEDDQILIFLDRL

SEQ ID NO: 64081 - protein, 599 aa, Acinetobacter beijerinckii ANC 3835
MYILSDESLNHEQKAAIYTNDNVLLIACPGSGKTRTLIYKIAYELSKMTSSKQFVIAITYTNTAAEEIKERVEILGVDTTQLWIGTIHSFCLHWILRPYYLYLDNLKNGFTVVNSYDSEEIITKLCEPYKNEKIKFWDCGVIAKPNGIYLTCSDPNKQASLLKIISEYYEILQKNNQIDFEQILKYSWDLISKKNIISKSLSKIFSTILVDEYQDTKEIQYYIISEILKSNNGDTKTLIVGDPNQAIYDSLGGFPMPKADLEILLGFNLVCLSLEKNYRSSDRIVKYFDFYKVDNNTIIASGDNSEYKSLITYNNSVALDDLIDEISHLILLNIRDHNISPDEICIVAPHWVHIGAITRKLMIKHPDLNFNGPGMAPFSRDVDNFWYKVSKIILTEPSPDIYIRRLRWSGEILKDLELFGVNIIDISNKDLLKICNSITINENDGLVYLSKFFTILFELLNIDWEKIPTLKSHYDSFFASSYQRIEKLSAEGLSGVETLENFKKVFKQKGGITVSTIHGVKGEEYDAVIGFALLDGFVPHFSDPKGELNSKKMLYVLASRARKNLHLIAERMRNPHSYHAPNGKAPTSHLELYKYSYDN

SEQ ID NO: 64082 - protein, 699 aa, Acinetobacter haemolyticus CIP 64.3
MRIEKIKVEGFRLLENVEFGLEENSTVIVGRNNSGKTSFTSIFDCFCGESGTRFRLEDFSVLSREKFLKAKELREAGESSEVIFETLPRISLILTFQYNKLSPDLGSLSPFIIDLDEDSTTAIARVEYRPILKNMHLLFDLTPSSAVVEPRTHFYKNLKGNLSKAYGVHVSAIDPTDSTNTRDFEGTSALTALLQCNFVLAQRNLDKTKLGDADVIGKLLSELFKTATAPSAAEADQNLAIRLKQSVENIEHNVQLDFDGMLKELLPVMNVMGFPSLNDTEIRPETSLNVESLLSGHTKVVYSGVDGVHLPEGYNGLGTRNLIYMLLQLASYHKIYRSKSISPATHLIFIEEPEAHLHPQMQEVFINQLNVAVQKLSENYSNKDKWNIQFVITTHSPHVANAAKFDAVRYFYNEIHKIENVRQTKVKDFKKGLSSISVKDQKFLHQYMTLTKCDLYFADKAILVEGTTERLLMPKLCQLVDESLDEPQKLARQYVTCVEVGGAHAHIFYPLLDFLELKTLVITDLDSTKKGKITKNGKQEDAWVKCPVVDGQNTSNAAIKNWFYPKEVDDTGKVKKKAKNEDSQISPSVLIAKTAQEKQIKFRRIAYQIPEDPETNICARSYEDAFILANLSKFELPEGQDIAVAAWEKAQGLIKSDFALEYAILIEDWSAPRYIKEGLIWLSEMDTIKKSNYELTTGE

SEQ ID NO: 64083 - protein, 577 aa, Acinetobacter haemolyticus CIP 64.3
MSEILDNPAIIAAQLAEAKINAAIKAGRSFRLEAGAGAGKTFSLVHALKSIIKERGRSLTQTGKKVACITYTEVARNEIAQEIEDHPAILVDTIHGFSWAFMRQFQKAIREILIEDDSRKEKVEQGGGIGSKSVEYELGFFGVNDQKITLSHDDIPTMMAKLLSKEKFRKIFSNQFPVVFIDEYQDTNRQFMDAITEYFLKPKVGPLFGLFGDHWQTIYGSEYELAEYPIEEIAKGSNFRSVPAIVDILNNLRLDLPQAVSSPDAKGEARFFHTNSYKGTRTDERSSKDDLPIDIARSTRTSLIQRLQNEGWDIEKTKILMLSHNVLASEQGYPQLIKVFDGRNDQFAKKEDPVIKFFAEIVEPMSVSYSLSNYGEMFKIFGSRPAITKHEDKSCWRRDMDQLLKLRQEGTIGQVIDHLKQTKRPSPPDRVLRRDDELISLRNSPDTEMSSTLLRYNKLREIPYKEVIEVTKFIEKQTPFATQHSVKGAEFENVLVVLGGGWNNYKWPQLLELLETKKLTNANTKGFYRARNLFYVSISRPMTRLAVLATQTLSDTALVTVNNLFGSENVIELSLDT

SEQ ID NO: 64084 - protein, 597 aa, Acinetobacter baumannii NIPH 527; identical to SEQ ID NO: 62720

SEQ ID NO: 64085 - protein, 593 aa, Acinetobacter baumannii NIPH 527; identical to SEQ ID NO: 62631

SEQ ID NO: 64086 - protein, 601 aa, Acinetobacter baumannii NIPH 67
MYLSNIKLWNFRKYGEIGNTFDLAKPNLDLNFTKGLNVLIGENDSGKTAIIDAIKLVLKTHSYDYIKVEDKDFFESSSRFRIELEFSNLTDDEAKNFTEWLGWKGTGADAQTFLKLNYDVTRNDKKINPSDVKAGADSEGYLLTAEAKEYLKTTYLRPLRDAENELVSKRNSRLSQILLGDPTFRNKDQNHELVHMFEGLNTNLKKYFKGEEISFIDKDGITTTETYEDGKAIKDKIDGYIKEFYDEGIFSEFNVSSTELKSILEKFSLFLESQRNVGLGTLNRLFMAAELLHLNKEDWHGLRLGLIEELEAHLHPQAQMQVIEALQRQTNIQLILSTHSPNLASKVKLENLILCNKGNAFPLGKDYTMLQPESYKYLEIFLDTTKSNLFFAKGVIFVEGWAEEILIPSIAKAIGKDLTAKGVSVVNIGGVGFQHFVNIFLRKQEPHMNIPIVVITDSDIRTYEKVGENYSLKSTSDTQLQIEAKLQEYEIKSQQKIKYFVAKQWTLEYCLFKSSKLSNKFKNHAKAIHSRTPWDTNFELELAKKLINKKLDKTEISYRIAYDLDDEMKKDESERTLNLHEADSTDSIYYLIEAIRYVTNN

SEQ ID NO: 64087 - protein, 662 aa, Acinetobacter baumannii NIPH 67
MSQIIEITDEDIKYAEDILLPQGKTFDDERRNFIRNLSTLDLQAVPGSGKTTALLAKLLILETKLPFSDGSGILVLSHTNAAVDEIKEKIHQYCPKLFRYPHFIGTIQSFVNEFLAIPFYLFKLKKKPLRIDNEIYAEQIESALPYNTKIALSKRGINYIDILSNSFISNKEIFQHFWSNDEVNIPRIGSHTTTYKELATMKINLLKTGILSFGDCYALAQKYLSNYPIIHKIINKRFQYVFIDEMQDMDTHQYELIEMIFTENNDTNTIIQRIGDKNQSIYNSIKAESIWQDRDNVLHLSNSQRLSRPIANIVKNFALYPEHCSDIQGMNECQLKPHILLFSDSSIKNVIPYFSQLVQQYKGSGELNFRQEKPLEIKVISWNTDWKDDETSRSNPTKVRLEDYHQAFKKNEQKPKEDYKCLKSYIHFYDKKHTSLSMIRKNIFHALLKILRIENISTNENRLYNISNLINYLKVNSELNYSDLNLKVYQCCLKVIRNEKNQALSDLQSYIPVFISYFKENHRLSTKCIDFINNDKTGLDQFSQNHSSVSNMIEENNLKIEITSVHSVKGQTHDATLYLESYYYVDGKGNNAKSYESQRLANQFLGNPFNQSTERAKQSTKMAYVGFSRATQLLCIAIDKDRFEQYLNTIDRNIWEIKDISN

SEQ ID NO: 64088 - protein, 263 aa, Acinetobacter baumannii NIPH 70
MSIIPAEAFFSSGVFLVEGPSEEILYKELLLKNKVDIDYYNLSVFAVGGIQFKVFAAVLRALEIPFSLRTDNDISTVEMNCKVHGFNKNDSLNPCYVYKKIEINYTDEKCIKWQYLGVNRCYGILNRDSEKWKHSLYPLNRVNILGDKRWKAFEKMINAHGIFMSNIDLECDLVSVASEEIKKALGKKNNNSAVDFLKKSKALNMQILMAKLEKKGFEKIYESDFGKPIRYLINLLLKQSDTDTESPVLINTNSETAKEVVLL

SEQ ID NO: 64089 - protein, 539 aa, Acinetobacter baumannii NIPH 70
MKLTNDQIKAIQDIENNSVIMACPGSGKTTVLINKMSLCCEKLKRHNGIIGLSFTRKSSEELRRKFQKKTISSNLNYLGTIDGFLINEIIRPFLPKLWGNENDDIEIVSILSEEESIPFVQEFANGEIYLKDIENDNAFKGLFLSGKIWQRTVTPLALFVLKNSSVCRRYISSRYKYLFVDEYQDTSSGQHLVFLEILKLGLKFTAVGDIDQSIYRWRDAIPENLTSLVNEHDFKEYAIDQNHRCDPSIDLYARAFLKGIDLEEIDKKNIFGLHINNSGKHRYAKLDDFIQKIKDENNFDFSDFVILAANNATVQHYALNTRHSYRIYEDDPLDSMNHYIAQLCSDLILYKFCKNYSSYSIYENYKSRFINIKLNDFKVEVKKIRTENDTDEICEIIKGLINKTNYKGDCENFILATKNIFNDEFLLKKYKPHNKNELQIMSIHKSKGLEFKVVIHLGLEQWVLPRKTKKQGQWTFSDLEGDKNLHYVAITRAENLCYLVDMPIRVKSENNVFKEMNANKSEFLCIERLNKHIVDLGVM

SEQ ID NO: 64090 - protein, 482 aa, Acinetobacter baumannii NIPH 80
MNGRQSRLSKLLKFIEANQLKICKRDEKKHPLEEKFKEFNQSLIDEKDSSIKKANELIAEHLLKAVGQNFSQSTHIQFVENEFSKIVENLRLIFFPKITTAEADQFRDLCQNSLGYNNLLYIASILAELTLTKGESLYRLLLIEEPEAHLHPQLQVRLLDHLEAVANDHNVQVIVTTHSTVLASSVKLDKIIHLTKNEKPQATALAECGLAPNNLDFLNRWLDITKSNLLFASGVILVEGIAEQMLIPELAKIVLKDKEINNIEDYGVSVINLNGIYFNHFMRLYCNIKGVSDVQEDQEGLNIPIRCAGITDLDPEQHYYKEEIVKEEKKQVKYNHKPPSEKNEIVGKNHALKLVKSINSSEHARLFVAGYKTLEYDLAMEECNAKVMAQILFDLWPSKTGEVKKGLQKIVNDDYLKITPEQKADHAIEILKRVDDDNIGKGYFAQVLADKISSGIVKLKVPQYIEDAILWACSLENSSVEE

SEQ ID NO: 64091 - protein, 392 aa, Acinetobacter baumannii NIPH 80
MKYTNEQLSYIKQAKITENVFLNACPGSGKTETIAQRVANEIESWGNFPSGIAVLSFTKSAAKEIEHRIKEKIKGQSTYPHFIGTFDSFILKNIVNPLSKDISKYQGDNGDYSFKVVNYNSQLFYLTEYSHGYQKISGHQVEIDSRTGSFKFHLPNQDANRALNAMVLEQWRKDDIYRAKKKCRDAGFLTHKDIEYLAESALTTRTITKDYAKKLATRFQLIIVDECQDLSFEQLNILKAMMLNGTKLHFVGDLNQAIYEFRDVNPNDIKQFISDNSFREVRLTKNFRSCQKIVNISTNIMKSGSIEADFTSPEQSCFVLQYKDSPSEVISRFNELTKQYSNRVLVARGHQTLNQLSAVESTPKLPAEFLLSSILNFDETSYHSIDQWQSKT

SEQ ID NO: 64092 - protein, 597 aa, Acinetobacter baumannii ANC 4097; identical to SEQ ID NO: 62720

SEQ ID NO: 64093 - protein, 593 aa, Acinetobacter baumannii ANC 4097; identical to SEQ ID NO: 62631

SEQ ID NO: 64094 - protein, 622 aa, Acinetobacter baumannii ANC 4097
MMKIDKVILKGFRNYKDATINFNNNTLIIGENDVGKTNLIYALRLMLDRSVSELDIEPSELDFHVQGGVQSENLEIIIKFFDIKEEAALSILKEHVSDDGECVFKYMASKENLDYKLYLGQNETDLSEIQSRYYLKYINLKYISSQRDLSKFIAKEKKQLLRISKTKITEEQEKLDRENVLEISKQLVDLDDKVAQLEYVKTATQEVNLELKKLAYAHDDYDVKLNASGIEVDDFINKLQLGAMSGGSNVMLGGDGRNNQILIALWKALSEFEHDSNDEVVFYVVEEPEAHLHPHQQRKLASYLSSELQSQCLITTHSPQIASSFSPSSIIRLFKKDFSTIAASNGCTKELEKAWEELGYRMSIIPAEAFFSSGVFLVEGPSEEILYKELLLKNKVDIDYYNLSVFAVGGIQFKVFAAVLRALEIPVSLRTDNDISTVEMNCKVSSYTRIDGVNPCYVYKRIEINYKEEKCKKWQYLGVNRCYGVLNENSEKWEHSLYPLNRAKILGDKRWKAFEKMINSKGIFMSNRDLELDLVSVASEEIKKALSKKTDTSSVDFLKTNKALNMQILVSKLEDEGFKKIYESYFGEPIRYLIKILMSKPILKTESEIELETEYAQEEGAA

SEQ ID NO: 64095 - protein, 536 aa, Acinetobacter baumannii ANC 4097
MKLTDDQIRAIQDLENNSVIMACPGSGKTTVLINKMSLCCEKLKRHNGVIGLSFTRKSSAELKRKFQKKMRNSNLNFLGTIDSFLINEIIRPFLPKLWDIEIDDIEIINILSEEESIPFVQEYITREIYLSDIEGDIAFRGLFLQGKVWQKTVTPLALFVLRNSSICRRYISSRYKYLFVDEYQDTSSGHHLIFLEILKLGLKFTAVGDIDQSIYRWRDAIPENLTSLVKNYEFKEYIIDQNHRCDPSIDLYARVFLKDLDLEENDEKKIFRLHINDSGKHRYSKLDDFIQKIKDENNLEFSDFLILAANNATLKHYAMNTRHSYRIYEDDPLESMNHYIAQLCSDLIQYKFCNNYSSYSIYENYKGKLISIKLNDFKAIAKKIRCQNDTDTICEIIEEMIRKIKYKGDYENYILAARNILNDEFLLKKYKPNNKNELQIMSIHKSKGLEFKAVIHLGLEAWVFPRMTRRHGQWILQDLDGDKNLHYVAITRAEKLCYLVNMSIRVNSQFEERTAEKSEFLCIEKLNKHIVDLGVM

SEQ ID NO: 64096 - protein, 699 aa, Acinetobacter sp. NIPH 284; identical to SEQ ID NO: 64064

SEQ ID NO: 64097 - protein, 577 aa, Acinetobacter sp. NIPH 284; identical to SEQ ID NO: 64065

SEQ ID NO: 64098 - protein, 587 aa, Acinetobacter sp. NIPH 713
MKIDKIILKGFRNYKDATINFNNNTLIIGENDVGKTNLIYALRLMLDRSLSELEIEPSELDFHVQGGVQSEELEIIINFLDIKEEAALSILKENVSDDGECVFKYMASKENLDYKLYLGQNETELSEIQSRYYLKYINLKYIASQRDLSKFISKEKKQLLKISKTKITEEQEKLDRDNLLEISKQLVELDGKVAQLEYVKTATKEVNSELKKLAYAHDDYDVKLNASGIEVADYINKLQLGAMSGGSSVMLGGDGRNNQILIALWKALSVFEHDSNDEVVFYVIEEPEAHLHPHQQRKLASYLSSELPSQCLITTHSPQIASSFSPSSIIRLFKKDFSTIAASNGCTKELEKAWEELGYRMSIIPAEAFFSHGVLLVEGPSEEILYKEMLFKNEIDIDYYNLSIFSVGGIQFNVFAKVLQALEIPFAFRTDNDVSTTTIKSIKYWQYLGVNRCLGILNKNKWEHSNIEITRTDILTDPRWTEFEKTINSHGIYMSKVDLENDLVSLIESNILEALKKESAQEAIDYLQGKKALRMQKLVAQLDQDGFEKIYESDFGEPIKYLLERLMHKSQLESELASSDVAEEVIV

SEQ ID NO: 64099 - protein, 539 aa, Acinetobacter sp. NIPH 713
MKFTDDQKKAIKDIENNSVIMACPGSGKTTVLINKMALCCEKLKRHNGVIGLSFTRKSSAELRQKFQKKTIKSNLNYLGTIDSFLINEIIRPFLPKLWRIEINDIEIINILSEEESIPFIQEYMTREINLSDIENDSAFRGLFSQGKVWQKTVTPLALFVLRNSSACIRYISSRYKYLFVDEYQDTSSGQHLIFLEILKLGLKFTAVGDIDQSIYRWRDAIPENLSSLVNEHDFEEYTIDQNHRCDPSIDLYARVFLKGTDLEEIDKKSIFKLHINNSGKHRYIKLDDLIQKIKDENNFEFSDFVILAANNATVQHYALNTRHSYRIYEDDPLDSMNHYIAQFCSDLILYKFGKNYSSYSIYEDYKSRFINIKLNDFKGEVKKIRTENDTDKICEIIKSLINRTSYKGDTQKFILASKKILSDAFLLKKYKPHNKNELQIMSIHKSKGLEFKVVIHIGLEQWVLPRKTKKQGQWTFSDLEGDKNLHYVAITRAENFCYLVDMPIRIKLEDEAFKEMRANQSEFLSIPRLNKHIVDLGVI

SEQ ID NO: 64100 - protein, 565 aa, Acinetobacter sp. NIPH 1867
MYINKVKINNYRSFRSFEAQLQKLTIVVGENDTGKTNFFTALSLPLSGNQINFNQKRLSISDINKDSVIDFFTSIITNEAKENQLQKIPKVSVTIEFTDPKDSYEAALLAKWLVADGDKETYQIRYDFKPKDDVDLLEVVKATLAGKTIEEVNWFTLPIELYDYQIVSVNNGKTINFIDLQNVSIHNINAERDDFSESSSMKSNSIFTKLLMNTLGDEDKSKINTAYSEFFTAIEDTQTFEKVIGTNPEFDNYDDIIKKLECIPNLPNLKNILSNITLRYGNEFLYQKGLGQRNLIYILILFAYYKSCGRTFNLCCIEEPEAHLSVNNLRLVRDFIEKSSTNSSSLVQTIISTHNPTIINKLNLSNVLAFTGEKAISLSDASPKLVDYLRKRPNFDILKLLFANKVILVEGTTEEMLISTFLSKKENLQDIEIIAIGQRGYTNFLDIWLMLNKDNPNKKIGVIRDYDNSEAAKAKHDIYDLDNANISVRTTKNYTLEIDLVETEGNLSLLNTLFRMSGDVKSVSDHMIGGKASRMLDVCDAMVEEKNPLDIKLPAHIAEVIEAVS

SEQ ID NO: 64101 - protein, 457 aa, Acinetobacter sp. NIPH 1867
MIEIQIAGAGAGKTYGLAEALIVHIKACTTHKKTFALTYTNSATAKIEQEIIKQHGFIPQNLYIQTVHSFLLNEIVYPFSSFTLDDVYNDSSIMHVGNSNYKNRLFKTLREKKIIHAENVYNISKQIVDEMISRHSNKAKKAKVKRLLAILENCFEKIFIDEVQDLDDDALRFFEVLGSNGIDVYMIGDPKQAIKHPKAFDTFVDKVFAKEYVNMLEINNQTIRVPKKILAISNGFCYEGQQQESLSDVVGELMYIESTDAKYDELLSSYISTKQIVCIDKKVGRYSTSSKHKHSFPQEIEEMIRESKHNKDRVLFAKAAFSDFFNDVEKYGAKMAINNLRTRHLLTFEKKHYAQLYELCSVFTENNVQFIVQSIDSVKGLDANTCVIITSPNFLKYLTKNGIKEDDYFNKEWKKVYVALTRAKHRLVLALDHDLLLASDLEAVRNSISELGFVYHH

SEQ ID NO: 64102 - protein, 621 aa, Acinetobacter sp. ANC 3880
MKIDKVILKGFRNYKDATINFNNNTLIIGENDVGKTNLIYALRLMLDRSVSELDIEPSELDFHVQGGVQSENLEIIIKFFDIKEEAALSILKEHVSDDGECVFKYMASKENLDYKLYLGQNETDLSEIQSRYYLKYINLKYISSQRDLSKFIAKEKKQLLRISKTKITEEQEKLDRENVLEISKQLVDLDDKVAQLEYVKTATQEVNLELKKLAYAHDDYDVKLNASGIEVDDFINKLQLGAMSGGSNVMLGGDGRNNQILIALWKALSEFEHDSNDEVVFYVVEEPEAHLHPHQQRKLASYLSSELQSQCLITTHSPQIASSFSPSSIIRLFKKDFSTIAASNGCTKELEKAWEELGYRMSIIPAEAFFSSGVFLVEGPSEEILYKELLLKNKVDIDYYNLSVFAVGGIQFKVFAAVLRALEIPVSLRTDNDISTVEMNCKVSSYTRIDGVNPCYVYKRIEINYKEEKCKKWQYLGVNRCYGVLNENSEKWEHSLYPLNRAKILGDKRWKAFEKMINSKGIFMSNRDLELDLVSVASEEIKKALSKKTDTSSVDFLKTNKALNMQILVSKLEDEGFKKIYESYFGEPIRYLIKILMSKPILKTESEIELETEYAQEEGAA

SEQ ID NO: 64103 - protein, 536 aa, Acinetobacter sp. ANC 3880; identical to SEQ ID NO: 64095

SEQ ID NO: 64104 - protein, 699 aa, Acinetobacter sp. ANC 3880
MRIEKIKVEGFRLLESVEFGLEENSTVIVGRNNSGKTSFTSIFDCFCGESGTRFRLEDFSVLSREKFLKAKELREAGESSEVIFEALPRISHTLTFQYNKLSPDLGSLSPFVIDLDEDSTTAIARVEYRPILKNMHLLFDLTSSSAVVEPRTHFYKNLKGNLSKAYGVHVSAIDPTDSTNTRDFEGTSALIALLQCNFVLAQRNLDKTKLGDADVIGKLLSELFKTATAPSAAEADQNLAIRLKQSVESIEHNVQLDFDGMLKELLPVMNVMGFPSLNDTEIRPETSLNVESLLSGHTKVVYSGVDGVHLPEGYNGLGTRNLIYMLLQLASYHKIYRSKSISPATHLIFIEEPEAHLHPQMQEVFINQLNVAVQKLSENYSNKDKWNIQFVITTHSPHVANAAKFDAVRYFYNEIHKTENVRHTKVKDFKKGLSSISVKDQKFLHQYMTLTKCDLYFADKAILVEGTTERLLMPKLCQLVDESLDEPQKLARQYVTCVEVGGAHAHIFYPLLDFLELKTLVITDLDSTKKGKITKNGKQEDAWVKCPVVDGQNTSNAAIKNWFYPKEVDDTGKVKKKAKNEDSQISPSVLIAKTAQEKQIKFRRIAYQIPEDPETNICARSYEDAFILANLSKFELPEGQDIAVAAWEKAQGLIKSDFALEYAILIEDWSAPRYIKEGLIWLSEMDTIKKSNYELTTGE

SEQ ID NO: 64105 - protein, 577 aa, Acinetobacter sp. ANC 3880
MSEILDNPAIIAAQLAEAKINAAIKAGRSFRLEAGAGAGKTFSLVHALKSIIKERGRSLTQTGKKVACITYTEVARNEIAQEIEDHPAILVDTIHGFSWAFMRQFQKAIREILIEDNSRKEKVEQGGGIGSKSVEYELGFFGVNDQKITLSHDDIPTMMAKLLSKEKFRKIFSNQFPVVFIDEYQDTNRQFMDAITEYFLKPKVGPLFGLFGDHWQTIYGSEYELAEYPIEEIAKGSNFRSVPAIVDILNNLRPDLPQAVSSPDAKGEARFFHTNSYKGTRTDERSSKDDLPIDIARSTRTSLIQRLQNEGWDIEKTKILMLSHNVLASEQGYPQLIKVFDGRNDQFAKKEDPVIKFFAEIVEPMSVSYSLSNYGEMFKIFGSRPAITKHEDKSCWRRDMDQLLKLRQEGTIGQVIDHLKQTKRPSPPDRVLRRDDELISLRNSPDTEMSSTLLRYNKLREIPYKEVIEVTKFIEKQTPFATQHSVKGAEFENVLVVLGGGWNNYKWPQLLELLETKKLTNANTKGFYRARNLFYVSISRPMTRLAVLATQTLSNTALVTVNNLFGSENVVELSLDT

SEQ ID NO: 64106 - protein, 601 aa, Acinetobacter sp. CIP 102143; identical to SEQ ID NO: 64050

SEQ ID NO: 64107 - protein, 308 aa, Acinetobacter sp. CIP 102143
MSQTVEITDEDIRYAENILLPQGKTFDDERRKFICNLSTIDLQAVPGSGKTTALLAKLLILETKLPLSDGSGILVLSHTNAAVDEIKERIHQYCPKLFRYPHFIGTIQSFVNEFLAIPYYLFKLKKKPLRIDNEIYAEQIEFALSYNTKIALSKRSINYIDILSNSFISNKQILQHFWSNDEVTIPKIGSHTNTYKELATIKINLLKTGILSFGDCYALAQKYLSNYPIIHKIINKRFQYVFIDEMQDMDTHQYELIEKIFTENNDTNTIIQRIGDKNQSIYNSIKAESIWQDRGNVQRWIRKFEQLL

SEQ ID NO: 64108 - protein, 699 aa, Acinetobacter ursingii NIPH 706
MRIEKIKVEGFRLLENVEFGLEENSTVIVGRNNSGKTSFTSIFDCFCSESGTRFRLEDFSVLSREKFLKAKELREAGESSEVIFEALPRISLILTFQYNKLSPDLGSLSPFVIDLDEDSTTAIARVEYRPILKNMHLLFDLTPSSAVVEPRTHFYKNLKGNLSKAYGVHVSAIDPTDSTNTRDFEGTSALTALLQCNFVLAQRNLDKTKLGDADVIGKLLSELFKTATAPSAAEADQNLAIRLKQSVENIEHNVQLDFDGMLKELLPVMNVMGFPSLNDTEIRPETSLNVESLLSGHTKVVYSGVDGVHLPEGYNGLGTRNLIYMLLQLASYHKIYRSKSISPATHLIFIEEPEAHLHPQMQEVFINQLNVAVQKLSENYSNKDKWNIQFVITTHSPHVANAAKFDAVRYFYNEIHKIENVRQTKVKDFKKGLSSISVKDQKFLHQYMTLTKCDLYFADKAILVEGTTERLLMPKLCQLVDESLDESQKLARQYVTCVEVGGAHAHIFYPLLDFLELKTLVITDLDSTKKGKITKNGKQEDAWVKCPVVDGQNTSNAAIKNWFYPKEVDDTGKVKKKAKNEDSQISPSVLIAKTAQEKQIKFRRIAYQIPEDPETNICARSYEDAFILANLSKFELPEGQDIAVAAWEKAQGLIKSDFALEYAILIEDWSAPRYIKEGLIWLSEMDTIKKSNYELTTGE

SEQ ID NO: 64109 - protein, 577 aa, Acinetobacter ursingii NIPH 706
MSEILDNPAIIAAQLAEAKINAAIKAGRSFRLEAGAGAGKTFSLVHALKSIIKERGRSLTQTGKKVACITYTEVARNEIAQEIEDHPAILVDTIHGFSWAFMRQFQKAIREILIEDDSRKEKVEQGGGIGTKSVEYELGFFGVNDQKITLSHDDIPTMMAKLLSKEKFRKIFSNQFPVVFIDEYQDTNRQFMDAITEYFLKPKVGPLFGLFGDHWQTIYGSEYELAEYPIEEIAKGSNFRSVPAIVDILNNLRPDLPQAVSSPDAKGEARFFHTNSYKGTRTDEKSSKDDLPIDIARSTRTNLIQRLQNEGWDIEKTKILMLSHNILASEQGYPQLIKVFDGRNDQFAKKEDPVIKFFAEIVEPMSVSYSLSNYGEMFKIFGSRPAIMKHEDKSCWRRDMDQLLKLRQEGTIGQVIDHLKQTKRPSPPDRVLRRDDELISLRNSPDTEMSSTLLRYNKLREIPYKEVIEVTKFIEKQTPFATQHSVKGAEFENVLVVLGGGWNNYKWPQLLELLETKKLTNANTKGFYRARNLFYVSISRPMTRLAVLATQTLSDTALVTVNNLFGSENVIELSLDT

SEQ ID NO: 64110 - protein, 601 aa, Sphingopyxis sp. MC1
MRVARIVIQNFRTFASLDVNVADDLCCIIGENNTGKTAILRAIQICLDNMLPSSFRSLLREDIHSAIDIAEPSQVLIGIELTGFEGRVNEEALVSTWKTAADRARIFYRFRPRPAVREQLASGDVIPGTLTLEDYQWEIRGGGDPAIDLTEIAWNDEGIGESVRFADLQSYLLVQLPALRDVENDLRNPRQSPLIRLIEAFEIDAAEQDALIAMLDQANHAIANSPTIAEIAGAIDTRFKDVSGPAFEMDATLGLSAATFRAIIRNLKIILSDLSLTSFEPGRNGLGMNNILYIAILMEYLQRRIALNRSAGQLILIEEPEAHLHPQLQFSLIAALRAIGVQTILTSHSTQVTSQVPLSSIISLTKRNDATIAAGNLALNAALSAPEIADLERYLDATKSALLYARKVMLVEGPAEMFLIPALIEQVHDVKLERLGISVIAIHGVHFGVYAKLFRAGSLEKKCAIVADADMKPSDAEDFDPETDAPDLVALQGDFVSTFAGATTFERELVSVGRLPMLIETVRALGAPQILAQMENGLERLALGGMGIADETALRVELGRITLNTAKRFGKARFAQIASRYANLATDLPPYIEQAYEWLIE

SEQ ID NO: 64111 - protein, 587 aa, Sphingopyxis sp. MC1
MIGLTPEQREAVEHDGNLLLTACPGSGKTRVILAKLLALADQVVGTSQFIGCITYTNAAVDEIEARLRTYGNNVIADRCEISTIHAFCLQFILRPYSWLIPEVPTSFQVLSRENSLFEQIVTAVEDAFGRMPAGQVFEDYESLRIDVNGEPCGSGIETGIVTAESAALYWEWVRAHGYLDFAMILYYSWKIIEQHPFVGRGIASRFAWLLIDEFQDTTDIQIAIFGALRNFLHTRFFLVGDQNQSIMRFAGARPELAEQFGDQIDAHRDTSLTGNFRCGTAIVSAASTLIPTVPGMQSAGDAAQLEAQVNYVHVARPIDAITDYFLPALQDAGIPLGKAAILAPWWTHLIPVARVLREFNVPVFGPGARPYKRRRLLAGLAEQLGACAEAGNYLGVPGVERALFRLIGDLTGNSRYDMFSYQGRRVALGMIYLARELADQHLGGVPWLRALAREAGDYLEHEEWLPASAKQPLIDSAEEMLSDMQASKVDLANLLISDMGLFANPEHALKLITLHNSKGREFDGVALICMNYGSIPHFSTSTQEAYDEARRLFYVGLTRAKRILVIASDQSHWKNTPTPFISEAGLG

SEQ ID NO: 64112 - protein, 545 aa, Clostridium bolteae 90B7
MYLSCVRIWNFRKYGYANLDATPALEVYLKGGLNVLIGENDTGKTAIIDAIKFVLGTRSHDTLQIKECDFYEDLKGERSELLKIECVFQELSDDEAGNFLEWLTFDGDKAELSVRMIARRRDNRIMNSITAGMPELDTRFDAIELLRVTYLKPLRDAENELKHGYHSRLAQILLNHPLFTKEKDLHVLERYFGIANQKIEEYFKKEKLEKDEIFGIEDGEKGAKEITGKLEATLREFMGNNYDSHGYEPIISASRNELTSILRRLSLIIAQNQVGLGSLNQLFIALELLLFDIENRFNIALIEEIEAHLHPQAQLRLIAYLQNKNDNDNSNKKLQCIITTHSITLASKIKISNLIYCKNNKAYMLDSAHTALESGDYKYLERFLDSTKANLFFAKGVIFVEGDAENILMPVIAKIIGMPLEKYGVSIVNVGSLAFLRYANIFKRKNGECIDIPIAIVTDLDVRPDYYYEIKKEENKNIVYSIEDLKGAEEICELKCSDIEGKYYIKKEDIYEKIKEQNKVKKLSKKVKDSIEIYIKPANKKSIGK

SEQ ID NO: 64113 - protein, 635 aa, Clostridium bolteae 90B7
MSIVNFIDEDIHYAEKILLGNKTFDINEKLPIIKRMDKSISVMACPGSGKTTALMGKIIALVNHLPLNDGKGICIITHTNVAINEIKSRLGSRGDILFQYPNFIGTIQAFTDKFLSIPFLKQAYRQGITAINDEYYYQKMFQRKKEITILKKYAYGKCGRDYSKIDNYIKSIVLRRKDGEFDFCTGDKSLNLKNKSSDTYKALYSLLVDSLFSQGILRYDDTYLLAQMYLEEHPELSYYFCSRFQYVFMDEVQDNRGVQNEILDKIFLPERVVIQKFGDMDQAIYDDKEEVERNVLEDRYEISKSMRFPQNIADIIENLRVEPHKKTLIGNGNADAFIYILVFEHDKICNVKDKFVDLILEHNLKKEKSVFKCCGWVGYKEKEEQLSVKSYYPMYISNKDVTIKQVGMSFQSILEENAKHNVTVGLIYKSVIVCIVRYLNMNDITFEEKQITYSILEKYIKNNMTIEWINLRSLIVREATKIKNYDETAFKIIGTEALHIVFHFFEECNEKQFLKLFERQTNSKKDVLYNCYTRDGVSVLFDTVHGVKGETHTGTLYVETYFNKKTDMQRILKFMSGSNIKKMGADEKKALKVGYVGMSRATDMLCIAIGEDTFKMYEKEIEELEQSRKLQICHI

SEQ ID NO: 64114 - protein, 545 aa, Clostridium bolteae 90A5; identical to SEQ ID NO: 64112

SEQ ID NO: 64115 - protein, 635 aa, Clostridium bolteae 90A5; identical to SEQ ID NO: 64113

SEQ ID NO: 64116 - protein, 677 aa, Ralstonia pickettii OR214; identical to SEQ ID NO: 62662

SEQ ID NO: 64117 - protein, 585 aa, Ralstonia pickettii OR214; identical to SEQ ID NO: 62663

SEQ ID NO: 64118 - protein, 368 aa, Salmonella enterica
  subsp. houtenae serovar 16:z4,z32:-- str. RKS3027
MISQKVGIFTKLLMNTLSEVTKGEINTAYSDFFSAIERTKTFDKVIGRNPDFDNYDDIIEKLDCIPNIPNLKNILSNITLRYGNEFLYQKGLGQRNLIYIFILFAYYKSCSDTFNLCCIEEPEAHLSVNNLRLVRDFIEKSSSNSSSLVQTLISTHNPSIINKLKISNVLAFSGNKAISLSETPVKLVDYLRKRPNFDILKLLFAKKVILVEGTTEEMLINTFLAKNETTLNDVDVIPIGQRGYTTFLDIWLALNKDNPNKKIGVIRDYDNSDLAKAKHEAYDTAYANIIVRTTTNYTLEIDLVNTENNLDLLRNLFKITGDSNAVSDHMIKGKAARMLDVCDAMLDKENPLDIKLPFHIAEVIEAIS

SEQ ID NO: 64119 - protein, 457 aa, Salmonella enterica
  subsp. houtenae serovar 16:z4,z32:-- str. RKS3027
MIEVQIAGAGAGKTFGLAESLIAHMKSCSSHKKIFALTYTNTATSKIEEEVIKQHGFIPHNLCIQTVHSFLLNEIVYPFSSYTLGDVYNNTTIMPVGNPKYKAILFKRLREKNVIHAENVYNISKQIVDEKISKHNTIAKKKKVKRLLSILGNCFEKIFIDEVQDLDSDALRFFEVLGCNDIDIYMIGDPKQAIKYPNALDTFVCKLASVEYAKILNINNISRRVPNEILAISNEFCFQGQRQISSSTAVGELFYLESTDMKYNQYIRNYIESKQIVCIDKKNGKYSTSSKQRYSFPYEIEEMIRESNHKKDEKLVMKAAFSDFIETFFELGTKKAISNLINQYSLKLEKKYFAQLYELCDKCAENDVKFKVSSIESVKGLDSDICVMILTTNTLKYFLRMDLKKDEYFNKEWKKVYVALTRAKQRLILALDHELLSGIDIEKLKIQLEKLGFEKHK

SEQ ID NO: 64120 - protein, 380 aa, Meiothermus ruber DSM 1279; identical to SEQ ID NO: 62682

SEQ ID NO: 64121 - protein, 809 aa, Meiothermus ruber DSM 1279; identical to SEQ ID NO: 62683

SEQ ID NO: 64122 - protein, 719 aa, Corynebacterium crenatum MT
MVESIHFRTRVELWQEQTMRVSAIYIDGYRRFKEQNIKFENEVTVLAGANNSGKTSLIDLLRVVLGGEGSLHAEDFSASDRYQWFMALVEAAIKGEEEFSDFVEHKNLLEKAPSIDVRLEVTYDPVADDIRQFADYLMDLDSAKSSFYFQFRFSVRVDRLIAACNDLYTDIEKTIADCGWTSASEINPGSSEFLVLQAKIDASLVDCSRPEVFFADENYTNILPMGTHKNLKHLFNFRAVKASRALDDINEDKSGGLNQRLIEVVKEDENWLQLLSQFPDQVVSAIHGLKIREATTDEALKSLNTVIESISSTNGSKQHDLFLDFHVTEDHAVQMIARAMQTRYLGEGVPLGEASQGLGYSNLIYLHLEAESFIRSTAQEENCYLVNLLVLEEPESHMHPQMQNAFIKHLLSRVREVGGLQVAVTTHSSEIVKSSGIEQLRVLKSEDDGCRIVDLRDFHTAEVARKSTETQRLFNFLYAINFSDLLFADKVIMYEGDTERMYIQALIRELPELSGLRSQYISYVQVGGAYAHVYKPLIVDELRLKTVIITDLDYDKASTISSVEDLKLLHSTNTTLNAFFKKKDSEADPANAKALTIGNLMEKVASTPGLAFIPGTELAAVAFQSEPEGYARTLEEAILAVQLGTDVWSSRTQEDWKNYRKISELKFSIPREPESPTIRQIVLSTSNQKTDFMYSLLLNSELLKTVPPYILSALRWLDS

SEQ ID NO: 64123 - protein, 637 aa, Corynebacterium crenatum MT; identical to SEQ ID NO: 63255

SEQ ID NO: 64124 - protein, 645 aa, Bacteroides salyersiae WAL 10018 = DSM 18765 = JCM 12988
MYLSALKLWNFRKYCEGPNGEPGLMVNFHEGVNVLIGENDSGKTAIVDAIRYALKTQSGEFIQFDDKDFYQDVNGNRKEEFKIECVFDGLNEQDSGLFWEWLSWNDDKTRYLLKVWLYAKRKDNVIMPSFTAGIEGQADRIDSEARELLKVVYFKPLRDALTDMTHGYKSRLAQILGAHELFKTQKDAEGNSTKHKLETDYENLKREIENYFKDGGNGSIITGDINKFLKKHFLLNGDPRNAQIKLTGGELTDILRLLDLIMEGNKSGLGTLNLLCIAAEMLLFNNQKKGLKLAIVEELEAHLHPQYQLRLIDYISSQQNNEQFILSTHSITLASKIRLENLIILKDKEAYPMSADYTMMDPADYNFLERFLDAIKANLFFAKGLIMVEGDAENLLIPAIAELMDRHLHKHGVSIVNVGSTAYKRYVNIFKRKDEKTFDIPIAVISDLDVKALEYYDDNSKDRKIPKYWLKDTVLTELKAITEEVDYEAMANVYRSLTVFEKEVRSNKTENFVPIGETIERLKAVLTDDKKTKLDEAMLSTIREDRIKRLKSEINKGKTKIYLPKDWTLEYEIAGSGLYRLLVTATRAAKIETDNPDLEMTDETLLELWSKVKEDYPDGHVPTREDIYRIFAPLNEGVVSKAITA

SEQ ID NO: 64125 - protein, 717 aa, Bacteroides salyersiae WAL 10018 = DSM 18765 = JCM 12988
MSFATDDEIRIAHDILLKEKKPFDNPRVEIIKKDSSCYVQACPGSGKTTSLLAKLIILANKLPLADGRGVCVLTHTNVAIDEIKAKVGPKAEVLFSYPNFFGTIQTFLHKYIAGAALHYFYGSQIQYVDNDIAMAVLLKKYSSLPFENKLKGLVFARMAAKKHRLGEEEINAWGGVDLLKAANVIKQKGKRVIWYDFQLSGHVYANIPRNIVQQIRAKKKEILDNEWKDIILSFKVDWLNNQIIADQRPIGFSSESGAEYLKLKEEMFQDGILSFEDAYDLAFRYIREKGLDFCRFSDKRFKYLFIDEVQDCDKQQVKLIKSLFADDKVIVQRFGDYCQAIYDGDGSDGSDNTELRDENVLYIRNSNRFGEKIARPLRFLCMEDNHLLVGNEDVYSVKPVILTYEDPLTVLPKYAELLRTTTIPEMDNISVLNLADKEKNEDPLHRVNIKACGWVGKKGANEQKIYIESYYPSFEKKNVKTRGEGDSFDDFLYKSPQGTVKDCASSIIQGVIEFLDLCDVNNDTKRYTRTSLLGYLTLIDAKDKEEFLSKVMNWAMLAATGNNAEERQHLKEDIYQYLSGTLLPLFGKNEVTVVANTFFNAVADGNQGGQNLEHGNIYKEDDMEIEIATVHAVKAETHAATLYLETFFNKYYESERLKEQFKGIAYMGTDDDTLKSLRVVYVGMSRPRYLLCVAIQKDRFHTIDCQELRDIWDVVEA

SEQ ID NO: 64126 - protein, 593 aa, Bacteroides massiliensis; identical to SEQ ID NO: 62880
  B84634 = Timone 84634 = DSM 17679 = JCM 13223

SEQ ID NO: 64127 - protein, 593 aa, Bacteroides massiliensis; identical to SEQ ID NO: 62881
  B84634 = Timone 84634 = DSM 17679 = JCM 13223

SEQ ID NO: 64128 - protein, 678 aa, Bacteroides sp. HPS0048
MYISKVKIANYKGFEKAEVELKDGLNVILGHNNGGKSTLLDAISLVLNSERNRKLSVWDFYQGISLDTLKDKAPSVEISLYFSMSDAEENISSDAALFSSYAISLEPKLVACMTYVFFLPNTEIESYKEYVANASNTIEIMKMIESKFIRKYTYSIYGGKPALHQQVTSEDLRKIDFQKVDALRNVESELFSGRAELLHDVLSYFLDYNIKSSDKTEGEIKNEIKVKRDSFQLETQKNIDSLIERIKDGKNEIIKYANKTGALYNESDLLFDGSVTEEQLLRVLNILVSTSVGFNIPIFNNGLGYNNLIYISLLLAKMQSNKEISYMGTTNAKAFSVLSIEEPEAHLHPELQYQFLDFLRQNIADKKVKQVFITSHSPSLTAKVKLDELCCLFKDHRHKVNAYYPRKIYASEPKSKKFVQRYLDATRADMLFAGKILFVEGLAEQILIPVFVNLLGYNQDWLSQQAIVINIAGRYFDHFLKMYDGTNENTLPIRVACITDRDPARKRKANGSEKESYLSCWPIEYNALPIEYDYKNHSEEFVAKYANHPNIRFFSQDEHGKTLEYDIARMNYTNQNILTDSVANKQELKNMMSASTFDRLKSECKSAKLIDIYSDNATWEESDKLKGLIAARYLDSIKKGENALELANALMDLSNEEKENFNVPTYIKDAILWLLKKE

SEQ ID NO: 64129 - protein, 572 aa, Bacteroides sp. HPS0048
MATKERIIHSDDVQDINHCNRVLAGPGAGKTYWITGQIRQILNSGKLGSTSKIACITYTNKAAQSIEERVGNGGKELEVSTIHAFLYAHVIKPYFHLISETEYFAIEKLDGHDDDIAIGHSSLVEIVPKSMKYFAMSFTDYSSLKRYIEKYHWHLDKTEIQLKSAANNKSPLRGFGAKEVKSYKQYVWKEYGLMHHDDILYFTFKLVQTYPLIIDYLVAKFPFVLIDEYQDTNSIQHYIFQCIANAGAKVTIIGDKAQSIYRFAGSDINNIASFIVPDLQCFKIEDNRRSTQSILDVLNIMREDLNQQSLLKDDFGKPMIMVGEAKDNYIKAKQLCSQEDLVSLSWSNTTANSLKLNLAISGADGLLNELVDSSSGTDRAKFVFYCLMAVENAKMMLMKDAMTFIFKAFHLDKNNINNKERAFKLLLYILNNESEYRQTSLADFYKLVNSLRETPLPKITRGAAADLFSNAYLSFAKEIRNKDEESMHLTIHKAKGLEYNNVFLVFDETKSALDFLLKTDLNKVQDDHRLYYVACSRAKHRLFLSIPNLNEGESELIGNKYNENLIIYANCI

SEQ ID NO: 64130 - protein, 660 aa, Sphingobium japonicum BiD32
MRIESVTLSGFRCFSPDPITVPISSEITAVVGPNAAGKTALLHALSKLFGVSRAQRTVQRSDFHLSADNHPDDREPKDLFIDVLIGLPELADGTATPETIAPSFRHMQIEREGKSPVCRLRLVARWEDDGTVEGEVSQELFWVDTLDDDPTEDKCHPVSAADRGLIQLYYTPASRDAAAQIRATTGALAARLLRAIEWSSETEEAVQKATENLATAFESESAIAAIGKAVQARWSGLHDDVVDTKPRLSLVSRRFEDVVNKIAVIFEQGPDGQERGLDALSDGQQSLFYFALAAAVFDLEREVVAGTVEGFRDDTLRIPALTIFAVEEPENHLSPYFLARIIRQVRSLTDAGGAQAIVTSHSPAVLSRVNPREVRYCRCDPETRISSVKTIKMPAGVDEAAKFVRGAVLAYPELYFARFVLLVEGDSERIVLPPLAEALDLLIDPAFVAIVPLGGRHVQHFWRLLKHLGIPHATLLDLDLGREGGGFGRVKTAIENLIEFGVPKAKLLEIEGGLLSDERLSTMHTWQDVEDRKILKGWLDRLKLHGVYFSAPLDLDLAMLEAFPEAYEAIIPKGGGPKMTADKAAEVVLGTAGPGLTLYTGAFKDYPDLLPAYRYHFLTHSKPATHLAALSHIKPKALREDMPSVLAEVLKHIAKSLRRD

SEQ ID NO: 64131 - protein, 634 aa, Sphingobium japonicum BiD32
MAVLSRRVRPDDWKPVGVDALEANALKVVRSADNRSVIAGPGAGKTELLAQRAAYLLQTGTAPPPGRILAISFKRDAATNLAARVRQRCHRIHAGRFDSMTFDAFAKGLIDRFGQALPELWRPTPDYEIMFPNDRDYRDFLQQQLGAPPTSVGIYADIQAITVKAFERRHLVGLPLPLEGWPNPTPCQWAADRYWQTSLRSGKTSGLSFPMIGRLVELLLRVNPMARDALRLTYSHLFMDEFQDTTQIQYDLVRTIFLGTDTVITAVGDNKQQIMRWAMAMDDPFTAFDADFAAKRTPLYNNYRSSPELVRIQHVLAQALDARAVAPVSKTVGTIAGDSCAIWDFSTPEVEADRLAAFVAAEMKTQKLGPRDFVLLVRQKAVDYAAVLEPAFAAAGIPLRNEAGTVGTVMLQELLAEEASELVVAILHLAMTKRAGRYWTDCQEALAALRGVAPDEEAAQTKLARELDAYVIKLSAAHPNPPKTKAIAQSIVDDILAFIGRERLIAVHPAYGQGSWLEKVLDAVAVHLLVSSADGIDWSSALDAYEGIHAIPLMTIHKSKGLEYHSVIFVGLDDGAWWSFSNDQVEATAGFFVAFTRAKQRVVFTYCARRGSRTKIATLYELLSKAGVQSVRVA

SEQ ID NO: 64132 - protein, 699 aa, Streptococcus pneumoniae 1488
MKLTKMVINNFKSFGECQAINFNNQTVLIGNNSSGKTTVLQALSKLFSDKQSDRIIRKSDFHLPKGLRPGENTRNLFIETIFEFDELDGTVYGPAIPTFFEHFTVSQDGAKPFLRIRLESSWEDDGTVEGSIDTQIYYISSDEDTIRDEDKHRAPRKDLDKIRVLYVPASRTPEKELGNASGSMLSRLVNSINWTEDEIKEIKDKIDELNNTFLSENGALTQINNEIQKSWELYHEDNRFSQAELIINSSEMAAALRQIALKFSPTTTEEAFTVSDLGDGLRSIFYFSLVDSILDIELEITKDREENPDNPRFKLVPPILTILAIEEPENHIAPHHIGKLIKRFKQLGNNDNSQLILTSHSPVIVKRIDPEDLRYLRIENNDSVLQTIVSDIQLPQSNDESYKYIKGAIQAYPELYFAKLVVLGEGDSEELLLPKFFDLLGLEIDSSQISVVPLGGRHVNYFWKLLNALRIPHITLLDFDNERYGGGWGRIQYAIKQLILNGVAKEKLVTVTAESQKSRVLDDDEIDKIKDWKIDRPDNQLLEGWIKMLEKFNVFFSAPLDIDFLMLQYYKEHYLETLSTNEGPVVSYTDENSDNKKIKLTKMDRTNDYQLIGFKNRISEAIQATLKDKSGPGDSFTEEEKELMIWYQYFFLGRGKPTTHMQFLSSISDDELTRNLPPVFKKIVNRAEELLGDIEHGKE

SEQ ID NO: 64133 - protein, 605 aa, Streptococcus pneumoniae 1488
MVKSEEWFPKGDIILEETALGAVKDVTNCLVIAGPGAGKTELLAQKLDYLFSTNKCVSPKKILALSFKTDAASNLKERVKKRYGDEYASRFTSLTYSAFEKRILDQFRDVLPEDIRPSRDYLIEDWDTIKELLSMNGINVNGRRMSDIRNFVENIILNDGNTHKFKKNLLKGTQDNKPVLLYSQITKLSTQIIATNEYIRKALQLTYDFVFLDEFQDTTYAQYSLLKTCFLGSSCKLTAVGDDKQAIMRWAGAKPDIFPDYIRDFNSNEYQLLMNHRSVPKLVEFQKEVHQILNSNHSSIQTNNYPEFQEGEITLFEFENESLEAKLIANDIESKIQGGIRPSEICILAKQKVGIYSFELISILNGKGIKARIENEYQDILKDPTCNLLLDLISCSQGKRDPLIWENISNFYGNINGIDELTDELILAKSYKEIDNIVSDITYLISNPIPDKDRMLNLINCIIEKIGDKRIISNFPMYNGKNDLLITINKFSKLLYEEYSQSQGAWIDIISNFKGENSISIMTIHKSKGLEYEAVYFLGLEDSAFWSFNDQPEEDKSAFFVALSRAKSHLIFTYCKLRNNSPQNNRNINEIYSLLTQSNLVDVIN

SEQ ID NO: 64134 - protein, 585 aa, Streptococcus pneumoniae 3051
MEFKKLVIENFRNFSSIEVALSNKNVIFGMNDSGKTNLLFAIRYLLDRTIRNKGFIKSDYYRHDTSRPIKIQLELDLSDRKMEGDEESLKSSHSRLLISTVAGARNNSSLDTFFISLEAVYNEKELFGNPVLSWGSTLDNLVEVPQYGTRSDIDKIFQIVYVNPAIELDSFFKRNRRILFSDDSKTDEDVKLEEEIENNIEKLNENISNLHLITSVQSQLTEAYKSYRKENLEIKIQSEISISGYLDNLTPYINWNDDTHNYPTSGDGRKKLLSYAINHLISEKQYNKKVIIYLIEEPENSLHRSVQISLSKQLFVQNIYEYFFLTTHSAEVLYEMDNTQLIKITNQQDATGQSVYYTVPNEFSNLKKKLNKSLAQSIFYDRILLVEGPSEYYLFSAIFEYVSPNFEADGKYLLQVDGINFKPYSELYKALGIDFWIKTDNDLKASRGDKHVFSPIGLNRCIDLLDHSATPILDNYRIDFSSKDERKQNIKSKKEELYLTNHNLVLQLNADGIFISEIDLENDLAQVLSDSERNEMSKLDFVNWLQSSKQYNMLEYISNHLTKEIALKIVESGYFKVLAEFLDYE

SEQ ID NO: 64135 - protein, 512 aa, Streptococcus pneumoniae 3051; identical to SEQ ID NO: 62977

SEQ ID NO: 64136 - protein, 583 aa, Xenorhabdus nematophila F1
MYLGKLKISRFRSCDDVTVSLRPDLTVLVGENNGGKSNVVDAIRLLTLPLSGRRERYPEDEDVRRYSTVPSFQIEGAFQGLSDTLKGLLISAVPDPTKSEATFGYRYESRSEHAPRGKTTVWAGRFDTNGPELGSSELIRHVYLPPLRDAHQVLGTSSGTRVMALLRNFLPKEREQDFLAGVRRADNRPEILTTINTDISAALGLLTNGVRPQIAALDFGSETLLDVARDLRFRMADTGLIPEDIRSSGLGYSNLLYMATVVVELNKAKEADLTIFLVEEPEAHLHPQLQVLVLEFLLDQARQSASRIIEPGKPEGRIQIVVTTHSPNLTAWVSPRHLVVMRSRHREQDGKAISESVSVPIAEIGLKPKTLDKISRYLDVTRSALLFGNRAILVEGIAEALLLPVLAQKLVLADDLDGWLRFKGAVIVPIEGVDFRPYVEVLLRPYGDARIADRLIVITDADPTVLGNRKVDLENLAATHGAPDALIVLTNQHTLEHEIFGAGNESFLKSVFLRLHRNSRRDWEAQIESIPEQDRPNAFLKLIETKKTRKGDLAQAMASRIEAGEPFVVPPYLIDAIRGASRI

SEQ ID NO: 64137 - protein, 591 aa, Xenorhabdus nematophila F1
MTGIYNLTPEQENFASHVGGAFVNACPGAGKTRTIIARLARIAATLPSRQGIAILSFTNSAVDEFRERCLAAGLDTLLKYPSFMGTLDAFVRHFVVLPSCAISSQTRPIILDSWDTLGVEIRLSGQFAFRGQPVSLDLFDPETNVIDPDKIRHAGLQNHVRQHQNRYQQVAANRRRSLLQAGYMSAGDARAQTLRLIRDNVIGESLARALAARFQEVMVDEGQDCNPLDLQILTWLRAHGVNVTFVCDPDQAIYEFRNGNPQGIQLFKDTYPIAAQKGLTGNFRSSPAICQLAATLRREGQVDRSLGESAGVDYPILLLTYGGRGPTAIIGQAFLRRIRELGLESTKAIILAHSGKVALQAAGVTSSISTGNSRIESLARKVSEFWSPAATPRTKENVIQSVEILLLDLMGVRQRNEHLVKVIERLGLDRRAHRRCALSFLINLPKTCRDSDEERLAWIACVHAEIEKLHLPLPAGVSLRRFFQQPPDAQWSKHLEVPAALSFACGNIHEVKGREYDAVCVVVPPNRAPENRIEALFESWQARVDAEAKRVLYVGLTRARNFVALAIPNAFAGRCVDLLATGQVPYTRVDL

SEQ ID NO: 64138 - protein, 565 aa, Xenorhabdus nematophila F1
MEISSLYLKGFRNFEDALINFNSNTLVIGANDVGKSNMLHALRILLDKSLSEADIEPSKLDFHIDKDNVIEQLEITITFKDVTEDAVLSVLKGNVSDDGTTIIKYIAQKYDLSYKIFVGHSVEELQEVSSRFYLKYMNLKYIQSQRDLERFINKEKKQLLRIAQQLLKEADVKADETLLAEIGSDLTRLNGKISQLKYVNSATDNVNNELNKLAHHYTEYEVQLDTGAIEVNDFIDKLQLGAVTNGSKVMLGGDGRNNQILLALWKAKSIIEHDTDHEVVFYVIEEPEAHLHPHQQRKLANYLIDELPGQTIISSHSPQIAVNFKPDSIIRLLLKNRATAAASNGCSNYIAEDWEGMSYRMSILPAEVFFSNGVFLVEGPSEILFYNELAEQLHIDLDHKNLSILSVDGIAFNIYVEIMNTLEIPWVMRTDNDISKIRDQNQWQFAGINRCLKLVGCEAFLHSDRKIEPQETVDNGNWEDVSERINSKGIFLSKIDLESDLVSELSAEILTVLNKRSEADAVEYLQKKKALHMRELLKDIKHKLYQLDTGELAKPLHKLVEISKA

SEQ ID NO: 64139 - protein, 539 aa, Xenorhabdus nematophila F1
MNTFTPTLQQKAAINYDGSMVITACPGSGKTTIMKEKIRKIIPELPNHKGVIAITFTKKASQELEKKCKHHAHDTKHSFFGTIDSFCLKELILPFISRVWGSNPTKCKIVKRLQNPYKFFLKEEYTSLTIENILNDEGFKRLYNEGFFWMNSFAAIALHILNESAAAKRYIKAKYSHVFIDEYQDSSESQHQLFLKLFELGLTATAVGDAWQSIYEFRGGNPKLLNSLIEDNNNFKHFEIDINHRCHPTIVNYASRLLDPNFSLLPYDENDLRVFRCTLNGNLANVGQTISNWVLSWLKQGQVEKASDIAILAKKENSLKLLTSGVIINYRLYTDNPLDQIGSDCSELYSDLLAFRLGAISTIQDVINKQFDLISSEAASIAELRKMIRALRDNQSIDEFISKLHILASIINITETQESDLAIRTIMDDQVLIKQFMPLVDNEIQVMTLHKSKGLEFKFVLHIDLEEWSFPHRIRGLNWDDVHYPSLAQDTNLHYVGITRAENLCVLIRANLRQNKQCKFSPSIPSYFLRLPQLEGLYK

SEQ ID NO: 64140 - protein, 729 aa, Enterococcus faecium EnGen0006; identical to SEQ ID NO: 62500

SEQ ID NO: 64141 - protein, 597 aa, Enterococcus faecium EnGen0006; identical to SEQ ID NO: 62501

SEQ ID NO: 64142 - protein, 729 aa, Enterococcus faecalis EnGen0062; identical to SEQ ID NO: 62500

SEQ ID NO: 64143 - protein, 597 aa, Enterococcus faecalis EnGen0062; identical to SEQ ID NO: 62501

SEQ ID NO: 64144 - protein, 581 aa, Enterococcus faecalis EnGen0332
MKLSRLMIENFRNFEDVAINLSNKNVVFGMNDVGKTNLLCSLRCLLDRKIRSDGFSESDYYHRDTSNVIKISLEVDLTDRQTDRDSQHIISKVGGSRDSSELNRFYFQVIGTFDHSEALGVPELFWGNNLDSMHKIPQNGSFSDIDRLFNIIYVDPTIDLDYVFSKNRKKLFDQKKLTNEDIVISQEISDLTFEMNRKISSMEVMRNFQKELTDEYHQLKKEDITIELQSEMAIKGFFSDIHPYIKREGDNALYPTSGDGRKKILAYSLLNYLTKEYDSDRITIYLIEEPENSLHRSMQVALSKQLFDYSVYGYFILSTHSSELLYEMDEASLVRIYSQNKTDCKSYMYNVPEQFKSIKKELNESLTTALFSDRVLLIEGPSEKALFEKILSIVSPIYELEGGYLLLVDGIKFKPYFDILKELEILPIIKTDNDLKAKRGDIKSFDTIGFNRCLNIIGKKNLEAITIDYSSKDENGKLIWLISDKERMVFDKKRELYEFNGACIREFEKNNIFISKVDLENDLFEVIPEKLTNVFGDNPVDTLQDKKLLNMLKLIDNLNDEECYKIFNHDRFKALKRLVES

SEQ ID NO: 64145 - protein, 515 aa, Enterococcus faecalis EnGen0332; identical to SEQ ID NO: 62875

SEQ ID NO: 64146 - protein, 581 aa, Enterococcus faecalis EnGen0341; identical to SEQ ID NO: 64144

SEQ ID NO: 64147 - protein, 515 aa, Enterococcus faecalis EnGen0341; identical to SEQ ID NO: 62875

SEQ ID NO: 64148 - protein, 581 aa, Enterococcus faecalis EnGen0366; identical to SEQ ID NO: 64144

SEQ ID NO: 64149 - protein, 515 aa, Enterococcus faecalis EnGen0366; identical to SEQ ID NO: 62875

SEQ ID NO: 64150 - protein, 581 aa, Enterococcus faecalis EnGen0344; identical to SEQ ID NO: 64144

SEQ ID NO: 64151 - protein, 515 aa, Enterococcus faecalis EnGen0344; identical to SEQ ID NO: 62875

SEQ ID NO: 64152 - protein, 581 aa, Enterococcus faecalis EnGen0361; identical to SEQ ID NO: 64144

SEQ ID NO: 64153 - protein, 515 aa, Enterococcus faecalis EnGen0361; identical to SEQ ID NO: 62875

SEQ ID NO: 64154 - protein, 618 aa, Enterococcus faecalis EnGen0350
MDINIKELRIRNYKCYESIDLDLKDSNLLLGVNNVGKTSLLEALELCFTPYKRISEEIVFVKKNEILSKDKSIILDILIESKEREFTDDWFDLFGVLIFDEDEKQYVGIRTTIKYNPVNGEYQIERKGMNSWPSSDEVETFDNFATDRITKSIIEAFPVFYLDAKRDIASEMNDKYSYFGRLVKDIKLSEENLTEMERHLNEINDNIVENSEVLKHLSVSLNEISQVLDSGESSIQINPVSRKIKDLNQGMEIRFMDKKSESFSITNQGMGTRSWATFLTLSAYIKWKTKEMADKESAFHPILLLEEPEAHLHPQAQRKIYSQMNKLDGQKVISTHSPIIASQANIEEIIHVYKKDDQSKTNNILFQELKRDEIRKIKEEVFKTRGDVLFADVLILCEGETEDQVLPQFFKDFFGCDPFELGVNIVSVGGFGKYKPFIRVAKDLDIELFILSDGEKDVIKKVKKAYREVFSDVTNEDLIKRIKFLPNESDLESYLLDCGYQNELLNVIDQIEGTEGYLNHFIAVKDGTEKKRVKTEKICPTCEQNIFEAPIRVYSGDKGYQEAILDYLESKKTEYSSMIGCEILKRNDKTKIPEIIREMFYEISNVKNLAITPLYLER

SEQ ID NO: 64155 - protein, 606 aa, Enterococcus faecalis EnGen0350; identical to SEQ ID NO: 63187

SEQ ID NO: 64156 - protein, 581 aa, Enterococcus faecalis EnGen0356; identical to SEQ ID NO: 64144

SEQ ID NO: 64157 - protein, 515 aa, Enterococcus faecalis EnGen0356; identical to SEQ ID NO: 62875

SEQ ID NO: 64158 - protein, 581 aa, Enterococcus faecalis EnGen0358; identical to SEQ ID NO: 64144

SEQ ID NO: 64159 - protein, 515 aa, Enterococcus faecalis EnGen0358
MEIVDEQVRKDILAASGNIIVSASAGSGKTTIMVNKILKKMSEISDHKTVATITFTVKATEEIKRKSKQIGGNNKFVVMTNDSFVEYEIIRPFLIDAFGEMYNNDFVISYEDSVKSGSFDEGLNILEKSNKLGTYHNIKRNFKFELAKKVLEQSTAAQEYFKSKYTMIFLDEYQDSDTDMHNLFMYIKNVLLIDLFIVGDGKQAIYLWRGAQRNIFNQLENEGMQRFELVTNFRSHFEIVNYANLMHNASQFRDDYSKEVTHVVHCRTNDYVSSINELCESNIVDKNKNITIIANINNDAKDISDNLNAQGFNFVFIPKTPLDDGSENANVLKVIACYLLDDNYSVFDIAEVLRVEQNRTLLNKIDSLLKPLKKLVPLSSNQTKDDISISFFESITKFNNYLGMNITNDEKVLLLDSVTNKYFYPAFIKSNDLHKVMTVFGSKGLEFNQVISFANYYSFNDESKKNNHYVCVTRAEEKFVMMEGEFGKYSEQIGRKLIERGIDSESTTFKLIDHI

SEQ ID NO: 64160 - protein, 694 aa, Enterococcus faecalis EnGen0368
MKIKTIEISGFRQISNATFNLEDRLTFLAGANNSGKTSLVELLNCVFNFGTEKLSGEDFSVVNTQQWVNDVYPQILNYFQEDTQKENIISNIHNLIFPNTDEKNEVIIEPIKLKFQIDYDVTNDDIRNFADYIMDLDPSSSSFYFVYEYNVDNSLFRKNLINHYDKLEHRIRKILSDPENNNDKNIKKIILKVYFESLSETIRFTDSNFENGGKIDRKDFIKLFNFQKIMAGRTLDDTSTDRSKILSKNIVDIASEAENWGKTIESLPDTILEAIENENIEQIIKSTSIDSLKETMSSILMTNGGQTNEIIINMDITEDSLKSLLKNITSAQYMLDDHYLNESSQGLGYSNLIYMHLQLEKFNKTIDPLLVNLFVIEEPESHMHPQMQYVFSQYLLTYFASKPELQGFITTHSHEVVRGAKLSQLRVLRKVNSFKCSLYDLRSFHNNLEGMPELLDFYNYFYAISFPDIIFADKVILYEGDTERMLINSLLKADQTPFPKLKSQYLSFVQVGGAYAVNYEPILKYLDIKSLIITDIDYGKECNTKNEIEVSRSTNDSINKLLNMKVKTENTKTIKEIYSCREDNEPYVLIGDNICLTFQGEKDGYTRTLEEAMLCKLYDVKVFDTSTKEQWKDKRNRDKLKYSIPNTDDLIGVRHIVNSTSKNKTDFMYSAVLNNKLMDTLPYYIEEGLKWLEK

SEQ ID NO: 64161 - protein, 650 aa, Enterococcus faecalis EnGen0368
MVRKIENFFIVNAPAGSGKTTTIREMINNIISINSKDNVLCITYTNRAADELSKSFSSPNISISTIHSFLNNFMKQYFGSQEIIDLYFDTYQDSIQQRIDNREAKENQTESNKKYIEKYGDLSIDVLRRNITNIYYNENSFSSLYYGGLGHDDLISFSSKIILKYKVIQNRLSYKFQYVFIDEYQDTTADVLNIFYESLNEKRTILYLFGDKMQQIYKNYDGSFEPKFLKFDSSKALTTNYRSIPKIITLLNNIYNDSSFVQNVSEDMNKIAPNFDPRVIICNDVDEKLTQILDEYPNSLTLFLSNQSRFQKIGCPSLYSTFSKMDRYSFSKKYGVVDVLTDNTKDNPDSLIRLIFSVAFINNNYASNNYGVIVQKIKDEQSTIGLKDWKLSSHQDKVTLNAILEELALIVSSSKKSIKDVLIFLKEKIPQSAVTLSEIMEDESYSDALDVPIEEVIKLYNYLEYPKVSTQHGVKGESHDEVIFVADDSYNPHVSMYNFFDIWSDTELSLTSLEEFYYQYSFELTKITEKVGMKINNLKRDSFTAHEDYLKGAASSIMTMFQENDLFNKLCFLEYQTFISNPNVTNAKKCFKESQVYGILSAYKLFYVGCSRARKDITVLLDSNKIKGNMDLQIQKFEQLGFKVHNESLI

SEQ ID NO: 64162 - protein, 581 aa, Enterococcus faecalis EnGen0367
MKLNRLMIENFRNFEEVSINLSNKNVVFGMNDVGKTNLLCSLRYLLDRKIRSDGFYESDYFHRDTSNAIKISLEVDLTDRQTDRDSQHIISKVGGSRDSSELNRFYFQVTGTFDHSEALGVPELFWGNNLDSMHKIPQNGSFSDIDRLFNIIYVDPTIDLDYVFSKNRKKLFNQKKLTSEDIDISQEISDLTFEMNRKISSMAVMQNFQKELTDEYHHLKKEDITIELQSEMAIKGFFSDIHPYIKREGDNALYPTSGDGRKKILAYSLLNYLTKEYDSDRITIYLIEEPENSLHRSMQVALSKQLFDYSVYDYFILSTHSSELLYEMDDASLVRIYSQNKTNCKSSMYNVPEQFKSIKKELNESLTTALFSDRVLLIEGPSEKALFEKILSIVSPIYELEGGYLLLVDGIKFKPYFDILKELEILPIIKTDNDLKAKRGNITSFDTIGFNRCLNIIDRENLEAITIDYSSKDENGKLVWIISDKERMVLDKKRELYEYNGDCIKEFEKNNIFISKVDLENDLFEVIPEKLENIFGENPVDTLQDKKLLNMLKLIDNLNDDECHKIFNHDRFKALKRLVEN

SEQ ID NO: 64163 - protein, 515 aa, Enterococcus faecalis EnGen0367
MEIVDEQIRKDILAASGNIIVSASAGSGKTTIMVKKILKKLNEISDHKTVAAITFTIKATEEIKKKSEQIDGNNKFVVMTNDSFIEYEIIRPFLKDAFGEMYNNDFVISYEHSVKSSSFDGCLNTLEKSNKLGTYHNIRRNFKFELAKKVLERSTAAQEYFKSKYAMIFLDEYQDSDIDMHNLFMYIKNVLLIDLFIVGDGKQAIYLWRGAQRDIFNQLENEGMQRFELVTNFRSHFEIVNYANLIHNYSQFRNDYPKEVTHVVHCRTNDYVSSINELCESNILDKNKNITIIANINRDAKEISDNLNARGFNFVFIPKTPLDDGSENANVLKVIACYLLDDNYSVFDIAEVLRVEQERTVLNKIDNLLKPLKKLVPLSSNQTKDDIKSSFFESITNFNNFFGTNITNDEQVLLLDTVTNKYFYPAFIKSNDLHKVMTVFGSKGLEFNQVISFAKYYNFSDESKKNNHYVCVTRAEEKFVMMEGELEKYSEQINSKLRELGIGSESTTFKLINHI

SEQ ID NO: 64164 - protein, 581 aa, Enterococcus faecalis EnGen0330; identical to SEQ ID NO: 64144

SEQ ID NO: 64165 - protein, 515 aa, Enterococcus faecalis EnGen0330; identical to SEQ ID NO: 62875

SEQ ID NO: 64166 - protein, 729 aa, Enterococcus faecium EnGen0261; identical to SEQ ID NO: 62500

SEQ ID NO: 64167 - protein, 597 aa, Enterococcus faecium EnGen0261; identical to SEQ ID NO: 62501

SEQ ID NO: 64168 - protein, 729 aa, Enterococcus faecium EnGen0262; identical to SEQ ID NO: 62500

SEQ ID NO: 64169 - protein, 548 aa, Enterococcus faecium EnGen0262
MTNIFEKIVNDLNLEQKDVVESEDNLYVNACPGSGKTRVLTRKIAYQAIKHDGSLKRIIAITYTNRAAEEIKERLSLLSIDDDINIWVGTIHQFCLEFIIYPFKMNLSRVSKGFTIIDDYTQRAYVSQINNMLNLNLKTYELNKIDLSLSHDFKINEVQYTQVSEMYHTMLEKNKEIDFDMILLVAYKILTVNSNVARNIASNIRAIYVDEFQDTRELQYNVIAKLLQNNPQIQSMFVGDIDQAIYGSLDGIAKSVEELEMLTSHTFQSKTLHGCYRSNQRLVDFYSNFQSCPYEIESRGNNKNDRGFISYDCKVTKEDLPNIIKNIIKEKIESGIHEKDICVLAPQHYPLFSLGEYLKKELPYCNFDAINISPIKVNNHSLFFKLAILYFTESGEKVRRRKLIANDILIILKNEFGIEVKDYFIDLDLLQLINSVKRMYSGDDNGVDLYKFVTKHIFVNLNIDEKNYPSIFKHYLFFINEVEDRIKNNSLSSSVSSFKKMFKSRDGITLTTAHKVKGNEYDTVIAINLLNGKIPHWNEIFSQVHNPV

SEQ ID NO: 64170 - protein, 729 aa, Enterococcus faecium EnGen0264; identical to SEQ ID NO: 62500

SEQ ID NO: 64171 - protein, 597 aa, Enterococcus faecium EnGen0264; identical to SEQ ID NO: 62501

SEQ ID NO: 64172 - protein, 720 aa, Enterococcus malodoratus ATCC 43197
MNLSKIQIVNFRNYSSTTFSFSASANTIIGENDSGKSNALTAIRMLLDDNFYYSVKSLNENDFNNSLDNFRGHWIIISAEFENISDEENDKEVIASLRKEISNTSFSEGNVCLIIRPNVKKRQELHDVSGDVFDFEDVRNSIRISDYEFIYRGKMTTDFTDPRIYKDIVGDFENFKSPDPKDKQDNEQYIGSKIDIKDINEHISVVFIDALRDVLRTVGSTSNPIKKIVEEIEDKISDTKFEDVKDKIKDLNESITDIDEIREIKRDINNKLVDILGLVYSPDLSLSSNISDDLTSLSRFLKLRPQNEEDMKSLGLGHLNMIFIALKIVEYNKCSFREVLNVMLIEEPEAHIHHHIQRTLFQNLGIKDKSTQVIMTTHSPNIAESSEISRMNIVKSFNNLSVAMNPNTELDIFGENNLNTKISLSKSIERYLDAKRSNLLFSKAVLLVEGDAEEILIPNLVKNSLGVSLDEIGVGVVNVGSTAFEYIASLFSNERIKRKCAIITDIDKQMVPKLIVGNKRQEDGTLKKELVNNKIYKAGAEAKGLERKDKLERIFNGNKWVSPFYAESTFEIELAKVNNGIFSSVLEKLYSKETTIKQWRDKLSCANDLFFLKKLVANSDQIKCNAVLSLADSTGKGWLATIIAQKVIESKEKYILPEYILDALAFVSLESVNEKVVEKMIIHNTDIKMGIKDFLGDKKWEDDCPCLYSFIEKWEAKRGV

SEQ ID NO: 64173 - protein, 589 aa, Enterococcus malodoratus ATCC 43197
MGNQFIDRILDTLSDCQKEVVLDCENNLFVTACPGSGKTRTLTRKIAYMSNLYPESMKKIVAITYTNRAANEIMSRLEKLNLNESHIWVGTIHQFCLDFILRKFGLNLERTARGIKIIDDYVTSRYLKEIYENRGMRYNPYEHPNLMVTTSGNYFEDDIEKKDLVAEYHKKLRRANEIDFDLILTLSLKILEENPIPTKIISNNIRSIFVDEYQDTNNAQYQILGLLAKNDKSIKFMFVGDSDQAIFTSLGGVVKSKKEIEEITGLNFSSKKLDGCYRSTQRIVNLYSQFQSEAYRISSLANYSEDYGVIQYDKETHKDNLSSRIADIIQNLINDGISENEICVIAPNQFILTPVAKELKKRLTNLNFRSQDVYPIKPDELNLFYKISFLVFTPIGEKMRLRKTIANEAINILKDDFDVSISIKFKALDFLDILNSAKSTESNGLIFLQEKIIYLFEILEIDKATHQDLYQAYEDFFTKAFNRINDTRLKLSTDIGDFRNIYKEKSGINISTIHKVKGEEYEVVIAFGFLQDIVPHFKSKNPESEAKKLLYVTMSRAKKRIYLFSEKGRQYGAYPQKTPTSLLESADIE

SEQ ID NO: 64174 - protein, 729 aa, Enterococcus villorum ATCC 700913; identical to SEQ ID NO: 62500

SEQ ID NO: 64175 - protein, 597 aa, Enterococcus villorum ATCC 700913; identical to SEQ ID NO: 62501

SEQ ID NO: 64176 - protein, 581 aa, Enterococcus faecalis EnGen0335; identical to SEQ ID NO: 64144

SEQ ID NO: 64177 - protein, 515 aa, Enterococcus faecalis EnGen0335; identical to SEQ ID NO: 62875

SEQ ID NO: 64178 - protein, 729 aa, Enterococcus faecium EnGen0166; identical to SEQ ID NO: 62500

SEQ ID NO: 64179 - protein, 597 aa, Enterococcus faecium EnGen0166; identical to SEQ ID NO: 62501

SEQ ID NO: 64180 - protein, 729 aa, Enterococcus faecium EnGen0167; identical to SEQ ID NO: 62500

SEQ ID NO: 64181 - protein, 597 aa, Enterococcus faecium EnGen0167; identical to SEQ ID NO: 62501

SEQ ID NO: 64182 - protein, 729 aa, Enterococcus faecium EnGen0178; identical to SEQ ID NO: 62500

SEQ ID NO: 64183 - protein, 597 aa, Enterococcus faecium EnGen0178; identical to SEQ ID NO: 62501

SEQ ID NO: 64184 - protein, 729 aa, Enterococcus faecium EnGen0258; identical to SEQ ID NO: 62500

SEQ ID NO: 64185 - protein, 597 aa, Enterococcus faecium EnGen0258; identical to SEQ ID NO: 62501

SEQ ID NO: 64186 - protein, 729 aa, Enterococcus faecium EnGen0260; identical to SEQ ID NO: 62500

SEQ ID NO: 64187 - protein, 597 aa, Enterococcus faecium EnGen0260; identical to SEQ ID NO: 62501

SEQ ID NO: 64188 - protein, 669 aa, Bacillus cereus HuA3-9
MLISELHVSNFRSFGYESQMIETENLTALIGANSSGKTSLIMALLRLFGQKNTDRTLMKTDFHIPESADVSKIKEIDLMIEAKIIFPELKLQSPANVKTIPEYIKHLIIEETGADPYLRIRLKGKWVKGSTPEGNIEQELVYVKTPYSHEEKEEDLTRVPIHHQKLIQMMYIPAMRDPAKQLKNASGTLLWRIFDGIDWPENLNEDIKSLTSPIETLFKEIPSIKGIQGILNNQWNKYHKDERYSNSQFKFNGNSLDEFLKNVDILFNPTVDGNSVKVDSLGDGLKSLFYITLVSTLLEIENKQEKDDKPLLNIFAIEEPENHISQHLLGRIVRNLKEISNKDNAQVILSSHNSSIVGKIEPEYIRHLQIQNSGSIVNNISLPEKIDDAHTYIKEAVKAYPDLYFSKLVILGEGDSEEIVLPKLLLADNIYLDDFNISIVPLGGRYVNHMWKLLNDLSIPHITLLDLDRERGGGDWGRIKYVLKQLNENNRCSEELRTVQAIKKGTEGTIRTYSMKEIEKFHTRNSEKVDSHNTWIKKLEKEDIFFSYPLDLDFSMLMSFEQEYKNTMINGPQIPKDIKSTEYEEKLEKSIQATLKNVKATAVTYSDDQKKLMIWYNSLFLGRGKPSTHIAALKDIGDSEIIKNAPKELLRLVQRVKEKVGLVGDGINE

SEQ ID NO: 64189 - protein, 641 aa, Bacillus cereus HuA3-9
MNDKVLEQDWKTSNDVTLEDSALLAIRASNHVAIAAGPGAGKTELLAHKAGYLIQTGICPNPKKILAISFKTDAARNLQERVELRYGKNVENRFESKTFDAFAKGILDQFIYALPKDYQPKKDYEIILNEKSLNDIIKGYITESTPYHPNWQYEYHINRVLGTMKETELPIVVFESDLYSWINERLWIVLLNGKGNLTSSLTFSMISILVEYLLKENPLIVKALQATYSHVFLDEFQDTTYNQYSLLKTIFLNSDTVITAVGDNKQRIMGWAGALQNAFGIFKSDFNATQHTLFNNFRSAPKLVSIQNIFSKTLNDTSMEVLPVGEWNENDGVCEIWNFKNHNTEAILLASYISEWMKAENLKPRDFCIIVKQQEHIYAAEIMKELSKINIRSRIEKDYQDLLSEELVLLIIRFLKLSYEEKSPELWMNVIDEIIDMKYRDVNPENIKYLIIEKELVKMLDEVRKLYSDIEVTNFNSQFTEILQEIVVFLGEDSIKATYPKYNQANYFEEVIQKMIDKLKYQNRISMRELLQEFCGEYSIPIMTIHKSKGLEYHTVIFIGVEDAAFWSFSTQKDADKNAFFVALSRARQKMIFTISKKRNILKFGEEKNIMQETENVSELIQTLMDAGVPLIEESDLGKIL

SEQ ID NO: 64190 - protein, 707 aa, Bacillus cereus HuA3-9
MYISELEVTNFRNFKNANFKFKPGVNTLIGENSSGKSNALYAIRLLLDDTLPINSSKFLESDFNQNIIDWKGHWIVLKLTFKDLDSSEAASFLAHHSEDVTAEESIGTYALYYRPNKAIRKSLFEFTQQSRPIEELDEILKSITVNDYETVFTCRVNADFNDEQMYKELVGDFEQGIFPNPEDDNTNILGNISPHITLIKKEVSCTFVKALRNVIAELKQRKSSPLLKLLRGTANDIEIEEADAIKKQIKTLNKNISELEEIDILTKKIKASLNRTLGYTYSPNVSVKSELPEEMETLLHSLTLWVGDDASSNQGKLDDLSLGGANLIYITLKLLEYEFYQDQEEKAAHFLLIEEPEAHIHTHVQKTLFDNYHFENTQVIITTHSTHISSASKIDSVNILIKESGFTKVCQPNNGLDADTCKRIERYLDATRSTLLFAKGVMLVEGDAELILIPAMFKAVFGLSLDEIGVSVINVSSTVFEHIACLFDEQRIHRKCAIVTDLDEAIETLPGNPEEDNNEQEKMRNSQTAGQIRSTLLDATYGINPWVEVFYAPHTFEIDFALNLNTYEIKESLPSIYKRQSDIDNSTKKLDSEDKTIVGKEALRLANKEGKGWFALLVSEKLSYETVIPEYILRAIAFTSKHIKDEHLIAMAKYRIKELYTDLQVDINTMTFDELIELLLPENDEEREDDLVKLIKLLGVELKEHVY

SEQ ID NO: 64191 - protein, 599 aa, Bacillus cereus HuA3-9
MYINLNPFQQAVIDEEENTLVIACPGSGKTRVLTLKIAKELENLKKRTNRIAALTFTNRAADEIDKRIHEMGIDSSKLWTGTIHSFCLQWIIKPYGGYLPELQKGFSILDEFKAQDLKSRFKDDFAISRYEDFITRRDRQGNYINAERNFNEAAETYHKYILENKLIDFDLILYFSYLLLGKYPKIANNLSRIFKYFFIDEFQDTQDLQYAIVGKIVWAAEGQCKIFFVGDPDQAIFKSLGGVVKSSTEISQEIGGYSIKKLGLNGNYRSTQRIINLYSNFQSTDLSIESLTNYCDEDGVISFDRTIHKEKLVEKITEIIQEQISDGVPPNEICVLAPQWNFLTSMARKLKSHLPDVAFDAPGLTILPRDRDNFWFKLARIILITKEPNKYLIRMKWAKEILEELVMLNSTIIHVEIESCRKFLKIINSINIPKEDAAEYLEEAFKYIFEKIGFDYSSSDLLIEQWKSFFNGLSRRYEHLDFSDIPKDINYMKKMFNTKKGVVINTCQGVKGEEFHTVIAFSLLRGYVPHWSQIINRPTSNEIEESNKLLYVICSRAKKNLFLFSESGRLTQSKQQYQVNNQLNRIVFEFNSLAPYRSE

SEQ ID NO: 64192 - protein, 692 aa, Bacillus cereus BAG2O-3
MYISNINIINYKNFRANSINFNDGINVIIGHNNAGKSNLLRALALIFNTNSKKHLSIDDFNKNIPLDELKVDPPSIKITATLQQEDCEELMSDDLVTISNWLTRLEEPYEAKLQYEFYLPTRFHEKYQSAVKEAEDIAEVWQLVQDEFLRLYTYKICGGNPINQVTADSESLKKFDFQFLDAIRDVERDMFSGKNTLLKNVLDFFMDYNIKSDGTLEKEQKEAEIKIKKKEFGESAGDLISLLNERMTEGKKHILSYAQDIGASYDKSTPNFDGSITDIELYSALKLIVEYETGIKMPIINNGLGYNNLIFMSLLLAKMQVDANEDYLGSNAKVYPMLVIEEPEAHLHPTMQRQLLNFLKKNLKNKKVRQIFVTTHSTHITGAVNLDELICIYKNGSETLIGYPGKTFGENKKSKKYVQRFLDATKSNMLFAEKIILVEGLAEQLLMYIFAEYSNVSLEDNHIAVINADGKYFDHFLHLFNTSNPNAIRRKVACITDRDPERKNLTPSEKTEKKSFKKCYPFEMYIEEKGYEYKRNEEKNSYPDNIKFFLQDENYGKTLEYDLIRFNPNFKGLVTESTANREEIFKLMDQYSEGKSVDIMLGNLNTSKENERIRQALEDKRLIWTDEDKKKAIIASRYLNSVGKGENALELAYVLEENLLNKKVSDQKENIEFKVFNVPDYIKLAIEWMCEE

SEQ ID NO: 64193 - protein, 581 aa, Bacillus cereus BAG2O-3
MISISSQDTIDIERHFKVTAGPGAGKTHWLINHIRNVLGHSDRLEKTRKIACITYTNVAVETILNRLGSQSINQVEVSTIHSFLYVHILKPYINHIAELFGIDFQKIKGHDKIEPRYSKVKLWLENHSQIEKLKHPYTINQLLNRPQNKDALFNWLSGLKYRFNSDQNLDLSGEESDARQLCKVVKILDIDLLNYKKLYWQEGKIDHDDVLYFSYELITRYPFILKVLRAKFPYFFIDEFQDTNPIQAKIISLLAEEETIVGVIGDPAQSIYSFQGASIEDYIKFKVDNLSEYTITENRRSSNQIIDLLNGIRTDIEQTKIRNVDCDRPILFVGNSIEAYNKIQDMFGKGIFIQTLSRDNPTANSMKFGVDNNNLNTKLLGELASKDTNIQRYSIIKNSMEALELAKHSDYKNAIKIMSANFNGYSEKEQFNKSVSMLQKLIQLKETFFEEPLMLFYQLIREAISMSGFRNGAIQDFYNTYSYKEIALCINYKEDISQHRTIHKSKGDEFQNVLLITDTIEFLTNANLAEDEEQRIYYVGISRAMDRLFIVTPKLLKANRVIIESKLNFQIIDLEKEPQLI

SEQ ID NO: 64194 - protein, 748 aa, Acinetobacter calcoaceticus ANC 3811
MKLVRADIRNFRKLKNCSLSFSSDQTILVGANNSGKTSAIKVLKLFLKHGSSNDTASKEGFKYTDFTFDNWGKLNKKAQCWFDKAVVMNPEEELEEWKKFCPSLDLIINVDSSEIHHVIEFLPSLDWDGGFVGLRLRFEPKNIEELRNDFVELCNENKRVISQNDQIAISNFWPNENIQEFLSRHLDKYFRIKSYVIDPYSENTEEILLETSEPLKDLIKINVIGEDAGFFNSNGAKNLLSSIIQSFYKSHFDNDDRKKTANDLVAIKAINDSKSAFDTTLTETFSEVLSEIRDLGYPGSKNDPNISISSKIDQIETLGHESAIRFKINNDGEEEIRIPEGLNGLGFRRLISITLTLIDFRETWLRKNKLDQDPIEPLHLVLIEEPEAHLHAQVQQVFIKKAYETLCMGQPSHCGTQLLVSTHSSYLARELDFSNLRYFKRKNSDAIPHAEIVDLSRTFDENSSQNEKFVTRYIRTTHCDLFFANGVILVEGDAERLLLPHFIKNHFPKLNSSYISILSVGGAHAHRLKNLIEKLDLPCLIITDLDSVSRVIQTDEDGNIKINKNNTEKVKYKKSIPLPNTSQLTNNDTLKTWFPIKDKIDELLNLTYEEKTIGNIRVSYQTQVTLDFKSKNKIVFPYTFEESIYFENRNLINTIFKTDVDKEDTRIKATGVLFKMMKAEDFEEFDDFRKSVFLALESNKVDMAMDLIYGLEPKDLKTPKYIDEGLIWLENKILGIDELAQGEANEVC

SEQ ID NO: 64195 - protein, 613 aa, Acinetobacter calcoaceticus ANC 3811
MKSANPIVLEDLIFDYVSSSPPQSFILYAGAGAGKTHTLHQVLKKIKEDILLSLSRENKKLAVITYTNAACDEIKERINFDDNFFVSTIHSFAWSLISPFTKEIKEIIKENLKVIISEEEEALKKSRDLNNKTSISRQERVKKSLKRLSLLESTRCFTYNPNSSNVEESSLEHSEVIDIFSKLLLEKKSFKKILVNKFPILFLDEAQDTYEKVIDALVQTQIEFHNQFVIGLFGDNMQRIFTNNKKDLGGFVPENWKRPEKVENWRCPKRVVTLINKIRFEADKFQQESKVKDDGFARCLIIDTNNQNLDKLLVEAEICKTMKEITNDDKWNIRSEIKTLILEHHMAATRSGFHKFYKPLYDSALRSKLSAADTQSLRFLVGTFCEFINSVKSKNDFNIIKILRESSDVFRNFSTIEDQLNYLKNIRDKKNELFDLLMNSNNSIKIILNYIYENNLLNIPPLLIQASILDSYATDTDSTSSELIAYSQALDAKTDQLFKYASYIDGSSAFDTHQGVKGLQFERVMAILDDDEAGGFLFDYEKFLGIKDLSVTDRKNESLGLDSALSRTRRLFYVICSRAEKSLAVVCYTKSPAFLKKQLIEKEWFLEDEIHLI

SEQ ID NO: 64196 - protein, 712 aa, Acinetobacter sp. CIP 110321
MHISKVSLVNYRNFKNSSFLFNEGVNTVIGENGSGKTNLFNAIRLLLDDSCIQYAYKLNENDFNRELGGDWKGHWIIISIDFDKLDSNEAIQSLFVHGAGLLESESATKACYTLFFRPKIHIRHKLADLNEGDIVGLQEVLEKINIQDDYETVFHGKSSANYNDPSIYESLVGNFTDVKFPRDIDASKFGVRVPHQLSVSKEISFTFIQALRDVVSEFKNNRTNPLLTLLKRKSDEIKQEEYQPISELVLTLNGAIENLSDVQEIRNDIKNTLLGTIGRTYSPSSLSIKSSVPNEAEKLLQSLKIFMSEPDEEYEGGVHELSLGSANLIFLTLKLLEFKYRKSKDTFANFLIIEEPEAHIHNHIQKTLFDKLDYENTQIIYSTHSTQISEVSNVENINIVSKKTNNSEVYQPSTGLSSKSINQIQRYLDAVRTNLLFAKGVILVEGDAEEILIPILIKNVFGVSLDELGISLINIRSTGFENVSQLFHDSRIRRYCSILTDLDSAICDTNVLPIDSDKVKKYKEKVARSAKSGAERKIKLDELEKDNDWVKSFYANYTFEVDFIAAGNGFEIKRIVKDIYTDPATCIKAKEDISDGNVAVFGRRVLTMANSAGKGWFAILLGGHITYQTEIPDYIMDALIFSKEDYSKFLLADMIEYRIGRYEAEDDCDIDFSPLRETLEEYKFSGLSLNSVIEEIQSVIEDDQILIFLDRL

SEQ ID NO: 64197 - protein, 599 aa, Acinetobacter sp. CIP 110321
MYILSDESLNQEQKAAIYTNENVLLIACPGSGKTRTLIYKIAYELSKMTSSKQFVIAITYTNTAAEEIKERVEILGVDTTQLWIGTIHSFCLHWILRPYYLYLDNLKNGFTVVNSYDSEEIITKLCEPYKNEKIKFWDCGVIAKPNGIYLTCSDPNKQSSLLKIISEYYEILQINNQIDFEQILKYSWDLISKKNIISKSLSKIFSTILVDEYQDTKEIQYYIISEILKSNNGDTKTLIVGDPNQAIYDSLGGFPMPKADLEILLGFNLVCLSLEKNYRSSDRIVKYFDFYKVDNNTIIASGDNSEYKSLITYNNSVALDDLIDEISHLILLNIRDHNISPDEICIVAPHWVHIGVITRKLMIKHPDLNFNGPGMAPFSRDIDNFWYKVSKIILTEPSPDIYIRRLRWSGEILKDLELFGVNIIDISNKDLLKICNSITINENDGLVYLSKFFSILFELLNIDWEIIPTLKSHYDSFFASSYQRIEKLSAEGLSGVETLENFKKVFKQKGGISVSTIHGVKGEEYDAVIGFALLDGFVPHFSDPKGELNSKKMLYVLASRARKNLHLIAERMRNPHSYHAPNGKAPTSHLELYKYSYDN

SEQ ID NO: 64198 - protein, 600 aa, Acinetobacter tandoii DSM 14970 = CIP 107469
MRLKNLKINNFRNFESVDIPLSSNIVLLGENRVGKSNLLFAMRLVIDQTLSDSARQLKISDFWDGCDLSKKPKIEVHLDFTDFETDLYLTSLLTDYRLAHDPQTVRLSYMFRCKPEITGLPTSSEDFEFIVYGGGVETRSIHNQVRRRISLDFLDALRDAENQLGSWRNSPLRPLIENAMGSIDSTELVKVSTDLESANTKIVEQPAIKELNDSLGEKILGLSGKGHDLKTSLRFSNADPLRLFRTLGMYIDEGKRSITEASLGSANVMLMALKLEEFSWRKAKNERNYSLLCIEEPEAHLHPQLQRTVFKNIFKEKDSSQALIVTSHSPTLASIVPLRSIVSLRSVETSTKAFSLADLPIDEDEKDDIERYLIATRSEILFAKGIIFVEGDAEEALVPSFAEILGYDLDGLGITVCNVAGTNFNPYIKLAEGLGIPFTVITDWDPLEGTKPALGRARCLGIWDSRCEVNLGLTKFTEKNREWAETVDFIEFSSSFSKVGIFLNNETFEVAIAQTPHLSTALLEILDEQGFGSIRTKRINEWKADLAKVDSTQLLAMIKDIGKGRLSGKLRKKISGENQIQVPKYIQDAIEFMVKKCLIT

SEQ ID NO: 64199 - protein, 113 aa, Acinetobacter tandoii DSM 14970 = CIP 107469
MSNHITLQQALSELEKNKEQFEAVQSKSHCVVLAGPGSGKTKTLTTAIARTLHEEVIAPRAIACITYNNECAIELENRLTRLGVMTQDRNFIGTVHSFALTQIIIPYARCIED

SEQ ID NO: 64200 - protein, 691 aa, Fusobacterium nucleatum subsp. animalis 4_8; identical to SEQ ID NO: 62922

SEQ ID NO: 64201 - protein, 633 aa, Fusobacterium nucleatum subsp. animalis 4_8; identical to SEQ ID NO: 62923

SEQ ID NO: 64202 - protein, 540 aa, Escherichia coli P0304777.2
IIGANDVGKTNLLYAIRLLLDKSLSELDLEPKSNDFHVNSTGEQVENIEITIKFTDVSEDAVISKLGGYVSDEGETYIKYLASSLTMDYKILLSHEHNNFDEVPNRFYLKCLSLRYINSQRDLEKYIKIEKKHLLRLAQEVRSEKDTENDGAVFTELNKLLTEVNEKVKGISYVASATEELNEELRKLSYTHDRLTVQLDTGAIGIDQFIEKLELSANTNGKKLMLGGDGFNNQILLALWKAKSVREHDVESEVVIYCIEEPEAHLFPHQQRKLAAYLIDKLPGQAIVTSHSPQIAVNFKPDSIIKLYYDDGETLAASNGCSDCISSAWDGMGYRMSIIPAEAFFANVVFLVEGPSEVIFYTELAKALSIDLDYYNISILSVDGIQFEVYRKILTALNINWIVRTDNDASKVPHKNEWQYAGVNRALALCGENKEPNSSIPIDSKALHTKWGTISPIINPNGVYISFFDLEGDLANDFSKHVLDYASKDNLDDAADYLRGKKAIRMRELIKEKKAFLTELKSKDIARPLIHALKIARGEL

SEQ ID NO: 64203 - protein, 540 aa, Escherichia coli P0304777.2; identical to SEQ ID NO: 63125

SEQ ID NO: 64204 - protein, 606 aa, Acidovorax sp. MR-S7
MKVVRLTISNFRGIKSAELLFDGHTLMVGSNNVGKSTLCEALDLVLGPDRLNRFPPVDEFDFYNAEYLAPATEEGAEQAPIPLRIEAVLIEPGAEIGAKCGGNIEFWHVAEQRLLGPGEADAANPPDAVPCLRIETIGQYNPEEDEFEARTYFSHSPDAPPGELTKVPKGIKRLFGFLYLRALRTGSRALSLERGSLLDIILRTKGVRTSLWEKTIERLRGLDIEADATEIAPVLRSVERRLARYIALESPGNATKLHVSELTREHLRKTMTFFLALSADQGHVPFPHAGTGTINTLVLALLSFIADLKPDTVIFAMEEPEIAVPPHTQRRIAQYLLTKTTQAFVTSHSPFVIEKFEPSKTLLLARNAGVVTARKVSDATGLKDNDYKRFSRSGLSECMLGRAAIVVEGVTELHAMPVVARRMEESDPNLQPLDIAGVAFFDADGESNMPKFGKFFKTLGLRTFAFYDLDYKKKRKAEQAQALADNFEINVEHAYKGFEDLVVAEVPVDRLWSFLSGLKANDENGNVAIPDARPNDDAVKAIAKEALGGNKGAGWSARLFEECELHELPATVTKFLSSVFALFPPPPPFEDGDGAAPEPAAAAAAP

SEQ ID NO: 64205 - protein, 586 aa, Acidovorax sp. MR-S7; identical to SEQ ID NO: 62559

SEQ ID NO: 64206 - protein, 729 aa, Staphylococcus aureus subsp. aureus MRGR3; identical to SEQ ID NO: 62500

SEQ ID NO: 64207 - protein, 597 aa, Staphylococcus aureus subsp. aureus MRGR3; identical to SEQ ID NO: 62501

SEQ ID NO: 64208 - protein, 731 aa, Lachnospiraceae bacterium 3-1
MNIQTINIQNFRKLLQCRIDASEKTTIFVGANNSGKTSAMDALGKFLSDRKFTFNDITVSKRAYINKIGEKWVQEDCKEPEDLLEWDSLIPKMDIWLNVPCDEIYYVTDIIPTLKWHGGKLGVRLAFLPKDIAKFFADYREAHVAARRTEKAQKKTVVHLYPKNLCDFLERNLNSYFSIKTFILDPAQTDMDKPQQTPFEMECFQERPLKGIIKVHMIDAQRGFADPDNPDNDSSSKKQLSEQLRGYYDKHLDPEKVPSPEDLDILKATEDAKKVFDENLANKFQPAIKELEDLGYPGVDNPKLTIATKMTTGETLRHDAAVQYALSKEDETLKLPEKYNGLGYQNLISMVFGLMSYRDDWMREGKAGQTQQDNSRAIEPLHLVLVEEPEAHLHVQVQQVFIRKAYDVLTNHKRIKANKSFSTQLLISTHSSHIARESNFADLRYFKRLAEGVEDDIATSKVINLSDVFGKEDKTDKFVTRYLQTTHCDLFFADAAILVEGSAELMLLPHFIRNKYPRLYQRYISILGISGRHSHRLGPLIEKLCLPTLIIADLDSAQKEGHHKAVRPERGKGLISGNYTIYKWLIQKSNLDELLELPFKEKEIIRKTPYEFPIRVAYQTPVIVNYDEKDKEALSSTFEDCLVYTNYQTFKDLSLEDSGSLVKKINDEINTSNTFDEFVNGIYDTLRNGKSDQKAEFALDLIYAIDPDELTVPTYIDEGLNWLQSYLEPEV

SEQ ID NO: 64209 - protein, 115 aa, Lachnospiraceae bacterium 3-1
MTTAVSTNENSIDNHVDDHVDKEIRECFSKENPKCFFAFAGAGSGKTKSLIDALSFLDKEYGNDLLLNGKQIVVITYTNAACDEISRRLQYKPIFSVSTIHSFLWELVKNYQKDI

SEQ ID NO: 64210 - protein, 674 aa, Lachnospiraceae bacterium A2
MYINKIHIQNYRNFNDFTMQFHKGLNVIVGSNNSGKTGLLYAINLLSNPAGISVDDFNKNNLLKYPKLYTDAAPSIIIEYNISHRIYEDDTTDESIIRLLPFLGIKEFDENRQQKNGSVEYNISAQIKAVYSLDNKFLEEYKKAVKNESTDFNSYLTVLKRFVENHYSWGYSNGISSTKAEQKAATEVFDIRFIGAERTSEGVRKETKREIAAFTKDSDNAAKIDKFKNDVSSELKKILSPSLTKLSSLFENEKNVIGLEKGNVSISSAIHADFSLADTYTTEVKDTKAGYTMPLQHNGLGYNNLINIYMLIKLTEIQKGRDFRILCLEEPEAHLHPAMQYKLFKYLRDLDQANDLNQQIFVTTHSSNISAVAGIDNIFMLSYNRERDPEDCCQQSLFEQFKDQDDTTCKAEAKAHLTKFLDVTRSDMLFADKVILVEGIAEKLLMPLFMEICGCPYEDEHISIVEIGGKHFNYFVELFNNNAVKKKILCITDNDFMWINKQGHLSKMSKYWGKPVPHIENMRQRFCIDNFCICTQSLGGRTFEDEFLLENMKNHDVAETIFKKALSKTIAEYYDKYGFNIFTWIDHKKEIDKRSADTINKFLNAFLFRRDKKASHVPFYNKLIFAEMFLHYARNKKGDVALELLTDESLFNTDGTSKLIVPKYIQEGLEWLLK

SEQ ID NO: 64211 - protein, 646 aa, Lachnospiraceae bacterium A2
MAIKITSGDIFSAEQLAYHSKIYAGPGAGKTHFLVENVKRIVTTSPLIAQSRARRVLCITYTNAAVDEIKRRLDNFTDYIEVYTIHGFIIENIIKPFQDDLRTIMESDFGINVNNRGIISSQIEGLGILHGINKEDIYNFIKKTNPTEFANDDLYYSKKVMGEIEIDNSAFLTSLANKLPRQMKFKASQKVEKRHIIPLKKYIWSVVRKLTHNEILYFGYRILENNPTALYAIRVKFPFIFVDEFQDTNPLQTLLIKLIGQKSTVVGVVGDIAQSIYSFQGARPTDFENFSIDGSREIKEYDIHDNRRSTENIVNFCNFLRQSDKHVVQISKRIYDTEDKKKQSEAKKIHFLIGTTTIIQNVIQNVLENDGVVLTRTWAAAFDYVRDIDEKQAILLKNIYNSYYNTSIQIREEIVEHNNVTWVRAFRFILGLWESYLNGSFIDIIQSLKLYVDIDLHKLTPKIIFQIKRLSENIFDKIDDNALTCNVIENFNTEIQKTDYIDFRQTILGMEFKIPIFDELDREQLIAAVSGLFWDTSYKLFKQIFSDDSKYMTVHQAKGLEWNKVVVSVMPGRRDKIKILSIFSSPCLINESPADEFTRMYYVACSRAKEDLYIHIPSECTESDIRSSIDAFCINSGQKIEYEFIK

SEQ ID NO: 64212 - protein, 645 aa, Dorea sp. 5-2
MYLSDIKIEGYRLFKDRQILHLRKGLNVLVGENGCGKSTVIDAIRLLLNEDEYARSGISEEDFYSSVDKKEWADTISIKGRFSDLSEEKKVEYITWLDKKYNAVLNIDIVRKQDRRNNYKKAIWGGEASNSIFEWEPLNDIQCVYLPALRDAEKKLKASRGSRLARLLINLSQKTLEEKRKAGELMDIEKDVNDFNEELAKRTDIARANELINDSLENALGTVFAQTTKIRFGDVTFERIVETLRIVFFPGKIPTEESVYRNLFENSLGYNNLIYLATILAEFEGLKENYSSPRILLIEELEAHLHPQIQIKVLKYLKEQAEKNDIQVIITTHSTTIASATPIEDIISFNMTKNGIKITSLRKCIKNKQAKQFINRWMDTTRSTLLFSKGNILVEGLAEALLIPKLAEIYLSGLKLDNAPKSLEEAGISVINMNGIFFQYFMKIYDGYELKFPGREDNESKEAYKERIDSFRKKDKFEEGEYEETDFVPILCAAITDNDPKEEAPKKSDNVEGKNPQLFLKEQVKNMTDRCRIYTNVKTFEYDLALEKNNARKMIEIILDVLPTNGDIRDRMNGYLEAYQNNEKVEQPKIALDILNQIDASYLGKGLFAQLLLEKISITNDFIVPEYIKAAIRFVLEITEENNGK

SEQ ID NO: 64213 - protein, 647 aa, Dorea sp. 5-2
MENKRELICRVLCKKEKCYSDLYVCDGKLNSRCKQLGKSFIHNMNEGQVDYVTSQLRQNTFLKACPGSGKTEVLAIKIAYEREQWKLNNQGFAVLTFTNSAEKEINHRLDCYLNSKLAYPHYMGTFTSWLHGYIANPFLHKLMKYEGDERGDKSIRLIESSCTSDFLNAYSSDYGYRELGNIKAHEFFRDFKTDSYQYCGTRSRQGKEILQSLIQQDDWRELDLAKTKMKFWKSGFALYEDIEYMSNLLFEKYPEIPEMIAKRFPILFVDECQDLSYVQLELLATLCEKGCKIHLIGDLNQAIYGFRNIEPDDTKEFSENHCFDIKLLTENYRSCQPIVGVSEYVVNGRDEIVGRNFGKAEFPLIAILYSKGKENLAINKFHEYVLENNLSVAESRIIVRNNNLKNRLIGLKNSNQSSNNLESIAQIVYLLNKENQASDFKMLFDMLAKSIQRIFFKTSEHLNSQFFYRPKEIESKNWKRMLFKIRNVLQEAEQLNDFSVTWTEWKKVLNKLMTENINVLPELSECTYNIGIIRKGNKDKIVEQTLFNEGESDLSYPIETIHGCKGMSLDAVLFLSSYQAGNDEHSGGYWKQWFNRADIGEENRLAYVAFSRARYLLALGIPKPKSFSETDRKILEDAGFKIVESRS

SEQ ID NO: 64214 - protein, 643 aa, Dorea sp. 5-2
MHISKVNVFNYRLLNQTSVSCEKDLSLIIGKNNCGKTSFLSVLSKCIGNKSEVGNFDFNDFSTLFQKKLYKVVKGESVFKEEELTGIRVDFYIEYNEDDDLTNISKLMLDLEPLNTTVILRFEYVLKNNLQKLIEQFAKYETDRTTLNSEMAFERFIKKNHKKYFEFMRYSVLYDYRNKKIDNTIFKYLDNKDIDLSKIIAFNYVSARRNVSNATDLELSALASTYYERSKNQEENNVTTLNFEKKVDETDRAFDDIYSETFKNLMDKLAKFGGIKKNENIVKVISQIQVSKLLKDNTTVVYDDQSNFLPENYNGLGYLNLFSIIMKIETIMSDFRKDNKKDEQPADINILFIEEPEAHTHPQMQYVFVKNIKNLLREGKKIGDSERTINLQTFMTTHSSHIVAESEFDDIKYFVKETNSNGFNVISKNLKDLRTLYQKEKGENNNHFKFLKQYLTLNRSEVFFADKIILIEGDTERILLPAMIKKIDQDNNYDIPLMTQNISIIEVGNYSEIYSTFIKFIGTKVLIITDIDTYSFTDDVDDNGKPKKNRDGSIKKKQTPCRVSDGKYTSNSSLKFYLKDQLETNMGTEKDILTNLELKEKVVSADEIYNEETGKTEIVWKADKDGKVLIVYQIGEVNCEGGG

SEQ ID NO: 64215 - protein, 635 aa, Dorea sp. 5-2
MVAEGLEKEVIQIFELIDDNRNFLLSGGAGSGKTYSLVSVINEIYNRNPIAKIACITYTNAAVHEIENRVLNKKTRISTIHDFLWENISPFQNELKTTLIESINNPEVKYKNITVEIPYSNEFKDGVKYAEYLRLSDGYISHDEIITLANQMFKKYPKLCDILNNKYDYILVDEYQDTFPEVIEILLVCLSKSKKRSIIGFFGDSMQSIYDDGVGDLNDYIESEIVIEVQKRQNRRNPQSVISLSNKLRIDKLEQVPSEDENAPNMKDGKVKEGTIKFIYGDSLSIDSIKKKEYFAGWDFSNPKETKELRLTHNLIASNAGFPKLMEIYDKDPFLKLKKEFIKYIKGKEIAVDETQTFDEVVNSVDWIFSNRVRDVSKRGRKQIEVFLEDTENAKYYDLVKNKPFSMVRRIYFDKDNLISDKKEIDEEKSTQSKRDKLIRHLFKIQTIVEFYEMKDYNEFIRKTSFRIRSQLDKRMIKEKIDTIVGMKKSTIDEVISYAHESGLCLKDDNIENFIKENGYLYTRVSNVEYEEFINLYAYLEGYSPFSTQHKIKGEEFKNVLVILDNGKWNDYNFEYLFDPSHVKCNQSVRMRTQKLFYVCCTRAMENLVVYCKKPTESMISTAEKWFGKDNCQEI

SEQ ID NO: 64216 - protein, 676 aa, Lachnospiraceae bacterium 10-1
MYINKIHIQNYRNFADFTMEFHRGLNVIIGANNSGKTGLLYAINLLNSPSDISIDDFNKNNLLQYSKLYLETAPSIMIEYGICHRICEDDTDDESIIRLLPFLGIKEFAENRQEHDGVVEYNIAARIRAVYSLDAKFLEEYKKTVTNDAKDFETYLLVLKRFVEKHYSWNYTNGISDTKAEQKAVTDVFDIRFIGAERTSEEVRKETKREIISFTKNTDNVAAFDKFKHDISEGIEKLLSPSITKLAALFENEKNAIGLAKGNVSIASAVHANFSLADTYTTEVKDTKSGYTLPLQNNGLGYNNLINIYMLIKLTEIRPGKDFRILCLEEPEAHLHPAMQYKLFKYLGDLDNINGLNQQIFVTTHSSNISAVAGIDNMFMLAYNREGDASDCTQQSLLEQFADKDGTTIKAEAKAHLAKFLDVTRSDMLFSDRVILVEGIAEKLLVPLFMEICGCPYEDEHISIVEIGGKHFQYFVELFNGNAVKKKVLCITDKDFKWIDFDGDGNLRSYSEYESDEPTHIADLKKRFPIENFHIFTQSMGGRTFEDEFFLANMANENVATTVFKKAISNTISGFFDKYGFNLTAWEAHIDEVDGRSRKTIKKFLDAYKSRVDASPELAPDYEKLIFAEIFLHYAKDKKGDVALEILTDKTLMNEDGSSKLVVPRYIQEGLTWLLK

SEQ ID NO: 64217 - protein, 646 aa, Lachnospiraceae bacterium 10-1
MATEMTSGDIFTPEQLGKHAKVYAGPGAGKTHFLVENIKNIIATNSLITQSRMRKVLCVTYTNAAVDEIKRRLDKSTDLVEVYTIHGFIIEHIIQPFQQDLRGIMESDFGIEVSSKGKISSQVEGLGILHGVDKNEIYDFIRKASSTEFSDDEFGYSKKAMSEVEVNNDAFVSSITKGRPRCIGLKVPSKINEQHVVPLKKYMWSEVRKLTHNEILYFGYRILESNPTALYATRVKFPFIFVDEFQDTNPLQTLIIKLLGKKSTIVGIVGDIAQSIYSFQGAQPTDFRNFSIEGDRGVNEYVINGNRRSTENVVNFCNFLRQSDKDVVQVSKRSYDTEEQKTLSESKKIHFLVGNSLVVHNTIQDILKSDGVVLTRAWASAFDYIQGIDESQAKLLKNIYNSYYNSPIQLRDEIVEHNNVTWVRAFRFIFSLWESHLNGSFIDIIQTLKLYATIDVQKITPRAIFQINRLSNNVFSKVSEQSYTCEIIKKFNKEIEKPDFANFRETFLGSDFSIPLFDELDNERLTTAVTGLFWGTSYKLFTEVFSENSKYMTVHQAKGLEWDKVIVSVTPNKFDKIKIADLYSKPQLMDENPADEFTRMYYVACSRAKEDLYVHILDEGLISKLQASIDVYVEKTGKNIAYEFIQ

SEQ ID NO: 64218 - protein, 719 aa, Corynebacterium glutamicum SCgG1; identical to SEQ ID NO: 64122

SEQ ID NO: 64219 - protein, 637 aa, Corynebacterium glutamicum SCgG1; identical to SEQ ID NO: 63255

SEQ ID NO: 64220 - protein, 701 aa, Corynebacterium glutamicum SCgG2; identical to SEQ ID NO: 63254

SEQ ID NO: 64221 - protein, 637 aa, Corynebacterium glutamicum SCgG2; identical to SEQ ID NO: 63255

SEQ ID NO: 64222 - protein, 807 aa, Pseudomonas aeruginosa PA14; identical to SEQ ID NO: 62542

SEQ ID NO: 64223 - protein, 643 aa, Pseudomonas aeruginosa PA14; identical to SEQ ID NO: 62543

SEQ ID NO: 64224 - protein, 566 aa, Klebsiella pneumoniae KP-7
MYINSVYLKGFRNYSDSFIKFNHSTLIIGSNDVGKTNLLYSLRILLDKSFSDLDIEPKNSDFHIDGKGNQCDELEIIINFREIKEDAVLSKLGGYVSDDSETFIKYKASRNTLDYKLYIGHKETDMDEINGRFYLKYLNLRYVNSQRDLARYISSEKKHLLRLAQEMRDHEQVIKDEEILNSLSDLLVNVNDKVKEISYVSSATKELNDELKKLSYNNEKISVMLDSGAIGIDQFIEKLELSSNTNGKKVMLGGDGFNNQILLALWKAKSVREHDTENEVVIYCVEEPESHLYPHQQRKLSEYLINKLPGQSLVTTHSPQIAVNYSPDSIIKICSSDGESYAASEGCSDCISDAWNGMGYRISILPAEAFFADVVFLVEGPSEMLFYQALAKECEIDLDFYNISILSVDGVQFEVYRKILDSFEIKWVARTDNDVSKVPRKEEWQYAGLNRALALCKYEPLKNELAEITQKQKLEKHAIYKDILKQNNIYVSINDLEGDISNELSEQLKEYVGTDDAEKAADYLRGKKATRMQDFLKEYSSSLSSIYSGELILPLLTSVSLAKEGK

SEQ ID NO: 64225 - protein, 540 aa, Klebsiella pneumoniae KP-7
MINYTKEQSIAIEYPSSMVLTACPGSGKTAVIVSKIVNDLALCNDYQGVIAISYTNKASDELKKRCLKVISDPKSSFFGTIDKFYLTEIIYQYIKHIWGYADKIKIIKFNELDDATKDKLSCFSNTEDVCKKIDTYDFKEVRDLYIKGYVVLEFIPLISFYVLINSLSCRRYLAKRYKSIYIDEYQDAGFIQHLIFLSLFKLGIKAVAVGDVDQSIYAYAGKSSKYLSSLLDEKSGFKPFEITINHRSHPSIINYASRLINKNSSLLTSDAIHVYRTTINGSQEDIVKWIDSNIGSITSTFGIKKESDIAILAATNSSVSLVSGIIKTKSRAYLDDDLSIIGGETSLLLKELLRFRFNKMATAQEIIDSLRDKVFEKNSLREMRCVIKDVRKASEPQLIPTLRKAVKLLITSDISSQHIDAINSVIQNKMMLNNYLPVSEDELQIMTLHKAKGLEFDFVFHLDLYDWILPRREYIKNCFDEVFSHYDQCLNLHYVGVTRAKKAIVLINSTERFNFQHDLKRAKPSQFLSLNGLEGLYKNI

SEQ ID NO: 64226 - protein, 566 aa, Klebsiella pneumoniae KP-11; identical to SEQ ID NO: 64224

SEQ ID NO: 64227 - protein, 540 aa, Klebsiella pneumoniae KP-11; identical to SEQ ID NO: 64225

SEQ ID NO: 64228 - protein, 730 aa, Enterococcus columbae DSM 7374 = ATCC 51263
MYLKSLSVRNYRKYGDSGENIFFAHSSCKENIKEYLSNNSTLIVGANNSGKSTIITLLSKLEKLKSGSRSVFAPNDFNYQYIKSWFDNNVYKAAINEQSLNIEATPEIEFILTIGVEDKNENIYANFFDVLVINENTNLENMDIKIKFKYELVDEKAFKNNLDKLVLKSAKAKEKKGKQEFFREFVKLLNGDHYALNVYPDGSDTKVKNFSLSSLFNVKTIAANTVKSDEVLSKAYNKIVQAYIKKLRMEHSSSENQHENSENLLEKIDNFIIEINSQLNTIANKKIKEKIQEAVSSIESAKNLEMNLQPNVTIEKLLSDGILYEYVEDNSYIPESQFGMGYTNLMVIIANIVDYIHMYDKEKLNSSINILCIEEPETFMHPQMQELFIRNISSAMDKLIGNTELKKSFQIVITTHSSYILSSKISSENSFNNIVYVRSGRNKIFENEDDTKSFKQIINLYNEELQEELRKKRTDNLEIDNVKMRKYIAKYVSLELIDIFFADAVIFVEGSTEEMYIKYLISKDDQLSKLHIKVFVVGGAYAHLFSSLLKLLGIKSIIYTDLDIKKDIGKNNILSSNLDDSLVDLEMHSTNSSLKTFYSSYDKKHINEDRIGSEESKDYIFFPLNNISVYSQGKINGKYATSFEEAIILSNCEENKNSLIKILSKILPKDKELYKGNIKNHSREIQIKLASKKREFALNMILFLSTDSEFRLKIPIYIKKGLEELGFKDE

SEQ ID NO: 64229 - protein, 682 aa, Enterococcus columbae DSM 7374 = ATCC 51263
MNINQKSNQNYSLETIENCIDTGKSFCFKAGAGAGKTTTMQRAIEYILSKKGNLLKSRNQRILCITYTNIAKDEIKNRLGKNSSVKIATIHSFIWEFIQQQQYLLKKQHILKLEERIQQEKNFIFSLVTDDKEFEQLKSFIKNSSDEGFLDKYNRHYLENANDFRKIMGRFAWTKRYLTNVKTFKKLINSLNKLISYEKALQYDIIHDKNIVIRYVSNKNIDNLVKFQISHQTLLEYASKIIREFPILQKIIYDKYPYIFIDEYQDASDYVIDLFFSFFDNTQAIDKEKNFLLGFFGDSSQKIYSTQINADFNIAQLENIQSLYNYRSGKNIVNVINKIRNDNLIQNSQLDELDAGRVRFYYCERFDLNNFLNCTYIKNDTEENTAVLITKNEYIAKYNDFNALYNFFKNINRFKGRFWNKINEQLFNKDLTRIDPFFRNIHNFIDFINTITRPNVFLRDVLKYYEGYSRKMNLVDFFEMYQCFQDIVIENKSFKEVIKEVIVKINCKLKGKIIIANIFSLFDDKNNIVGFTEEDIFLEINSSFRRYINNDEELEEDEATEEFFELPFAEFMNWYNYIHDVHKDEVFQYYTLHGSKGLEFDNVIVVLNDHFARKSNYFKYFFENYRNSRNNDDKVFEEIRNLLYVSCSRARKNLTVIYETNSIENIRGNIEEIFGKENVSVL

SEQ ID NO: 64230 - protein, 693 aa, Enterococcus saccharolyticus subsp. saccharolyticus ATCC 43076
MKIKTIEISGFRQITHATFNLENGITFLAGANNSGKTSLVELLNCIFNFGNEKFSGEDFSVVNTQKWINEVLPLILAFFQEETQKESIISNICNLIFPDTDEQNEIIIEPIKLKIQIDYDAANDDIRNFADYIMDLDPSSSSFYFVYEYNVDNSLFRKNLINHYDKLEHRAKKILSDSENNNDANIKKIILKVYFDSLSETIRFTDSKFENGGKVDRRNFIKLFNFQKIMAGRTLDDTSTDRSKILSKNIVDIASEDEKWAKTIESLPDTILKAIESEKIDQIVKDTSINSLKETMSSISMTNGGQANEIIIDMDITEESIKSLLKNITSAKYMLDEHYLNESSQGLGYSNLIYMHLQLEKFNKTIDPLLVNLFVIEEPESHMHPQMQYIFSQYLLTYFASRPELQGFITTHSHEVVRGAKLSQLRVLRKVDSFKCSLYDLRNFHNNLEGTPQLLDFYNYFYSISFPDIIFADKVILYEGDTERMLINSLLKADKTPFPKLKSQYLSFVQVGGAYAVNYEPILKYLDIKSLIITDIDYGKECNTKKEIEASKSTNDSINKLLNMRAKTENTKTIKDIYSCRENKEPYALIRDNICLTFQGEKDGYTRTLEEAMLCKLYGIKSFDTQTKIWWKDKRKSDNLKYSIPNDASIGVRKIINSTSKNKTDFMYSVVLNNKLTSMLPYYIEEGLKWLEK

SEQ ID NO: 64231 - protein, 649 aa, Enterococcus saccharolyticus subsp. saccharolyticus ATCC 43076
MARKIDNFFIVNAPAGSGKTTTIREMIRDIISNNSKDNVLCITYTNRAADELSNSFSSPNVAISTIHSFLNSFMKQYFGSQEIIDLYFETYEDSIQQRIDNREAKENQTKSNLKYIEKYGDLSIDTLRRNITNIYYNENSFNSLYYGGLSHDDLISFSSKIFLKYKIIQNRLSYKFQHVFIDEYQDTTVDVLNIFYESLRGKRTTLYLFGDKMQQIYKNYDGNFEPNFKEFDSSKALNTNYRSIPKIISLLNNIYNDSSFVQNVSDDMVDIVPSFNPRVIISKNVDEELTKILNNYPNSLTLFLSNRSRFQKIGCSSLYTTFSRMERYSFGKKYSVVDVLTNITKDNPDSLMRLIFLVAEINNNYTSNNYGAIVQKIKEEQPILGIKDWKLSNHQDKANLNTILAELASILSSSENSIQNVLTYLKEKILQTSLTLSEIMEDDSYSDALNVPINEVVKLYDYLESPKVSTQHGVKGESHDEVIFIADNGSNPSVSMYKFFDLWSDTDISLSSLEEFYYQYSFELIKITEKVGVRISALNAGSFIPHKDYLKDSASNIMTMFQGNDLFNKLCLQDYQTFISKPNVTNVKKCFRESQIYGILSAYKLFYVGCSRARKDLTILLDNTKVTGGLNRQIQKFEQVGFEVYNKGT

SEQ ID NO: 64232 - protein, 666 aa, Enterococcus sulfureus ATCC 49903
MSNPYLSKVRIKNFRNFKDVSVNLEKQQIVIGENNVGKTNFIRAIQLILDPSLSEEERYLNEIDFFEGLESPFENNEIIEIEIELRNYENNLKLLTILSGATVSNNPDTIRITYQFYPEVDSIGNTEYKYRIFQGENKELNFGHNERRFLNMKVIPPIRDVEKDIRNNKKSPIKALLKDYDIDAKELETISEELDNATSSLLDMDELKYLTDSINDRFGAVVNSQIDLPVSFKTMDIAPTKLLNFLKIVLGESARGLHDTSLGINNLLYISLLLLSLEDNTVPSILSEKQYNTLIEDDTELIIDKFYKITSNGKRIIDSEISEADYKKLYTFMDENYKNKNFQGFSILVIEEPEAHLHPAMQRTIYKDIFNRNVSMLMTTHSPHITSVAPINSIVHLRKSSQGTLINSTANLNFTDGEQKDLERYIDVKRGELYFGKGILLVEGVAEEYLIPEFSRVLEKDLDKHGIICCNINSTNFKPYYKFLRALKMPTAIITDGDFYFQEEKIENGEKKIISTFHKMEYNTPTGANKFYDGLERMRQLVKDIGMFSEAVDTLDDKALEATLNKEGIFIGFYTLEIDIFENLDAIDKDNVWNLFNELTAGGDNHKSNFKDHLDNKRFDECLKMIEGTTSKIGKGRFAQRLSLDISPEMVPEYIEKAINYIVENV

SEQ ID NO: 64233 - protein, 592 aa, Enterococcus sulfureus ATCC 49903
MTKYFEKLSQIKEDKNQYEALLANSNAVIKAGPGSGKTTVLTVKLKLLLMEKIVEPRGIVCLTYSNSAVKNFTQKLRELGVSKSNRVILSTVHGFCISQILIPFGKMYNTRINFPIKIINDKEKNEIFRVSKNELAISKQYTLENVEKYRNEMYGSRSSVDINKDKQLEKLCLLFEAKMLEKNLCDFNLIISESLRLMEEHPYIIKCLEAKFPWILIDEYQDLGKILHEIVLLFLEKTKIKFFVVGDPDQSIYRFQGALPFYFLELYDHPDMKRINLTTNYRSDQFLIDSVLKTLDWDDREYVSGINNEKPAKINFFECEVGMEQQYKLVAQQLIPMCIANDISPSEICILVGYNNQLDDLSNALDEEGIAYYREGLSFLKLKFVLWLQECCLYLSGNNKVNFNDISDEWLFINNKDIRDFDEKMKLFKSLEKSKLNKNSFKKWLKAIFVELDLSTVLSCSPHSNEVNDVKEFVRQVIKDEVLENYTVSQFGYISALDNQVTISTRHSSKGLEFEVVIILGLEEGSFPYYNHAIGSQEYQEDLRVFFVSLTRAKRVVYLVRSKAISGISRYGNPYRIEKEPSPFWKLLKQNI

SEQ ID NO: 64234 - protein, 720 aa, Enterococcus malodoratus ATCC 43197; identical to SEQ ID NO: 64172

SEQ ID NO: 64235 - protein, 589 aa, Enterococcus malodoratus ATCC 43197; identical to SEQ ID NO: 64173

SEQ ID NO: 64236 - protein, 729 aa, Enterococcus villorum ATCC 700913; identical to SEQ ID NO: 62500

SEQ ID NO: 64237 - protein, 597 aa, Enterococcus villorum ATCC 700913; identical to SEQ ID NO: 62501

SEQ ID NO: 64238 - protein, 730 aa, Enterococcus columbae DSM 7374 = ATCC 51263; identical to SEQ ID NO: 64228

SEQ ID NO: 64239 - protein, 682 aa, Enterococcus columbae DSM 7374 = ATCC 51263; identical to SEQ ID NO: 64229

SEQ ID NO: 64240 - protein, 693 aa, Enterococcus saccharolyticus subsp. saccharolyticus ATCC 43076; identical to SEQ ID NO: 64230

SEQ ID NO: 64241 - protein, 649 aa, Enterococcus saccharolyticus subsp. saccharolyticus ATCC 43076; identical to SEQ ID NO: 64231

SEQ ID NO: 64242 - protein, 666 aa, Enterococcus sulfureus ATCC 49903; identical to SEQ ID NO: 64232

SEQ ID NO: 64243 - protein, 592 aa, Enterococcus sulfureus ATCC 49903; identical to SEQ ID NO: 64233

SEQ ID NO: 64244 - protein, 771 aa, Klebsiella pneumoniae UHKPC57
MHLRKLAVRNFRRLHDVVIDLASDISIFVGANNSGKTSVGHALQLFTGKSRFNIHDFNAECWTDIVTFGEGADAASLSSLELDIWFEVTPNDVHRVVDLLPSLSWSGSLVGMRVAFSPINPEEIRSRFLAVRQLAIDATPKDENGTPKYDPSPRNLWEYLRDRLNDEYELRYFVLDPARFNAEMISEEGYEPTPLTGRDRSGREILNSLIQINFLNAQRHLSDGSRGSRSEDLSRVLSRFYGRNLEQKGEDYEALIALAASESAFNQHLERVFAPTLKSLAKLGYPGLSNPRMMIRSALDPAQIMNNQNGAVIHYALGEDDGNPTPPTLPDSYNGLGFKNLIFMVVELLDIHNQWLAIEENRPPVHLIFIEEPEAHLHAQLQQAFIRKIMDLLAMESQELMHYTTQVVVTSHSTHILYERGFRPIRYFRRKRSSNMSATDVLNLSVFYDNTDPEIRDFLERYLKLTHCDLFFADGAVLVEGNVERLLLPQMIATAAPRLKSSYLTVLEIGGAFGYRFQKLIEYLGLTTLIITDLDSVYCTPPVQDATEARADELDGLAENPAANDDGEEPDDDEEEQANTETPGKACIASHPGAMTSNQTLRQWLPKCDTVAALWEATEEMKIQSRTAECDALVRVAYQCQTNVTWKEETLALAGRTLEEAFALENLSWCQDVGCKPLKLRIARAVSMDLLQLAQRIHKRVQSKSFSKTDFALNLLLKKPDEWSVPTYIAEGLKWLEAEIAPPELEVAEGQEEDVEDMSVALAETDGGRVA

SEQ ID NO: 64245 - protein, 625 aa, Klebsiella pneumoniae UHKPC57
MTSRIGSPDTQADIDVRACLDSSPPRSFVMVAGAGSGKTTSLIKALAHLADTRGSALRRAGQKISCITYTEVAVGEIAADVGNSQLFHISTIHSFLWSVIRPFHLDIAKWVVARIHEKIAEKQAHYDKPRTQAKTKSRLEDEIAYLSAQLECIDDVDKFIYGTGSNYAKGILGHDDILKLVPACVEAHPLLRRIVAKRFPFVFVDESQDTDPDVISALRTIANDNPDMCIGFFGDPMQKIYMSGAGAIPLSDGWAEITKPENFRCPTSVLGVINSIRASGDGLQQIRGRTTIVDGVEQTVSGTVNLFILPSNVERSAYLTSVRRYLANETSDEQWLSDTREGDVRLLVLVHRMAANRLGFPNLFAALTDKAPMSLSEGVNDGSAWPLRPFVQHILPIFAAAQANDQFQIMSIMRSECPKLEPLRLHGQAMVAVLNEIQQGIDGLFALLEEGSQATVRDILLHVKDCELLRLDDRFENHLSDEPVNDGNDDFENVQNYLRCNAHELWAYRRYLSEESPFATHHGVKGAQFERVLVVIDDEEARFSQYSYGKYFQYIPLSDNDLANLEEGKESVLDRTRRLFYVCCSRALKDLAVVIFVPDVAVAQAAIVEQNLFPASTILGQHDLS

SEQ ID NO: 64246 - protein, 594 aa, Lactobacillus paracasei subsp. tolerans Lpl7
MKVNHVWIEGYRNLRKTDFAVGDRLVLIGENNSGKSNLLRALTYPMSAGGEVMYTRPMSPRDLNDSDKTDYYKFLEDHVSDLTTTEVPLEVQKKFQAVIPKVIIRLQFEVDQRSMYYFEKLSTQDDEGNIVYQLEYRYQIQDISKLLDHVRTIMHAREKDSTSLLKFQINLLPSNLYKSSILVPKKGEQVTYDLLKNLKTFSLVAERDGFSSSRSKVGSSAIIELLNRNINDESKLNIESGYHDFFDQVKESAKMDQVFNWPKYAIDYTNADKFLGEISILPNMPPINTLLNSVQLGYAHEPLSQQGLGYRNLVYLMAMINALEDDNENPYAALTLEEPEAHLSNENQKLLMSFLDATSKQAVNVQLMYSTHNTNFLSKDALQEVVVMNDGNAVSLSTALHPECLSYLMRNPNMDIYKLLFSTNVILVEGISEELLIKAYLRVHSNELNNIEVLSFHKGFNKILDLWSRINLNSSRKIAVIRDFDNQPNAKQEANKRIIPGKVYIGTTKGYTLEDDIVSENFELLKQFFNKQLSWKLSQDATEKELSDRWKSGKAETMAEVAYALGTDIFQDFKLPEHISRALDFFEGKTNEID

SEQ ID NO: 64247 - protein, 459 aa, Lactobacillus paracasei subsp. tolerans Lpl7
MKLINSGAGSGKTTSLAEVILSRNSKSSVNTHIFVIAYSNYASSVIRTRLTTSKRKTQAQIHISTIHSFLWNFVIEPYYYLLFGTQFTEISSQILGGDQKFRASKLKQLREDHILHVSEFSRIAKKVIIGSKTACKREKAIRAIVLKHLALFVDSIYIDEAQDMDQNTAEIIEVLDSKGIFCYLVGDINQDLHARNGFKYLIKMHKSNSELKTENYRCPRTHVMLSNRYISYNQVSMSTTSGRLGYVLEKDTDVQLLLEEYSKGLIYINKSIRHFNVHSSNSSDSLKRMEYILRKYHTTVADYAESDSEVSKKWAFDIARWVWRSIESGTESQVVVQSLIKLLHQAYSRKLYAELYECINLLQKIKDSTGSMSSVPLCSIEAAKGSQSDRCLLIMSTDLFRVLIGESNKKNSTTNALYVALTRSIDQLLIILTREVTSHYSDRKIEKSMNQLGIFLCRK

SEQ ID NO: 64248 - protein, 691 aa, Lactobacillus paracasei subsp. paracasei Lpp123
MKLVKMEIDGFRSYGEKTTLKFGKLTTLIGDNGVGKTTALLVLNKMFGANASDRIIRESDFYSPIGENSVTTGEKKMLCDTYFQLDDSDDRAQAQLLSHVCIANPQGVLILHVQLSASWMDDGSTEGAIESKIHFIIDDSDPDNIKQQEAPRRELNLIRMIYVPAVRNPEKQLGSTSTSLLARLVRSVNWNAETKEDIEEQLSKLNQTVLEENGLRRINETLSADWRKYYQDERFANVALTIDSTNLNSLANRIQSTFTSQATGHKFRPEEMGDGTRSLFYISNVASVLDIEQSILEDENIQEKPLIDHQPPLLTLVAIEEPENHISPHLLGKLVGRLKDMAELANCQVLLTSHSPAIISRISPESIRYVRLDPHEGTSTIQSLNLPDKENTVEAYRYVKLAVQVYPELYFAQLVVLGEGASEEIIIPRFLEARGECLDENGIAFVPLAGRFVHYLWNLLNQLGIPFITLLDLDRERTGGGWGRISYILGELNMIDCKVEKLPFGIEEINNDALKELSKRLIENRNDAKELDEYLENLEKKHVYFSNPLDIDFLMLTHYSDEYKHLLKGTEGPIIKTQNGQQKRVKEYEPQNVSSKEYLNRAEEATRSALKGGVDVTAGESYSSSEKALMIWYVYFFLGRGKTTTHIQVLDGDKDGSKLTDEKLLKKIPSVIKRLCGDVAAQLNIGAESHD

SEQ ID NO: 64249 - protein, 603 aa, Lactobacillus paracasei subsp. paracasei Lpp123
MINKSEWIPTDGFILEDKASEAVKADGNLLVIAGPGTGKTEMLAQKANYLLETGVCRNPYNILAISFKTDSASNLAERVKQRCPDLANHRFNSLTYDALAKRILDQFRNGLAQSNRPNADYLVQDEEKLHKIFYYVYGKTLRDNQENSFWRHFSLLNQVNSDAEKQFRQIILHGNKTFQANLSFQMIMQLAIIIIDTNPLIKKAFQAAYPYVFLDEFQDTTDLQYQFIKTLFESSTAAITAVGDDKQRIMDFAGARKSIFSDFKDEFNSDELHLILNHRSAPRLIKLQMKMYQSLQAGEYETKWPKNRENDDGEISLIQSQDEYEEAAFVAQDIIKKLKQGIKPDEIALLVKQNDSQYGTPIITALSELGIKSRVESKYQSLLKEPLVQIVLQSVIFAVVANPTEDWGNFFDLYLKSREITDVEDEDTLYTAELNLNKFLHEISALITDIELSASKLVQHIIDFWTKDFFRSNFPQYFNESSFEATIDSFIKLLNMERQAGGKWIESINSFRGVDTIPIMTIHKSKGLEFKAAYLIALDDTAFWTFQSDPDATRRALFVAISRAKLYLTFTFAQSRSNLNFHSGKQSHQLISEFYDLIDPFIN

SEQ ID NO: 64250 - protein, 594 aa, Lactobacillus paracasei subsp. tolerans Lpl14; identical to SEQ ID NO: 64246

SEQ ID NO: 64251 - protein, 459 aa, Lactobacillus paracasei subsp. tolerans Lpl14; identical to SEQ ID NO: 64247

SEQ ID NO: 64252 - protein, 696 aa, Lactobacillus paracasei subsp. paracasei Lpp43
MFLKTVKLYDFRKFVSQVNGEPGLIVKFHPGLNIIVGENDSGKTAVIDAIKMLLGTVSDDRTSIQDEDFYFDGTEFSNDFKIEAVFCSLNKYEAGTFLEWLSFDDNNEYELHVKLTVERKTSEAGRQYLDRNLVAGDEGAESSLASGARVYLRVTYLKALRNATDELTPGFRSHLPQLLAAHSEFRNHPEHKLKLVQALEEANAIIEGYLSDGFPSESNPPKDNDHLSDNNLEKQSINKELHSVLRQLFDSQDQDKSDTRFQLTQVTLDQIFKQLSLSSESVNLGLGNLNLLYISTELALLKDHSSSVVYGPNIMLIEELEAHLHVQAQIRLIKYIERYILSTEDNSSQQFILTSHSVALTASIDQRSLIYMNANKAYSMAPEDTMLEEADYDFLNRFLDATKSNLFFAKGIILVEGYAENILLPALADLINLPLHRSGISIVNVGGTSFNQYIKLFSQKEKSEKIGIPISIITDSDINPTVYGIDSESAEKIQELISGPSDLNVDLFGEEYATFAELVAAFKLRFENTKIKNLIIQVKKFRSDSDWASKTAERQECLNQKYEEFSSNSKVFMSPLWTLEYSLLRSSLRHLTIQAIAETQFVRENHREKLIKKFEEDYKTSPNKAAYNAYAALNKGSVSKTQVSEQLAKLIMGLSQDEKEELKNKIIGDTTHSQNEECKYLINAIKFASGQEVEQD

SEQ ID NO: 64253 - protein, 595 aa, Lactobacillus paracasei subsp. paracasei Lpp43
MNLMQIESILLHGAHFTAEQREVIQAIGRIDVVAGPGSGKTTVLAAKVLRLLTTRNYEDKGICCITHTNVAVKEILARLKLAGVDEIEYPNFVGTIQSFMDKFLGKTAFATVLPGVTLKLLDDEKFYEKYDKNFRGIVKDYRSDWNVPKPSKNGCKLVILDDGSFYYTNRHQNQRCQYAINRACEWLLRDGYVSYSDLKSLSYWYLSKHRDELSVAFEKRFSYLMIDEAQDTDWIQFAIINGLANGKQLNVQRFGDPYQALYTIYGSETEDSWNPRPDNEFYQTKEISETTRFGSLIAAVVKHVCVQEYEQFHSNQELNFFPKYFMTYETGDELKEKHTRLIEDAASSNPNFRILQKPDAIVGIMHSDIIKVEPKYSKEGSEQRAHERSVSEIYALVIKLLANANGVSFMEESVLIRNNHDSNLELADVIQKLAKQNISLNEVQYHLYSLIGSETISEAYLQRECKHLLQDVSNLEGEPERMNLSTVHREFATIHGVKGETHRSTLLLLTSCVHMKFNEEDKINKFFKTIFPYLLGDRPDFSSDPEIEQLQRDCLKLAYVALSRPKYLLAVAIPSQDLADEKKTSLLTHGWVEAK

SEQ ID NO: 64254 - protein, 674 aa, Lactobacillus plantarum IPLA88
MYLSEIKLYNFRRFSSSADGNAGLTINLNKGLNIIIGENDSGKTAIIDAIRLLVGDISDDFQRIAEDDFYCNESGEYVTSFHIEGVFKDLSKKEAGIFLDWLSFDDEGNYELQLNLLVEKKKNDNNQMYIDHKLVAGEKSSAMPLNNVTRSFLKATYLKPLRNADDELTPGFRSHLPRMLMAHSTFNKDDHNKNGLVDIMKEADSKIEQFFGDDSSIKNKTEDTLSDHASLNEQLSHVLSQLYDQQDRSKSKVHLQLPEASLFKILKQLSLNPDKKNLGLGNMNLLYIATELALLNDHLTHNVYGPNIMLIEELEAHLHVQAQIRLVKYINKYMEKQQGTSVQFILTSHSVALTASVDQRALIYLNNGKAYSLAPEYTMLEDDGYEFLNRFLDATKANLFFAKGLILVEGYAENILLPALAELIDFPLHERGVSIVNVGGRSFDNYIKLFARRDSKCSIGLPVSIVRDSDIKPYTYRINDKNIDNIKPLLNEENFDKKHLGTKFPTFNKLQKSFKLEFSSVNMNLIEEKTYQLLNDDELTRCQNAKTDSLKKRYNCFNVNQEVFVSPAWTLEYSLLRSPLKDLLTRAIAETRYSNEHKREKFLEDLKSKNLIEVYEDFERNVSKAETAQHLAEKIHFLSDTDRKELRDKVLKDSYCKYLVDAIKFACEPGETNE

SEQ ID NO: 64255 - protein, 593 aa, Lactobacillus plantarum IPLA88
MSNNFYEIERKLLPLGHQFSEDQRKVIEARGNINVVAGPGSGKTTVLTAKLLSLLTNQKQGDKGICCITHTNVAVDEIRKKLLHCGIKNINYPNFIGTIQSFFDYYFGSKAFGIIFPDKRLRIFDGNQYQTIYNQEFINETPWWSYDTAPDYKRRNAHLVISDDRLVSFKNDEAKAYSNNINKALKNIISRGIINNDQMTVLAKWYVNSHNNLLSAAIEKRFKYVLLDEAQDTNNQQYQLLMNLLENTEVYFQRFGDPYQALYTIYGNETKDAWLPNHEEQKGIAQVKEISTTVRFDQRIANLVKNVCYEEYSTFHSERCDNKFDNYFITFRNESDLMAKYNRLIEQCATNDSDFFGCANKDMIVAPQHKDLEKWFSGYDRSTQSISNNSTNPFKELLTVVTRKLARENFITVTEERKKIQSDLKYSIAISEIIKELFSNNPDIEILKQCMNAFSLKKTSQQMIDELFKEKEISLCDLSNGGTSENDKLGVSTIHGVKGETHRSTFLLIDSKVNSNFSFTSPNPFWEKIFPFLIGKRIDYSHDNDAKFTRYCLKYAYVALSRPIFFAGVAVPIANLKSNQKDKMLSYGWKEAK

SEQ ID NO: 64256 - protein, 612 aa, Delftia acidovorans CCUG 274B
MRVARIEIENFRGIKQAKLLFPKHGVLIGDNNTGKTTILEALDLVLGPDRLNRQPAIDEHDFFGGIYAQMPDAPPENGGADGAAPPEPGEEVAEDSAPDSAPKIVIEATIADLTDEQKGKFGDYIEFWDSAVDKFYEAPNPAGVDAASITEALRVTFHGWYDKEEDDFEGATYFTRSLTEGDKPDPFSRKHKQLCGFLYLRSIRTGSRALSLERGSLLDIILRLKEVRPQMWEATLTTLSNIVVASDPALGISPVLESINTALKKYVPKEWGVEPHLKVSNLTREHLRKVITAFIATGDGMHAAPFYRQGTGTINMLVLAMLSQIAESKQNVIFAMEEPETAIPPYAQKRIIHEVRKLASQALFTSHSPYVLEEFETDETVVLARDASGRMGQRAIALPDNVKPKRYRQEFRTRFCEGLLARRVLLAEGPTEYSAFPVVCRRLAEINPKSYLSLEALGICTVDADGEKNVPGMAQLYKALGKRTFAICDKQEEANKALIEAQVELLLMHDEKGFEDLVLKGTTEEALKRFAKQLDWPTHLAQKYPDPEAQAEAALRDYFFWSKGNWGTADFLAQCSEEEIPEWLRDAALKLKAACTPAHAEADAEAGADGTD

SEQ ID NO: 64257 - protein, 604 aa, Delftia acidovorans CCUG 274B
MELTEGQLNVMESDGHLLVTGGPGSGKTTISIIKASQIAEQHVRPGQKILFLSFARATVSRVVEAIEYEQKIPAATKNFIDVDTYHAFFWRTLKTHGYLIGLPRRLGILTPPNEAIALSGVRSGFPARNLTDEQKEAKKAAEAAERIRLATNEGRICFDLFAPYVGDILHGSERIRRLIATMYPVIILDEFQDTNGAQWRVVQALGKSCRLIALADPEQRIYDWIGADPARLDHFRDAFAPTAVDLSTDNHRSAGTEIAIFGNDLLTGEFRQQEYKGVSFDVFDPFSGPAMTKLVTTIYAARQRLMTQGIENWSLAILVPTKKLTRLVSDALRHPPAGMTEVFHTATIEMEAAILGAEVIGLLMQPSGDSRHFAQFIDLLCNYFQGKDGSEPTQGALKEAASIRGAYEELLASRANGKAIRRNSILVNVLTVYDQVRALVLTGDPDKDWRAVRRVLEDGACKRLKEIAEEVRNIRLLDRGTQLRQQLSQDWRDNGYRNALAIIRQAFVQEHFSTSAKPESGVVVMNMHKAKGKQFDEVIIFEGWPKRAKGKIVANTDRIVRFNSRDQINDQARQNFRVSVTRGRRQTTILTPKGDPCVLLVGEA

SEQ ID NO: 64258 - protein, 634 aa, Pseudomonas fluorescens LMG 5329
MYLRALEIDGFKCFNTGFTIELHDGLNVLVGENGAGKTGIISAIRQLFNDSESGKRNIHERDFYRGFEPGALATEAIRIEATFSGLDQDESTAFIDWCGQEPEAKLTFTATNRESRGRYRYSIWGGHQRIKPVEVEILDLIHCVYLPPLRDAEVKLREGRQSRLARLMKALCRKEIDECRKAGVAHPLEQRVGEFNQELAESDDYAIKQANQRIGDNLKEALGMNLSQGTLIQFSEVNFSKIVEGLRLLYYPDLNGADATQFRSLEENSLGYNNLLYIASILAELILEVDEDRGEETFLRLLLIEEPEAHLHPQLQIRLLRHLRTVAAAKGIQVIVTTHSTVISSAVSVDNIIHLSRKDQPIAVPLRKCGLSDPSRRFIDRWLDVTKSNLLFSKGVILVEGIAEAIVVPELARIVLRAYGKGRDSLDDYGVSIINLNGIYFNHFMQLFCDADEKVQASNVPVRCAGLTDNDPPKSVETIEDDEGKKTIVPYLPHQESFMAGSNHALKLIPIIAKSEYGRLYAGKYKTFEYDIALESNNLSRMFAVAANHWPTQGTVKKGLDEASELNFGDMPNAQKAEYAGQLLDRIDSDDMGKGLYAQVLADALAENLEDFVVPEYIRAAILWACEAQPEGAE

SEQ ID NO: 64259 - protein, 580 aa, Pseudomonas fluorescens LMG 5329
MTFPTDEQRAYIGASLEENIYLKACPGSGKTEVLAAMVCKSIQKWRRFPSGIAVLTFSNSATDELKLRLTEHLGEPLAHPHCVSTFDSFLLTHIVAKIASQITGYPGRDGDYRIRLIDKTANIFRTKTKICGRTISACKYDYDLDSKRFVFATGELTDVQLNAAELSAETKQDLVDTKKRFWKGGFATYRDIDMIALMALRGTQFEEYLAKVVRRFPITVVDECQDLSAEQLDIVRQLARRGMKFHFVGDLNQSIYGFRKSNPERVRKLLDDLQFTEYELTANWRSGQAIVDLCSDLLNVAKSAGNPNIEPLKPKLIQYQQCPSELTPLIIALAQGYQDVVIVARGHSTLQRFSRGGKFSVLEDLALSCVSIESQNLEEVRRALKSFAGWLAFKLNLEVTPASLYCPIEIESKLAWRRFVFNCLKYLSVCGASDIGLTWKQWAALAKRAIRQIPDQPFALEAIAAKLTGLKEVSLVAPAGLGSQALSARLSMAHQQPASTRRYATIHQVKGETHDVTVVVSSLKSGSQSHWKDWLKDPLSEAARFAYVASSRPRHLLIWGVKVLKPNEKQRMVELGFDIC

SEQ ID NO: 64260 - protein, 696 aa, Cedecea davisae DSM 4568
MDNTEGLMRIQQVQIKNFRLLADVELMLEEQTTVIVGRNNSGKTSLSEIIRRFLADGSSAFQLEDFSSTSYDCFCEALDALNQGAEENIIRQLIPAIELRLKFQYDPTQPQLGPLSPFVIDLDPGCTEALAVIRYELKHGQLAQFLENQPNKPLTYETRILFLRTLRERIPNNFSTKIWAEDPNDPDNRRELQPSALRGLVKTGFINAQRGLDDVTSRESDVLAKTVEGLFATASSASADTADKQIAEALKDTVQDIQAQIDTNFGGQLKSLIPALKTFGYPGLGGQELHTETLLDVGKLLSNFTKVRYAGYGGVALPESYNGLGARNLIFILLQLAGFYKAFRAETKEPGVHLIFIEEPEAHLHPQMQEVFIRQLAKIAQQLVDGTEDKKPWPVQFVVSTHSSHIANAAGFENIRYFLGAPITGAQQGIRETKIKDLRKGLKHISPGDKKFLHQYMTLTRSDLFFADKAVLVEGLSERLLLPVIIAKLEAEEPECPKLSSQYATILEIGGAYAHLFFELLQFLELRSLIITDLDAVEKPGGKTCAVHLGTYSSNACLKAWFSADASFTLAGLLAKKDSDKILKGNRIAYQCVEKEDGPCGRTFEDAFILANPKLFGLVKEDSQELEIEARCKADEWKKSEFALKYAITETEWVSPKYIKDGVRWLARENVAVPDPELALAVETIADALNGGEANV

SEQ ID NO: 64261 - protein, 582 aa, Cedecea davisae DSM 4568
MEVRLMSEIHSPAEVASQRALEAMYTCLAEGQSFRLEAGAGAGKTYSLIKAIKFLIENNKSIFLKHSKQIACITFTNVAKDEIATRTDRSPLVFCETNHAFCWSLICGFQKSLRILIETMPVWKEKIQEAGGTIGNRTIEYSLGHRSIRDHSVSIHHDDVLPLTISLMAHEKFRRMITDRFPIILVDEYQDTNYEWVEALKEHFLGQPSAPLFGFFGDHWQKIYGGGCGKLEHPSVREIGKEANFRSVKKIVDALNRMRPELKQFVQDPESKGEICIFHTNNWQGVRQKGPHWAGDLPLTDGHATLVRVKTALELDGWDLSPKHTKILMLTHKLLANQQGYSNLAAAFRYNESFTKKEQEHIAFFVDKLEPACDAFSNRKYGMMFESLGGSTPHLRSHSDKASWHDAMSQLLAIQSTGSVGEVIDHLHKVRKPRLPDAIEKHELELREFNEAAGVELPRTLEELKNFRNVAYSEVKALRNYLVGYSPFETQHGVKGAEFDNVLIVVGRGWNQYNFGEMLELASAKVVPPPKEEAFERNRNLFYVACSRPQKRLSILFTQFLSPEALNTLENWFGIDAIKPAP

SEQ ID NO: 64262 - protein, 582 aa, Pseudomonas aeruginosa PGPR2
MDLVLGPERLSRRPVIDEHDFYAGTYVDPVKKEVVPIQIEVIVAGLSDEQQRHFRDHIEWWDAQAKTLLVGAPPERTDAPHVGAAMRVFFNGWYDVEEDDFSGDTYYATPETPDGSYLRFSAPDKRKCGFLYLRTLRTGTRALSLERGSLLDVILRLKETRLTMWEDLLDQLRALPVGETEDIGELLAAVQDAVRHYVPSDWAEDPHMRVSDLTRDTLRRTLTVFMGTGAKRPDGSVYSAPYQHQGTGTINTLVLALLSIIAELKQSVIFAMEEPEIALPPHTQKRIINSLRQKSAQAIFTSHSPYVLEEFEPAQVVVLKRVAGVMTGIPATYPPSVKPKAYRTEFRTRFCEALLARYVLVLEGRTEYDALAAAARRLGELDPTRFKSLENLGVAIVDARGETNVAPLGAFFRSLGKTVFAVFDKQSPEALAAIKASVDHPYESASAGFEDLVLQGASEAALRSYAAAVVAGGDWPQHLAAWTPAAATPLADLQAALSSYFSWAKGGGDAGDLLASCQTADDMPEYVRTTLAAIKNVIEPPRLPPLPPQAAGMPLLPETAAKPAPLAAAYGRFQPSPPQPST

SEQ ID NO: 64263 - protein, 428 aa, Pseudomonas aeruginosa PGPR2
MTEVWSDQKRGFLACTGHALALGGPGGGKTHVALVKARDEIRSGVLKPGQKILFLSFARPTVARIIEKASELISREDLKQLEVSTYHGFAWSILRSHAYLLNGRRSLQLLPPPEAAAHLTDIDKAQHENEKRRLFEQEGRLHFDLFASLVSDLLRRSDRLNTIFSDTYPIIILDEFQDTNSDEWALIQQLGRRSRLIALADPEQRIYEFRGADPRRVGDFLESFSAAHFDFAGENHRSGGTDIATYGNDLLTGANKGRTYQQVKIIRYGFLYGKSSHFSAKTAVYSALERLKKVPDKSIAVLVPSKRLMLELSDYFSSTSDGLPELYHDVAMDAEPPALAAGVIATLLEGGTASDVASRMLGALHSHIRGRRGGKPTPQTELDLAGLAFPRIFADGAEVSSHLRRSLTWQVFLAVSFPQERSAVPSAS

SEQ ID NO: 64264 - protein, 688 aa, Treponema denticola SP32; identical to SEQ ID NO: 63890

SEQ ID NO: 64265 - protein, 634 aa, Treponema denticola SP32; identical to SEQ ID NO: 63891

SEQ ID NO: 64266 - protein, 699 aa, Acinetobacter gyllenbergii CIP 110306; identical to SEQ ID NO: 64064

SEQ ID NO: 64267 - protein, 577 aa, Acinetobacter gyllenbergii CIP 110306; identical to SEQ ID NO: 64065

SEQ ID NO: 64268 - protein, 565 aa, Acinetobacter rudis CIP 110305
MYINKVKINNYRSFRSFEAQLQKLTIVVGENDTGKTNFFTALSLPLGGNQIGFNQKRLSISDINKDSVIDFFTSIITNEAKENQLQKIPKVSVTIEFTDPKDSYEVALLAKWLVADGDKETYQIRYDFKPKDDLDLLEVVKATLTGKTIEEVNWFTLPIELYDYQIVSVNNGKTISFSDLKNVSIHNINAERDDFSESSSMKSNSIFTKLLMNTLGDEDKSKINTAYSEFFTAIEDTQTFEKVIGTNSEFDNYDDIIKKLECIPNLPNLKNILSNITLRYGNEFLYQKGLGQRNLIYILILFAYYKSCGRTFNLCCIEEPEAHLSVNNLRLVRDFIEKSSTNSSSLVQTIISTHNPTIINKLNLSNVLAFTGEKAISLSDAPPKLVDYLRKRPNFDILKLLFANKVILVEGTTEEMLITTFLSKKENLQDIEIIAIGQRGYTNFLDIWLMLNKDNPNKKIGVIRDYDNSEPAKAKHDIYDADNANISVRTTKNYTLEIDLVETEGNLSLLNTLFRMSGDIKSVSDHMIGGKASRMLDVCDAMVEEKNPLDIKLPAHIAEVIEAVS

SEQ ID NO: 64269 - protein, 457 aa, Acinetobacter rudis CIP 110305
MIEIQIAGAGAGKTYGLAETLIGHIKACTTHKKTFALTYTNSATAKIEQEIIKQYGFIPQNLYIQTVHSFLLNEIVYPFSSFTLDDVYNDSSIMHVGNSKYKNRLFKTLREKKIIHAENVYNISKQIVDEMISRHSSKLKKAKVKRLLAILENCFEKIFIDEVQDLDDDALRFFEVLGSNGIDVYMIGDPKQAIKYPKAFDNFVDKVSAKEYVNILEINNQTTRVPREILAISNSFCYEGQQQESLSDVVGELMYIESTDAKYDDLLSSYISAKQIVCIDKKVGRYSTSSKHKHSFPQEIEEMIRESKHKKDKVLFAKAAFSDFFNDVEMYGAKIAINNLRTKHLLTFENKHYAQLYELCSVFTENNVQFIVQSIDSVKGLDANTCVIITSPNLLKYLTKNGIKEGDYFNKEWKKVYVALTRAKHRLVLALDHDLLLASDIEAVRSSISELGFVYHH

SEQ ID NO: 64270 - protein, 616 aa, Acinetobacter rudis CIP 110305
MKIDKVILKGFRNYQDATINFNNNTLIIGENDIGKTNLIYALRLMLDRSLSEMDIEPSELDFHVNDGVQSEVLEIIIKFVDIKEEAALSILKEHVSDDGVCIFKYTASKENLDYKLYLGQSESDLSEIQSRYYLKYINLKYISSQRDLSKFISKEKKQLLKISKTKITEEQEKLDRDNLITISKQLVELDDKVAQLEYVKTATQEVNLELKKLAYAHDDYDVKLNASGIEVADFINKLQLGAISGGSNVMLGGDGRNNQILIALWKALSVFEHDSNDEVVFYVIEEPEAHLHPHQQRKLASYLSSELPSQCLITTHSPQIASSFSPSSIIRLLKKGGITIAANNGCTRELEKAWKELGYRMSIIPAEAFFSSGVFLVEGPSEEILYKELLLKNKVDIDYYNLSVFAVGGIQFKVFSAVLRALEIPFALRTDNDIKTIEMNCNFSSFTRINVLNPCYVYKRIEVNYKDKKCKKWQYLGVNRCYGILNKDSEKWNHSLYPLDRAKILGDKRWNPFEKMINSKGIFMSDRDLELDLVGVASEEIKKALGKTTDTSSVEFLKTSKALNMQVLMAKIEDEGFKKIYESSFGEPIKYLIKLLSNNTMPVIESISLVKEEALT

SEQ ID NO: 64271 - protein, 536 aa, Acinetobacter rudis CIP 110305
MKLTDDQIKAIQDVENNSVIMACPGSGKTTVLIHKMSLCCEKLKSHNGVIGLSFTRKSSAELRKKFQKKILSSNLNYLGTIDSFFINEVIRPFLPKLWDCDHDDIEIVNVLLEEEEIPFIQEYSNREICLTDIESDSAFKGLFLSGKIWQRTVTPLALFVLRNSSICRRYISSRYKYLFVDEYQDTSLAQHLVFLELLELGLKFTAVGDIDQSIYRWRDAVPENMESLVSEHDFKEYTIDKNHRCDLSIDLYARVFLKDINESEITDKNIFRLHINNLGRSRYAKLDNFIQKIKDDNKFELSDFVILAANNSTVQHYAKNTIHNYRIYEDDPLDSMNHYIAQLCSDLLLYKYSKNYSSYSIYESYKNRFINFKLDNFKSEAKEIKLENDIDEICKIIENIIIKTSYRGNYENFILATKNILNNPHLLKKYQPSNKNELQIMTIHKAKGLEFKVVIHIGLEEWVLPRRTIKNGKCYFQDFEGDKNLHYVAITRAEKFCYLVDMPIRVNARFREIEAIKSEFLCIESLNKHIVNLGVI

SEQ ID NO: 64272 - protein, 699 aa, Acinetobacter baumannii NIPH 410; identical to SEQ ID NO: 64082

SEQ ID NO: 64273 - protein, 577 aa, Acinetobacter baumannii NIPH 410; identical to SEQ ID NO: 64083

SEQ ID NO: 64274 - protein, 699 aa, Acinetobacter gyllenbergii MTCC 11365; identical to SEQ ID NO: 64064

SEQ ID NO: 64275 - protein, 577 aa, Acinetobacter gyllenbergii MTCC 11365; identical to SEQ ID NO: 64065

SEQ ID NO: 64276 - protein, 694 aa, Streptomyces afghaniensis 772
MPPRLTKAVIRNFRLLRRTELSFTDKVTLCVGRNNTGKTSLAKLFEFFVARKKAALRIEDFSADCYEEFLAAHRLFASGEAEQARDTVPAVTLTLHISYDKDCGQYGPLAPFVVDLDPDCSEVVIRFAFALGDGALKEFFGGVPVGPDATATLEQLGRGIPKHFEMSVMAVDPTDEANVRPVDLADVRALVKVDFVEAQRGLDDESDGHAAPIGAVFEQLLTAAEKSQNATWLEELAANIDRTLVDTSGSLDSSLQKVRERVAPTLKAFGYPGLANQEFVTAARLDSKRLLRNFARIHYPGVAGVRFPESYNGLGTRNLVMILLRLFTCYRDHTATSPESGIHLVFLEEPEAHLHPQMQEAFIQRLTYSVNLFPRIDAQMRATMPGQKGAVEESSTAIDSSPRWNAQFVVTTHSAHVANRGHFSDIRYFRKEEDTVESGSEPGPARTVIKDLSQVTGDERFLRKYLTLTRADLYFADKAILVEGASERIFVPAAEEKLAARRPGETPQHQYVTLMEVGGAHAHRFYPLLKVLGIPALIITDLDPVDDHEPKIRKCLVSESGRTSNQSIRAWSPEMADITVAELLQRAETDPPIAGGSMCLAYQVPEEPGGPCGRTFEDAFALANRALFGIPTGAAPAEELEQQARSSVETRRSKVDFALDHVLGDHDWQVPKYIRRGLEWLMAQDGTATKADVQ

SEQ ID NO: 64277 - protein, 604 aa, Streptomyces afghaniensis 772
MTTEAEDVTHTILTALQAGRHFKVEAGAGAGKTSSLIGALQSILADRPRYLPRPHQRIACVTYTNVARDEIISRTDRSPYVFAETIHGFLWQLLSPFRKHLLRHIVELDIMLSKMEGHTSLDGYTVEYSTGFQKVDHDSRRVQLGHNDLPVLARAFFALPKFRALAADRFPIVFVDEYQDTPAGLAEAMLGTPGDEATARGPLCGFFGDHWQQIYDNACGALEDVRPTPIFRRRNRRSQRAVVNLLNTMRPELTQTTASGVGEGTVAVYHTNEWAGTRLTHHRKGQLGWDAAHAARKWVLDDVCDRLWSTGASGHDAQARAEEPGTKILMLTHETIAGELGYQKLHGAFRRNDSYVRKEDHAMAFFMDTLEPALLHHRNKRYGAMFDALDPRGRPPINSSADKQEWMAFLTKLGEARKTGTVGDVLDLCLEQQLFDGLGKVRERHRKAVSPSGTDPQAVSDDKAEARAAARSKEYQQLRQVPYAELLALNEHLGGGTPFATQHGVKGLEFNRVLAVVSKGHSRFQIPEMLANFSRRDELTDKELEAFIRARNLFYVACSRAREHLAILFTTKLEPAALDTLREWVGESRITQLRFDGDTVVGGE

SEQ ID NO: 64278 - protein, 712 aa, Pseudomonas sp. CF149
MHISKMTLVNYRNFSNTTLKFQRGVNTIIGENGSGKSNILRAIRLLLDDTMVRAAYRLEESDFCRSLGEWRGHWIIISVEFEQISADEAVQALFLHGTAALEEGPLAKATYNLIFRPKKEIRLKLAALDIFDDEVLAEIRSTITIDDYETVFTGRSSADFSDPSVYQSIVGNFETCTFSAETEFPQIGAKVPGFLSVTKEVSLTFIQALRDVVAEFHNNRTNPLFALLKSKSGEIDPVSMLPITQMVRDLNASIEGLEDVQSVRNHIRETIKDAAGETYSPASLSIKSDLPDEAEKLFQSLRLFVGEADDGYEGGIHELSLGGANLIYLTLKLLEFKYQREKLAIANFLLIEEPEAHIHTHIQKTLFDRISYSDAQIIYTTHSTHISEVSNVTNVNILGRQGSYCEAYQPATGLEPSEVRSIQRYLDAVRSNLLFAKSVLLVEGDAEEILIPILVKKVLGLSVDELGISVINIRSTGFKNVAVLFHDLRIRKRCAIVTDLDTTFFDVTPQPTDHEFLASKKRKAIGSQKAGVERKVGLDAFVAGNPWISAFYAPHTFEVDLVSAGNEEAFARAASKVYIAPHTIKEAVEALRSGQPHLVGFRALLMAEYEGKGWFAIMLAEELDHQVAIPPYILQALQFAHGHMSPLLLARILQYRVARQIHADPSAQPRLTLLRGEVERFQRGEIDLVFLKAAVALALPGDAINSFMVGIA

SEQ ID NO: 64279 - protein, 594 aa, Pseudomonas sp. CF149
MFAWDSRELNAEQSAAIEEPSSVFLIACPGSGKTRTLTYKIAYELSRATDKRIVVAITYTHRAADEIQERIEGLGVDTSKLWIGTIHSFCLEWIIKPYGIYLPELSRGYRVLDRHDRELMLDRLCAPYPKITHWDCDYYFSKTGYHLGCKDAWKHETLHKILGEYFRELGEARQIDFELILWYAQVLMSDQKHIASILASVFSYVLVDEYQDTKQIQYGLLTAILRAGAGRTKTFIVGDPNQAIYGSLGGYAVPVADFRAEAGIPIREMALTRNYRSSNRIISHFSNFSVYPTSIESAGSDASFPSKVSYNQHVTLTNLHDELVRLIQASLAAGHPPEEICVLAPWWILLASTTRHLVRMLPDQQFDGPGLVPFSNDIDNFWFKVSKIILTESSPKMLVRRMRWARDVISDLGDLGVDTSRLTQRLLLRECNSISISEMDGIAYLDQAFTALLERLGVALHSFPALMEHRDAFFRSSLSRIDRLQKDGAPYINDISFFRKVFRERTGITVSTIHGVKGAEYDVVIAFGLLQGMVPHFTEAASLDAANKLLYVVGSRARKNLHLISESGRPQGHYGHYAATEALFTCVFDYDAAE

SEQ ID NO: 64280 - protein, 712 aa, Pseudomonas sp. CFT9
MHISKMTLVNYRNFSNTTLKFQRGVNTIIGENGSGKSNILRAIRLLLDDTMVRAAYRLEESDFCRSLGEWRGHWIVISVEFEDISADEAVQALFLHGTAALEGGPLAKATYNLIFRPKKEIRLKLAALDVFDDEQLKKIRNAITIDDYETVFTGRSSADFSDPSVYQSIVGDFETCIFSAETEFPEIGAKVPGFLSVTKEVSLTFIQALRDVVAEFHNNRTNPLFSLLKSKSGEIDPVSMLPITDMVRDLNASIEGLEDVQSVRNHIRETIKDAAGETYSPASLSIKSDLPDEAEKLFQSLRLFVGEADDGYEGGIHELSLGGANLIYLTLKLLEFKYQREKLAIANFLLIEEPEAHIHTHIQKTLFDRISYNDAQVIYTTHSTHISEVSNVSNVNILGRQGPYCEAYQPATGLKPSEVRSIQRYLDAVRSNLLFAKSVVLVEGDAEEILIPILVKKLLGLSVDELGISVINIRSTGFKNVAVLFNDLRIRKRCAIVTDLDTTFFDVTPQVTDSEALAKRKRKAIGSQKAGGERKVDLDAFIAGNSWLSVFYARRTFEVELAFAGNREALIQTVSSVYKSPETITEAVDALRSTQPHLVSFRALLMAEYAGKGWFAIMLAEELDHQVAVPPYILQAIHFAHGHVSAPLLARILQYRVARQIEVDPSTQPCLALFLVEIDRYQRGDIDLVGLKAAVALALPNDAIGSFIAGIA

SEQ ID NO: 64281 - protein, 594 aa, Pseudomonas sp. CFT9
MFAWDPRELNAEQSAAVEEPSSVFLIACPGSGKTRTLTYKIAYELSRSMDKRIVVAITYTHRAADEIQERIEDLGVDTSKLWIGTIHSFCLEWIIKPYGIYLPELCRGYRVLDKHDRELMLDRLCAPYAKITHWDCDYYFSETGYHLGCKDVWKHETLHKILSEYFRELSEARQLDFELILWYAQILIRDQKHIAPILASVFSYLLVDEYQDTKQIQYGLLTAILRAGAGRTKTFIVGDPNQAIYGSLGGYAISVADFRAQVGIPIREMALTRNYRSSERIISHFSNFNVHPTSIESAGSNASFPSKVSYNQHVTLPNLHDELVRLIQASLAAGHHPEEICVLAPWWILLASTTRQLVRMLPDQQFDGPGLVPFSNDIDNFWFKVSKIILTESSPKMLVRRMRWARDVISDLGDLGVDTSRLTQRLLLRECNSISISETDGIAYLDQAFTALLERIGLALNSFPALLEHRDAFFRSSQSRIDRLQKDGAPYINDISFFRKVFRERTGITVSTIHGVKGAEYDVVIAFGLLQGMVPHFTEAASLDAANKLLYVVGSRARKHLHLISESGRPQGRYGHYVATEALFACPFDYDAPE

SEQ ID NO: 64282 - protein, 595 aa, Pseudomonas stutzeri B1SMN1; identical to SEQ ID NO: 62972

SEQ ID NO: 64283 - protein, 445 aa, Pseudomonas stutzeri B1SMN1
MLNRNSVAWRSEEELAAWAETYEAALRDEGLIDYDDMVVFGQRLIAEHDWVLPLVQAKFPVLAVDEYQDLGVALHRIVKRLAFDGGVRLFAVGDADQSIYGFTGADGALLMELAARRDIEPVQLQLNYRSGAGIVTASEMALGEARGYQASDPARQTTIEFVLRPGGTADQAAHAVAQIIPAALASKPGRTLGDIAILYKDYRAGDIVAKAVATGGLDYIRVDTAAPYRKVALTSWVEDCAAWCAGGWRVGRPQLRGLLDRYRAFHRASLDDSQAKREEQELTALLWELRADQQPAREFVASLRNGVVDHLLAAELALADQKEQLDRMTAALAEGGALASLDITSLGGRDGSPDHLNLLTLHSAKGCEYDVVIMVGLDLGNLPWRNETPEKLRESRRLFYVGLTRARDEVHMLYSGFVDGRYGPMRFGRSPFLDELEARMRAAGI

SEQ ID NO: 64284 - protein, 333 aa, Pseudomonas syringae pv. actinidiae ICMP 19073
MRCPGSLDQLNPQLQLRLLRHLKTVAEDRGIQVIITTHSTVISAAVSLDHLIHISNDGRPTAVPLRLCGLPLQSRRFVDRWLDVTKSNLLFSKGALLVEGIAEAIVLPELARIVLRPYGEGKNCLDDYGVSVINLGGIYFNHFMQLFCDVTGAQPGENVPIRCAGLTDNDPPKSVETVTGEDGKEKAVPFLPHDGDCPVGDNPALELQGPIGQSQYSRLFAGKYKTFEYDIAMEGNNLRCMSTTAASLWPVPDGDVVKGLKAAANLDFAGMKSDERAHYAGDMLDRIEKKEIGKGLYAQAFADTLADLKEGFVVPEYIRLAILWACGLEDQAR

SEQ ID NO: 64285 - protein, 583 aa, Pseudomonas syringae pv. actinidiae ICMP 19073
MKFTDEQLAYIAAPLDRHCYLKACPGSGKTEVVAAMVSSTVQGWSRAPSGIAVLTFSNSASDELRSRVHKYLGQPLGLPHCISTFDSFVFTRLVASIARELTGYPGKEGDYRIRILEKEADIFHTRRPICGRHISACKYNYDLEGKRFKFSTGDRALDNQLNTAEVSQDTKDDLVSTKRGLWRAGYATHGEIDMLALLAFRDRRFDGYFSRVARRFPVVFVDECQDLSAEQLKIVRKLSDLGVSFHFVGDLNQSIYGFRKSNPANVTKLIEDLQFKRYELTANWRSGQAIVDLCSNIVGTGNVLGNPEIPSIKPKILEYAQCPSELLPTIRAMTGAYERVVLVARGHATLQRLRNGKTHEGIELLAVACIGASSGNLSDLKESLRTFAKWLVGRLQMQVTKAGPYCPISMTSKLDWRKFIHQSLKFMVASGAGDANQTWSAWVRCAKLALRQLPDEAFVPVEIREELQDLRKLHLVARRGQGEKPVAIRLLSQEAGENVLETLRYETIHQVKGETHDVTVVVSSRQAGKHGSHWSDWLRDRESEAARFAYVASSRPRHMLIWAVKKLKPQEKPVLDGLGFELS

SEQ ID NO: 64286 - protein, 800 aa, Pseudomonas syringae pv. actinidiae ICMP 19073
MKLQAYRLQNYRRLRDVVIELDDEISIFVGANNSGKTSAVQGLYSMLRGEAKKFELFDFSAALWAEIDAIGRTPPGDEDAPKQLPSILLDLWFRVGEDDLATAMSLLPSTEWDGKCVGIRVAFEPQDAHALVRKFHELHEKANNAASALVARRSVGAEADAENAAAVVADPGEYKPWPESLTKYLTKELSKEYTFRYYVLDERAFVGYQPKEADYAPLPLGKEPGGAAIIKSLVRVDFLRAQRHLDDPDAGSSDRAESLSRRLSRFYHRNLEKRGDDHAALKALDTSEKEVNFHLKEVFSDTLKRLAKLGYPGVNNPEIVIRAALDPTTVLGQDSKVHYVVPGAITAQLPDSYNGLGFKNLVYMVVELLDLHEQWKAEEDKRAPLHLVFIEEPEAHLHAQIQQVFIRNVLRLLEDANDHATFFHTQLVVTTHSPHILYERGFSPIRYFRRVSEQLDHNTEVRNLSLFKTCAADAPAREFLQRYLKLTHCDLFFSDAVILVEGNVERLLLPAMIETAAKRLRSSALTILEVGGAFAHRFQELIAFVGLTTLVITDLDSVAVKTDAENAAEQDAGAGAVDGNNEEDDLKPFELEDDDEAAPGGKKKSKKRGSTCHAHVEGAYTSNQTLISWIPKKRLVAELWEVTAEQKTLSLAEGTSAEVRVAYQTKVLVTVGATTSQLCGRTLEEAFGLENSDWCQAEANRSVGLKLKRAPNSPEELAEKLHERVIGKNFDKTRFALEVLASGPLNCWKVPTYIAEGLAWLETKVAHEIEADAAIANEVATIEPTAAGVVAVIAGAGQTT

SEQ ID NO: 64287 - protein, 643 aa, Pseudomonas syringae pv. actinidiae ICMP 19073
MSRRIDSPDTDADREIHACIAETPPQPFVVRAGAGSGKTTSLIKALDWVISEHGASMRAKKQKVACITYTDLAAKEILADVNDDPLVHVSTIHSFYWSITKTFQADIKVWLQNDLRRRITELEEEFKNYSSRVRQTTRDRNKADQQRYARSLETIAGVKTFNYGVGSDYAKGVLGHEDILQLADFLLQNRPLFRRVVALNFPFVFIDESQDTFPSVVKSFKEVEAQMRRKFCLGFFGDPMQAIFMRGSGDIPLEDHWRAITKPENFRCAKQILDVANAVRAQGDGMEQVRGLHERVDGELKPVEGSARMFVLPNTLNRIEALARIRAWSAATNNDEGWTTPDIALKILVIVHRMAANRLGFGGIYSALNDKTSEGMKQGMQDGTGWPVRPLLSFALPIVAAVKAGNEFAAMNLLRKFSPRLAPVALTGRRAAAVLRELHAAMSRLVAMLDEAGTTIGDIALHLCDTGLFEFDDRYVRVLGFVRDVADAAQEPEAADAVPAEGLSSDAAMAKFFKCSAQELWPYERYVSEGSPYATQHGVKGAQFERVMVVMDEEESDYRTYNYERVFASAEARAADRARALGGDENTWSRTLRLLYVCCTRAQRGLVLTFFVADPTTTLENVVASGILPRSAVFTQEVLAGWP

SEQ ID NO: 64288 - protein, 634 aa, Pseudomonas syringae pv. actinidiae ICMP 19101
MYLRALDVRGFKCFGEPFTIEFHDGLNVLVGENGAGKTGVISAVRQLFNDSESGKRIIGEHDFYKGFEAGAFASEELQIQATFSDLDDKDATAFDEWCGNYDEAKLTFIAKNQESRGRFKYHTYGGHEFTQPLDPETLDLIHCVYLPPLRDAESKLREGRQSRLARLLKALCRKELDAARKAGTQTALEQRVGDFNRELSQSDDFAIKLANQRIGESLKAALGMHLSQSTLIQFSEVSFSRIVEGLRLLYFPDLTNADPTQFRSLGENSLGYNNLLYIASILAELVLEVEEGRGEETYLRLLLIEEPEAHLHPQLQLRLLRHLKTEAEARGIQVIITTHSTVISAAVSVEHLIHLSNEGMPTAVPLRKTGLPEQSRRFVDRWLDVTKSNLLFSKGAILVEGIAEAIVVPELARIVLHAQGKGRDSLDDYGVSVINLGGIYFKHFMQLFCDVTGAQPGGNVPIRCAGLTDNDPPKSFSTIDDGEGREKPVPFLPHAEDHRLGNNPALELQGPINQSQFARLFAGKYKTFEYDIALEGGNLTTMLNVAADLWPVQDGKVAGNLREDAKRDFASMSSADKAPFAGALLARLDSEEIGKGLYAQALADALLARPADFVVPEYIRLAILWACGLEEGQA

SEQ ID NO: 64289 - protein, 600 aa, Pseudomonas syringae pv. actinidiae ICMP 19101
MNFTQEQLDYLASPLDRHVYLKACPGSGKTEVVAAMVARIVQEWSRSPSGIAVLTFSNSATDELRNRVHRYLGEPIGKPHLIATFDSFVLNRLVASIASEMTGYTGREGDFRIRILDKAANIYRTRNSICDRWISACKYDYDLGTTKFVFSTGERGLDKQLNAETLNQDTFKDLIATKKRLWRGGFATFGDIDMLALKAFKDRKFDPYFSRIARRFPLVIVDECQDLSAEQLRIVEHLARFGMAFHFVGDLNQSIYGFRKSNPENVTDLMVKLKFDPYELKANWRSGQVIVDLCTNILGGERIRGNADIASLQPRILEYEVCPSELLPTIRTMTQGYTKVVLVARGHTTLQRLRNGETFEGIELLAVACISANTGNLKDIKQSLRTFAKWLADKLELQVTKVGPYCPIVMESKLLWRKFLHESLKFMVANGAGKSDQTWSAWVRTAKLAIRRLPNQPFVPVELLEELDVLKDLNLVARKGQGDKPVSVRVLSQEVLEGPPDTLRYETIHQVKGETHDVTVVVSSQQPGPHQSHWQDWLRDRGSEAARFAYVASSRPQHMLIWAVKKLKEEDRPVLAQLGFEVPPPPPITVPKRAHLRSTR

SEQ ID NO: 64290 - protein, 361 aa, Pseudomonas syringae pv. actinidiae ICMP 19101
MLYLSLVLAAHSINRDVRSGKNTAIDPAKLKPPAFTILAMEEPENSLSPHYLGRIVNALKGSIGVDAQALIATHAPSMLRRVDPENIRYLRLGPNRCSLVSGIVLPAKEDVAHKFVREAVQAFPEIYFSRLVVLGEGDSEEIVLPRILQAKGAPVDESAVTIAPLGGRHVNHFWRLLSQLGTPYITLLDLDLARYQGGWGRLKYVNDQLTEFESHKALPYGFPAWDDANTRIREKNVPTTGSSETVFDHLEARGIFFSAPLDLDFAMLTAFPKAFNAVPVAPTPESQKAVLGKSHEGADQYTPQEQAWFDAYHHYFKLNSKPAAHLTALSSLSDAELLAGLPPSLDRLADAVIAALEESPE

SEQ ID NO: 64291 - protein, 560 aa, Pseudomonas syringae pv. actinidiae ICMP 19101
MIHPDRWTHSPGLTLEANAWHAIKDTEHSLVLLAGPGAGKTEILAQRADFLLRTGSCRYPKRILAISFKSDASRNLKERVSLRCCWEQATRFDSFTFHSFANRIVSRFRVLLTGPDALKPDYSIGKEAIPGEQITFMQLLPIALKILRTSKIARNTIRQTYAHVFLDEFQDCTSDQYQLIKLLFEGTPALMTAVGDTKQTIMGWAGALHGIFKLYADDFAARPLRLYRNFRSKPRLLRMQNSVIRDIDPSALMPDEMIGGDDGVIRAGNFSSSAAEAFSLANLIQKWIEVEDLRPAEIAVLFRGEIDLYGEELMEQLTLRNIPFRNENTLQDLLKEPAARLIIDYLTCLYTRGSNKAWSRLMDLFAPFDDEGNSDRTHKSFELCYKQHQKKVKAAAKTTTPYADWWELAKAFFDTLGHAVMTTLSSDYETKRRLKEIIRDTRDHISTLLQTEPDLPRALARFSDDNAVRFLSMHKSKGLEFHSVIISGVEQQTFRGKIGEERQVFFVAVSRAMERLIITTANQRQRPVRISAGKRWDVARQPHVAFVTYVTEHLSPKQPQ

SEQ ID NO: 64292 - protein, 361 aa, Pseudomonas syringae pv. actinidiae ICMP 19079; identical to SEQ ID NO: 64290

SEQ ID NO: 64293 - protein, 560 aa, Pseudomonas syringae pv. actinidiae ICMP 19079; identical to SEQ ID NO: 64291

SEQ ID NO: 64294 - protein, 634 aa, Pseudomonas syringae pv. actinidiae ICMP 19079; identical to SEQ ID NO: 64288

SEQ ID NO: 64295 - protein, 600 aa, Pseudomonas syringae pv. actinidiae ICMP 19079; identical to SEQ ID NO: 64289

SEQ ID NO: 64296 - protein, 361 aa, Pseudomonas syringae pv. actinidiae ICMP 19097; identical to SEQ ID NO: 64290

SEQ ID NO: 64297 - protein, 560 aa, Pseudomonas syringae pv. actinidiae ICMP 19097; identical to SEQ ID NO: 64291

SEQ ID NO: 64298 - protein, 634 aa, Pseudomonas syringae pv. actinidiae ICMP 19097; identical to SEQ ID NO: 64288

SEQ ID NO: 64299 - protein, 600 aa, Pseudomonas syringae pv. actinidiae ICMP 19097; identical to SEQ ID NO: 64289

SEQ ID NO: 64300 - protein, 634 aa, Pseudomonas syringae pv. actinidiae ICMP 18886; identical to SEQ ID NO: 64288

SEQ ID NO: 64301 - protein, 600 aa, Pseudomonas syringae pv. actinidiae ICMP 18886; identical to SEQ ID NO: 64289

SEQ ID NO: 64302 - protein, 361 aa, Pseudomonas syringae pv. actinidiae ICMP 18886; identical to SEQ ID NO: 64290

SEQ ID NO: 64303 - protein, 560 aa, Pseudomonas syringae pv. actinidiae ICMP 18886; identical to SEQ ID NO: 64291

SEQ ID NO: 64304 - protein, 634 aa, Pseudomonas syringae pv. actinidiae ICMP 18801; identical to SEQ ID NO: 64288

SEQ ID NO: 64305 - protein, 600 aa, Pseudomonas syringae pv. actinidiae ICMP 18801; identical to SEQ ID NO: 64289

SEQ ID NO: 64306 - protein, 361 aa, Pseudomonas syringae pv. actinidiae ICMP 18801; identical to SEQ ID NO: 64290

SEQ ID NO: 64307 - protein, 560 aa, Pseudomonas syringae pv. actinidiae ICMP 18801; identical to SEQ ID NO: 64291

SEQ ID NO: 64308 - protein, 771 aa, Klebsiella pneumoniae UHKPC179; identical to SEQ ID NO: 64244

SEQ ID NO: 64309 - protein, 625 aa, Klebsiella pneumoniae UHKPC179; identical to SEQ ID NO: 64245

SEQ ID NO: 64310 - protein, 719 aa, Corynebacterium glutamicum Z188; identical to SEQ ID NO: 64122

SEQ ID NO: 64311 - protein, 637 aa, Corynebacterium glutamicum Z188; identical to SEQ ID NO: 63255

SEQ ID NO: 64312 - protein, 729 aa, Staphylococcus aureus Bmb9393; identical to SEQ ID NO: 62500

SEQ ID NO: 64313 - protein, 597 aa, Staphylococcus aureus Bmb9393; identical to SEQ ID NO: 62501

SEQ ID NO: 64314 - protein, 598 aa, Sphingobium chinhatense IP26
MKIFSVVIENFRGIQSAKLVLPDHAVLIGDNNTGKSSVFEAIDLALGPDRLSRRPPVDEHDFYQGRYLPSPNPDAPEGAEPGPAPKITVEVTITNLSPEQEARFGANVEWLNTTTGDFYQEADPAGVDAAEIKAALRVTFVGQYDPDEDDFVGNSYFTRSLSEDETPASFSKKDKQHCGFLFLRSLRTGSRALSLEHGSLLDIILRLKEIRPQMWEGTIGTLAAIDVASDPAIGISGVLESIDKSLKKYVPREWGVKPHLKVSNLTREHLRKVITAFIATGAGDHAAPFFRQGTGTINMLVLAMLSQIAEDKQNVIFAMEEAETAIPPYAQKRIVHELRKLSAQSLFTSHSPYVLEEFSLDETVILSRSDNGQLSQSKIELPESIKHKRYRQDFRTRFCEGLLSRRVLIAEGATEATSFPVVARRLAELSPATYASLEALGVCVIDAGSETQIADLGALYKSLGKRTFALCDKQTDAAKAAIEAQVERLFMHDEKGIEDLILNNTTQAALERFSDQLDWPQHLLNQYPNPKAQAAAALGAYFKWSKGNWGIAEFLAQCSEVEIPQWLRDACTTLKAACDPPPQPAEADGEDLFADILG

SEQ ID NO: 64315 - protein, 608 aa, Sphingobium chinhatense IP26
MVDLTETQKAILQSIGHQLVTGGPGSGKTTVSILKAAKIAREELKPGQRILFLSFARATVSRVLEAIDEESAITREERRRIEVDTYHSFFWRILKTHGYLVGFPRRMTILTPPNEAIALSAVRSGYKAARNLSDEEKAEKRVKEVAERVRLATEEGKVCFDLFADRVATLLHGSDKVRALISTMYPYIILDEFQDTSADQWRVVQALGANSTLIALADPEQRIFDFIGADPERLNHFTAAFAPTVHDLAGDNHRSKGTEIALFGNDILTGKFCQNDYKGIDCALFESNPNQAYASLVGQVLQARKRLIETGRSDWSLAILVPTKKMTRMVSDILREPFGNVPPISHMAAVDMEGPILAAEIIAFLLQQRGHDGCFDEFVELMCSYFHGRGGATPTKRDMDEAARFRKALSKWNECLAKGRPTPGNSVLQGTYAVHQAIAALTFTGDPGADWVAVRGVLDAGACERLKDVAKEVRNVRLLERGTQLRQGLAQDWRDVSGYSNALAITRQSFVQEHFATAHKPESGIVVMNMHKAKGKQFDEVVIFEGWPKRFKGEIVANPDRIVSGNVHDGAMTQARQNFRVSVTRARARTTIMTPRDDVCVLLRPGPA

SEQ ID NO: 64316 - protein, 625 aa, Geobacillus sp. WSUCF1
MMYISKLVIEGYRCFNEKTEIPLNEGLTVILGENGSGKSAIIDAIRLILNEDEFGNVKITEKEFWHSIGNTKNEIRSNFTIDLIFSGLNEKEQLAYLPWLNPNDLCSASLHLKVQNKTNSRNQYKRELWGGNSSSSIFEWDTYNSIQCTYLPPLRDAEQRLRAVRGSRLARLITKMESKNNARERLEDIVKQNNKELLKDELIVKAKDNIKNRLIESLGEQLAQDISVSFSETRFERIIENLKLLFYPLLDNEVSVEEFRELSENSLGYNNLIYLATVLAELEQTEENELSTRILLIEEPEAHLHPQLQTKLLEYIEKQARISGVQVIVTTHSPIIASSVDLNNILVVKRTDFNNSPTIVPLKNVGLTPKQKFFLQRWMDITKSTLLFARGVILVEGIAEGLVIPELAKRVLHKYLNSKKKISDYSLEEYSVSVINMGGIYFESFFQLFMNAEEQGKGIPIRCAGITDCDPKESDTPYVGNECECNNPALKLQMILKDNKYCRLYSNSKTFEYDLALCGNNFLVMVDTFLEILETDGSIREDFEKYKKEFIRKTDSEKAKIAKCLLDRIDNPKLCGKGLFAQHLAYKLANEEIEFTVPNYIEKAILWACNLNERSESNVPTNSGN

SEQ ID NO: 64317 - protein, 621 aa, Geobacillus sp. WSUCF1
MKGVKVMYQQILEIKPINKLDLIYSVLNNEDIKRLSPEQATFILHPINRDCFLSACPGSGKTHSVGIKIAYEIQNWISKISGIAVLSFTKNAAEEIKNRANRFLGNLNVSHPHFVGTIDSWLHSYIFHPFGSVVTRYKGAEGDVSHKLIQDGNHGTWLKNFSTNKISILDYTIDMNENPTVCDEKKKIENDPLTISTLLNKKKQFAEKGFVTYADIEYWCYKLLQQRGDILDLIAKRFPYIFIDECQDLSEIQLGILSLLKQAGVTIHLIGDLDQAIYGFRKVYPEKVIEKIDEWKMERLQLTINHRSVQQICNVVAKLGGKQQIIGTRSSLNQSCLLWVYDKKNDLYQLQEAFINLLDKRNLNVKDAIIIARGSSTIRQIKGYPKDTKLDKAKNHIVYKIASAITHWSSANFKDKNVALELFSQAIIDLAYAGKGKSGIITTPFSYNPIDWRIKLGTYLEKIASKSDFIVKETSKQIWKNWVKDILKSEFKNIWDELKDVEYSFEKIVRRLRSPEGLSDIPMSKKFLMGEKKIEIKVKVDTIHKVKGETYRAALVVSSPTKKSDGGHFTQWLQKGTEASRFAYVACSRPQDLLVLAIPEYSEEILNLGFYLDDMKEYISV

SEQ ID NO: 64318 - protein, 699 aa, Acinetobacter haemolyticus MTCC 9819; identical to SEQ ID NO: 64082

SEQ ID NO: 64319 - protein, 577 aa, Acinetobacter haemolyticus MTCC 9819; identical to SEQ ID NO: 64083

SEQ ID NO: 64320 - protein, 599 aa, Acinetobacter junii MTCC 11364; identical to SEQ ID NO: 64070

SEQ ID NO: 64321 - protein, 662 aa, Acinetobacter junii MTCC 11364; identical to SEQ ID NO: 64071

SEQ ID NO: 64322 - protein, 639 aa, Vibrio parahaemolyticus O1:K33 str. CDC_K4557
MKLDKLRLSCFQSYGSTSTEISLDDLTFLIGPNGSGKTAALQALCRMFAFDPSLRRIRKSDFHVPHNESEQPEERTLWIEADFLFPELHEEGDNTTVSPHFGHMRLVDGEDTPRVRFRLEASMGIDGDIDESLIYVLEVDDNQQPKSTAKVSRTDRSQIQIHYLPARRDPAEHITFGANALLGRMLRAVNWETEREAVKGHTDQISASLAANLSVNALSTSIRDSWSRLHKGQFFTQPQITFVASEIESLLRHLSISFSPGHDEANVDFSRLSDGQKSMLYLSLVLSSQAIGRSVLQGDESFDPDKLRPPVFTLIAVEEPENSLSPHYLGRIVSSLTEMVGQGDAQALIATHAPSMLRRIEPKQIRYLRLNPDRETTIASIELPDEEHSGDAHKFVTQAVKSFPEIYFSRLVILGEGDSEEIVIPRLLESKGVPVDAFGITVAPLGGRHVNHFWRLLEGLNIPHITLLDLDVGRYQGGWGRIKTTNDQLKLHKPALQLTDGYESIPTWNDPQHKIRAFPHYLMELEKRRVFFSYPMDLDFAMLSAFPTAFNIEADDQVEPELPNIKAVLGKSCTEASEYSDDEQKLFITYHKLFKVGSKPAEHITALSRLSDEQLLAHIPPSLGRLVDAAKEILLELPE

SEQ ID NO: 64323 - protein, 548 aa, Vibrio parahaemolyticus O1:K33 str. CDC_K4557; identical to SEQ ID NO: 63215

SEQ ID NO: 64324 - protein, 686 aa, Eggerthella sp. CAG:1427
MYISHIKVKGFRNFKDSDIEFNDGLNVLIGHNNAGKTNLLKALQLVIEPHYRYRRLNANDFNRDISLENLKSQSPSVTISVTFKNSNIEYNEQEEDLRVVANWFTDMENGYAAMLTYRFYLPAEKEDDYKAAMADVEDIKNGWSILENDFLRYYVYKLLAGPLDAPIQPEMDKLERFDFQFLGAMRNVEDDMFYGRSTMLKDVLNFFIDYGIKTKGDKTKEEKESELKDVRNDFGNEATALMTSLLERLSEGKDVMLDYAHETGASFNNALPDFKSTLTEQDLFSALKLIIKYGEDIEISATHNGLGYNNLIYMSLLLAKMQADADGNYMGDNAKVYPILAIEEPEAHLHPAMQYKFLKFLDKNLKVDHKVRQIFITTHSSQITAAVKLDNIICLHKGEDGVTNVCYPGKVFTDSDEDKKSKNYVQRFLDATKSDMLFARKVILVEGIAENLLMSTLARYDGKSLEDQHVAVVNINGRYFNHFVKLFNIESSPNAIPKKVACITDRDPVRKKKEANCKFTVCYPFDLYKDNEHYEYSVNAEEEENAFRDHSSIRYFSQDANKGKTFEYELALCNPDLELLITESMSNQSEIKNMMGGDYAQAKVKVKNNKKWDDVKTSIDNTDWEEDEKRRHLIAARYLSSLDKGENALELCLALEENFELEAGNEHKKIFNVPPYIHNALEWLLR

SEQ ID NO: 64325 - protein, 552 aa, Eggerthella sp. CAG:1427
MVIEISSDSRIDINHHFRVSAGPGAGKTHWLSLHVSHVLKDSESLGKMGKVACLSYTNVGADTLMGRMYEDRSRVLSCTIHSFLYAYIVKPYLHFIATDEGFNIELLNGEDDRILSDYNTFEEIRKAVKQYYAEQDATFTAIRAAKWKLQEDGSLKCYANPPKKCCKKGYALNENAYVVYKKLAWKKGYMHYDDVLYFSYKLIQKYPFISRTLAIQFPYVFIDEFQDTNPIQAKIIKSLGENGAIVGVIGDYAQSIYGFLGADPNQFASFTLDGLLDYTILDNRRSSNEIIDLLNVIRTEFQQHPIRNEHGMKPLLLVGELLACYEEAKRIAANEVHALSYRNIEANILKQCVDAHVQNSNLLNQIKDSNANRKEFVTIWIKAIEHARNKQFGAAFKMLENIGVMDIAAYTSVKEALDDYEKYSNGTLKDFFDYLCERWKITKIKKDTSIYSFYSSHTYRELSQCVGLLEDSSAQRTVHKAKGDEFENVLVVFTEEKALNMIINPNLKDNESDRVYYVAMSRARERLFLTAPSISQQMENTLRRLPIDIKKI

SEQ ID NO: 64326 - protein, 593 aa, Eggerthella sp. CAG:1427
MYLSRLHISKFRVFDDITLYFKNGINILIGENNSGKTAIIDALRICLGCGKPDNYIYVQECDLHVNPENPSEINAVIQFDLIFEFGQASIERECFYDFISQDKDNPDKQTIQLHLKFIQENNGKKKYFKRIIWGGDNEGQQVPYESLQEIFYTYLSPLRDAVSCLRPYSYDNKTSQLFNQLTKYDKGDESIPLNEEKKKSLAKNLYQIFEDDAYDWKHILITGKSKVNAHLEGTGITLKHPDIEMRYVGREFSDVVRGIELKCPIYKTIEAGQEQKYFTLSQNGLGENNLIFTSVVLGDLINRCEDHELEIYNALLVEEPEAHLHPQYQNTFFEYLNELQNKGLQIFVTSHSPTITAKSDVDNISVLQRKQSIIQSFSFDELSEDDYPKESKRHLRKFLDTTKAQLFFANGVLLVEGVAEAIIIPILAKKFLTEKIDLCKSGIELVNIGGVAFNHFGLLFNNDDERKRLLSKCAIITDSDPEDDGDISDRAQKAKDLEKHNLKVCLAPHTLEYDLFEQSERNKTIMREVYRNMHTQTDDLRGDFSVATLMDKLKSNKDKAEFALQLYDRLEKEEAFDVPDYIKDAILFVVPTE

SEQ ID NO: 64327 - protein, 562 aa, Eggerthella sp. CAG:1427
MKACPGSGKTFSVAARMAKLLRENNLSRHQGIAAISFTNTACEVIQKELKETFGCTNIGYPSFIGTIDSFINTYIFLPYAHLVMECDCRPEIVGTEFNKWYDYDASKRNYDRTKIIDPNYFVDKVSFNQYGEPIPLVTAQEFNFSWSKMKKKNGQYRKDVTDIIEAKHIHFAQGKANQADATYFAFRILNKYPLITQNIVRRFPILIIDEAQDTTELQMAIIDNLSQFGAESIMLIGDPDQAIFEWNTANPHLFMEKYNSPDWHSLDLSENRRSSEKICQLANYFSGNTMSSIASDKDCAKNPCLKGHLSTSESVNQIADNFIETCKKIGLNESEYAVVFRGQSFGETYFGLANTDNPTRQNSPWINGHYGVRDIVYGKYLIDQGKYNDGLSLIEKGYYKITKRVRYVPASTIRREIAEVGFRRHRAEMFDFIQKLPSTNDTLSNWITELQQKGINLTIDLGKANVRIESLFRTSNRELRQERPYLRTIHSVKGMTLEAVLVFLSKKAAHTNYTTILNDPGYCIDNNEELRIVYVACTRPKKLLWIAVPSDDIDCWRNKLSL

SEQ ID NO: 64328 - protein, 570 aa, Eubacterium sp. CAG:603
MKLIRLIIENYRNFEALDLEISNMNVVFGVNDIGKTNLLSAIRMLLDPQCRRNGFVDSDYHLKDTSKKIRIVLGINVSDEEDEDTKKIFAKAKVIGTGKDTLYISLETQYNAENLFSEIHMSWGDDLDDLEPMILTQQFRCDVDNIFNVIYIDSSIQLDAVFKRYARTLFQNPKSIEESEKTDLRACIDNLNSTISGIKLIDEFQNNLSKEYEHYREEGLEIKIKSEVEMDNIYSKLIPYISYEDGKTYPTAGDGRKKIVEYSILGMESRESEKKKINIFLVEELENHLHRSLQISLSFQLFEDRLFRHMFITTHSSLIVSRMDNVTLVKLYNPEKADGKSVEYIVPKEYKKNKAKLNTELSEAIFAEKVLLVEGPSEKILFERVLTDLAPKYECKGRYILQVDGVAFKTYYEILNKLGIKCLIKTDNDLKYYETDGKIEFAGINRGAEIAGISKKNKRALNTIISKTQFDSERKQYQLHYFNEFSRTIEELKDKGIFLSQIDLENDLYEVIPSTMERYVSSTGGRLDAVDYLQKAKQNRMVALCEKITKTDSRAIFEDDKFLCIKELVQ

SEQ ID NO: 64329 - protein, 518 aa, Eubacterium sp. CAG:603
MSEIRDSKIRESILTTDGNIVIAADAGTGKTYMTVERIKHDVMKVDNYQTYAAITFTNKAAKELMDRLGEIQQGFVGTNDKFILNEVIIPFSKDVYPQVKGKIIKTDYSAAEKCDKGNDLLARFVEDGIIGTYTNSHHNFAFKLALHILKKSHAAKRYLSNRYFRIYVDEYQDSDKDMHNFFMYLNEELCIPFFIVGDLKQSIYEWRGGYPDGFKNLLQSQKYTDFKLLHNFRSNQQIQNYASIFIDDIRENYHKCVLNGEVKGCIYSGDSVLIQYIEKWLMQKGNCAFLVYSNREAKEWAEKLAGLQFVYIPRAPIDEPELDNEQVWVARCVANYFYKKRYSEYSFYDEIPNQDAYDIFFIKNTLQTLKKEYYKNGWTNLATECVEKLYQYILVAYDEDKMKCEIQKLKETIEDTQYEKSFNIELYDRIVTTIHSSKGLQYNQVIINSDNFIYNNELSNSEVHYVAITRPEERLLVLFKQGGRKAEMYYRAISERARQIEVEGIQQSAKDIIQIENI

SEQ ID NO: 64330 - protein, 571 aa, Firmicutes bacterium CAG:822
MIIKKLKINNFRNLKKLEINNGNNIKYILGNNGIGKSNTLEAINYFFTKSSFNEDDFNDVNSPIEIEVSLFLNDIELGYFDDMFDVGDSNIISIRAIQESPNDRIEYYHVDTATAISYQKIRNLPCVYYNTINAPDELNFMKTKNSGKFLNNLIENYISENKINVDELVNPEKIDNISKHLNQILKLINFINNNNLSVNFEHNIIDLLPRLIELKDEDEMSVNKMGSGVRFSSYIYFELLNKIMQTVDNNSDSIITTSDNKRYISIFVLLDEPEIHLHPYMQRSVINDIRNIINNNDLKFLELIKQVFGLDGIFGQLFIVTHSPNIVSTNFHEIVRLDFYKGDVRAYTDFDCDFDDKDEKHFVLQNDRIKEAFFAKSCILVEGPTERVVLPIFANNMGINLDDYNIGIIQADGADSIPSLVKILNHYGINANAVMDKDKYNPSYKNVVSTKYTFFEEEYIMNLLSHNRTHILYNILNDIGQRKDLIIQGSQISKVQKRIRLSDVDEKDYKLIDALKMTKDNQNQKILVLTTWLYGNKNTNFSICLANNTIKDDIPDVYYNIIKVAVLNARK

SEQ ID NO: 64331 - protein, 586 aa, Firmicutes bacterium CAG:822
MPESSIIDKITQIHNGDNDQINIILSNEKKIIVEAAAGSGKTKVLISFVAYKIAAKQLSSTKKILALTFSVNAAYKIKKDVIEQIPSILGNKMLNEKNISKRVMVSNYHGLCRRILNLYSGKILKFQKRIEEFNIVDDSEILKKVILTDEEKELINDFDQVIKEGNIDKFNSLYSQYNNLILDKVSISGYLTYNSIITLVLKIFDENKVINNQYKSLFEYIVIDECQDTNVLGYELLKKLIDSNTKLLFFGDSLQRIYGFIGAIPNIMNLLKNDYNMRLVRLNHNYRFEDNQNLLLLDRNIRYNSYNPELITDLSHPNIICSNTYESEYTWIINKVKENIENNSNSTILVKSFNGNDNTKRLLEKLQEENIPFFNALFTDEGEEYIDFHRTAYNVFYREIYEKRKIAKKVLEKCFVEISDKYKDSNNQVYLSLLILLRKFIDSISEISSAYKFDDLLFFIMDVLLNNGLKQYMNKIDEKVIVATIHAFKGLESDVVFLVDLERNIFPSYYTCKNCSSVDCSNYDGIESSFIDELSVYYVAITRARKELFISFSKNQLTKFGIKPCKGSCLINLPGIGYDNYLIISE

SEQ ID NO: 64332 - protein, 662 aa, Clostridium sp. CAG:1013
MQLSKIKIKNYRLLIDAELEVDPKTTLIVGRNNTAKTSCFECIGKVLDGTPFSFNDYPLSKRNNLYANIASFMAKEIAFEDLCERLEPISIEFLVDYSLDDPEDNLGALSPFIIDVDVDTTTALIRAEYKLKADEKGIWKILEPKYYENGSFSPADDVHNAIISNFHKLFEMMIYAINPKKPDEKQSKKQKELAELFPFHIIQAERRLGEDGTQDNSLSSLISDFFDMSEDELDPSVAEKVKELRAIVENANKNVQQQSDSILSSLVSNAVGFGYPNGEELQLGVTTQLSIDDQIKNQTQLSYTAGTSKERLPSTYNGLGYKNLIKMEFLLAAFAKKVEKCGDACIPLLFIEEPESHMHPQMQHAFAEYLEAFLAKITSVGIQTLLTSHSAHIANTMVFSKIRYAQKTKAGVIYKNLNTFAQENPSNTDFIRKYLTLTKCDLFFADKAIFVEGASERLLLPDMIHKCAKAGDFDSREYKLPAQYYALVEIGGAYAYKFIPFAEFLGIPCLILTDLDSVSGQKGANGRIYYKSVPVSCGETTSNETLKWWVRKNKGLSADDNTQITLTDITSMSPADKTRCKCHIEFQTTENGLCGHSLEEAIRNVNRAHYELGDTPTEDDLEFSGKSKTDFALNLICECEDYAIPAYIKDGLVWLNDQRVLE

SEQ ID NO: 64333 - protein, 581 aa, Clostridium sp. CAG:1013
MSEEYKRTNYDLAKAEADKVDEQIISALQNGISFRVEAGAGSGKTYSLNKAIEWIQANKWTEYRRKKQTVVCITYTNAAVDVIAERLSKDSFILPSTIHSFAWNAIKQYQSFLIDIVTSDPDFLPDEGDFFKVKEVTYTLGHRYKENGIQYLYHDDVLKLFCRLLDNAKFRRVFADKYPLILIDEYQDSYKPIIDRFINFFIAEKKGPQFGFFGDAWQTIYQANKACGLIENENLAIIKKGSNFRSAPRIVRLLNDLRPDLPQTSAIDDFDGEVIVITCDDYTGPRRTERNLKGELPAEELKNRLSNVTEKIKRESSEEDDLKVLMITHKVLATQQGYEQLLEILADGLRDKEDLFLLFFMDTVEPIYKALKDSNMQLLFDTLGIKRFPIKKKSEKVKWKELQQQLEDARTKRAIDVFELIKRTKLIPIPPKLDGWYHLYQKAPDTVYVSNTSIQSFLELDYLQFTAAIDFLFPDAMFSTEHGVKGEEYDNVVFVISKGWNLYQFETYAPMITGHSNVPEGKQASYERNRNLFYVCCSRPKKRLFFFVSVPVDAVFRAFLTKLVGADNIYTYSQYLETDLK

SEQ ID NO: 64334 - protein, 695 aa, Firmicutes bacterium CAG:129
MKLSKLKLWNYRCFGSEEQVILIDQLTTFIGNNSAGKTAALSALNCMFSENSNDRILHRSDFHLPKDILPDEMEQQSLYIEAVFEFEELQSGSNGGEYAIPIFFQHFVVDNPGRLPYLRIRLEATWEKSNTIDGSIDSKISYITCPEFAEIEEGNRTNASRRDLDKIRVIYVPAVRDPSKQLKNASGTMMYQIMSSINWSEETKGNVKAKIKELNEQFEEEKGVSMFGTSLGKQWKTYDSDERYSTASLRFNSADIETSIRKTEVVFEPTETGKEYTIDQMGDGLRSLFYISLVDSILDVEGQMVREIEIDPEHTSFNRKPPILTIVAIEEPENHIAPHLLGKLVGNLKDIAGKNNAQAIMTSHSPAIVKRIDPENLRYFRLDRELLASKVRCITLPDEERMQDQYKYIKEAVRAYPELYFAKLVILGEGDSEEIILPKYWEAIHGNTDVSGISIVPLGGRHVNHFWRLLNDLEIPYITLLDLDRERDGGGWGRIQYVLKQLIANGYDRNVLLNTTDSGILTDAEFEGMAGWNVSAITAMQTWIAWLEKYNVFFSAPLDIDFMMLEQMGDTYKATLDTREGPCIDIAQSGKKERITKIENDGEIHSEYETRILKDIKNTLKEEGGDGHTYSPEQQKLMVWYTYFFLNRGKPSTHIAALSQLSDEELKENVPPVLQRLIETADHILKGDKNENCAS

SEQ ID NO: 64335 - protein, 622 aa, Firmicutes bacterium CAG:129
MKIVHPDKWLPCDGISLEEAADTAVRCSDRHVLVVAGPGAGKTELLAQKAAFLFQTNQCREPQKILAISFKTDAAQNLKERVEKRCGTDIKGRFVSMTYDAFAKNILDHFLYALPDELRPATDYLVNDPDIIDAAFHCAGFKNPNGFTQSRLKTEYDDILSRISLPLTGDGLGHKVWPLLLKGFNGNKATLTFKMIMMLAMYIIETNPYIKQALQMTYSFVFLDEFQDTTAIQYAFVKECFWNSGTKVTSVGDNKQRIMVWAGAVKTIFNDFYRELNPKCIRLIMNHRSAPRLVALQKAMYESLKEKATEVCASGNWAEDDGNIALFIADNEQLEAAAVSKDILLKISNGVEPHDICILCKQKPQDYASAIIEELEKHGVRARIETGYQDLIKEPIVDLFIKFMICADSRKHPNEWTFIEELLVELWGISGMRENDTFDEMQRKLSAVVNVVKKNIQQKLDTEQWHSTLNSIIDFFGIGNIKAKFPAYKQGTYFMNVINQFESLFFEEYVAAHGVWNLAIENFRGDHSVPIMTIHKSKGLEYNAVYFIGLEDSAFWNFRNQPDEDRCTFFVALSRAKASVTFTFCKKRTGMKCPMQRHNAINEFFDLLQRPGIAEVKRFQNR

SEQ ID NO: 64336 - protein, 652 aa, Clostridium bartlettii CAG:1329
MYLSEITIEGYRVFKEKTTINFNRGLNLLVGENGCGKSTIIDAIRILLNEDEYSRNGINDEDFYSSKDYKEQAEKISIKGKFEDLSEDKKIEYLTWLDNNYDAILNLDIINKRDKRDHFKKNIWGGESSNSIFEWEPLNDIQCVYLPALRDAEKKLRASRGSRLARLLLNLSQEELKAKRKDGNLMDLEEDVKTFNEQLASKSQIAKADELINRNIKNALGNIFGQNTKIQFNDFSYEKIVEGLKLVFFPEISQSKDITYRNLAENSLGYNNLIYLATILAEFEGLKENYTSPRILLIEELEAHLHPQLQIKLLKYLEEQANESDIQVIITTHSTTIAAATPIKNIISINILKDNSIKITSLNKCGLDDDSEKFINRWLDVTKSTLLFSKGVILVEGIAEAMLIPKMAEIYLDSLIKKGSKEKIIPKTLEEAGVSVINMNGIYFNYFMQLYNGYKPIIPEREEGESKKDYKERKNKIIKKEIYNEEEIESTDYIPIRCVALTDNDPEKDDKPQQGEGLEGKNYNLYLIKQLENMTNNCKVFKNEKTFEYDIALEKDNIKPMIEIILDKLDTNGDTRKKMNGYLEKIEQDQEDIETNEIAGDILHEIDKSYIGKGLFAQLLLEKIEESGKCEIPSYIKNAIKFVLDLKDDDND

SEQ ID NO: 64337 - protein, 646 aa, Clostridium bartlettii CAG:1329
MIKIRKQICEAICKKSTCSQDINECDGRMAHRCKNINASFINNLNDNQLEYIVSSIEDNIFLKACPGSGKTEVLGIKSAYEIINSRESYKGLAIITFTNSAEDEIKKRVEMYLGETLRYPNYIGTFTSWIHGYIANPFLSKISKYEGNNENDKSIKIIENKEIPNFLRCFSSNYSYKELGNLNPCEYYYDIKEKKIIYCGNKLKNSKKSQEILEKLLDDNEKRLDDLKKLKCKFFKKGFYLYEDIEFLVYILLLKNRDIAKFIANRFPIILIDECQDLSYIQLKIIGLLNKQGCKIHLIGDLNQSIYKFRNIDPQDTLNFINKLDFKQMNLNQNYRSCQEIVDISQVIINEDDDVQAISKKVVEKPLLAILYEKDKEIDVYNKFKDLIRDNGLDLNKSRIIVRNNTLKYKLLGLKKQEGNNNRLETLARAMYMWKNVNNISEFRMTFNLFAKSVQSIYFSGIEHKGEKFFYKPCELDMDEWKGLVNKIKQRLLLYDNLLDFSLTWEKWKKELKKIIDDDINSISELENREYDLGRIRSGNKNKTLEEILSDKESNIIDCKIETIHSCKGMSLDSVLFMSSYKKSNNQDSGTFWREWFDLEYIGEKNRLAYVAFSRARHLLVLGIPKSSKFTDKDKETLINFGFKVI

SEQ ID NO: 64338 - protein, 665 aa, Clostridium bartlettii CAG:1329
MKSPYISKVIIENYRNFKNCEFNLSHKGVIIGENNVGKTNFIKALQLILDPSISEENRCLNEDDFFDGLENPVENNLEIKIQIFISNYQEIGNIMAQLDDATVNDDDGEKRLKITYKYYPMYDNKGNKEYGYIIYKGEDEENKFTYEDRRYLNVKVIKAIRDVESEINNSRKSPLSKLIKNYCIEKNELDIIAKKLAENGSDILQLDEIVDLSNNINNSFSSILGLDNDFEVSLKTMNIDPNKILNSMKIMVSKRDANDVSLGLNNLLYISLMLLLIKDKTIPSYIKFENYEKLIKYKDSDIIDKCYTKNHNGNYFLNEDLDNDNKTKLYKFMDENEPSDNGITILVIEEPEAHLHPTYQRLIYKDVIKNNDSSVILTTHSTHITSIADIKSIVHLHKKSNGETKINTTANLNLEEFELIDLERYIDIKRGEIYLGRGVILVEGIAEEYLIPKFAEKMEKSLDEKGIITCNINCTNFKPYIKLLMRLDIPFVVITDGDFYIEKNNDKGEKKKEFHIMHDVYRDCESYGYLGLENIENLVKELAITTDNIPEDINQKYELFNELGFFIGKNTLEVDMMNEAYPNNDATNVFCEIFNRLTNGGEKQKENFKKEILNREYWTCLKKIEGNGIGKGRFAQAITPRILENHIPQYIKDAIEYIFKKVENY

SEQ ID NO: 64339 - protein, 616 aa, Clostridium bartlettii CAG:1329
MSYYKEKIEQIKKDEYQYNAYNTEDSTIVIAGPGSGKTTVLTLKIMKLLNEIIKKPRGLACMTFSKESAREFKERLTKLGYKNRKNVFLGTVHSFCVKEVLGRYAHLYKKYNIPLPIKIISTQDKKRLFNQVVSDLKLDGLCISTLDMDKERTLNISGMSTVNVESYDVALKVAQEYENRLINLGYLDYELIVKFSTILIQNEEYVRKSLSKRFPWILIDEYQDLGRPLHEMILSLFTTTNIKIFAVGDPDQSIYGFTGAIPDYLNELYSREDITLIELKNNYRSNQDIIDASQIFLKKNRGYKAVARRDEQAEFTFIVCEEDLEEQYNYCVENIIPKYRELDIKLDEIVIIVKNNKDVKAMAHKCQCKDIPYYIAKNEYDRSDTIRWIESCAKWVLDNTLVSFDSIFSFWENIVNKHYKNKINIKNRIFEKRSLQRILRSSYIYSDDLKIWMEFLIKSLDINTLLKDSSIYPDELNNIKKFIKVLKESGYCDKGIEFFSNVGRPENQVTITTRHSSKGLEFEVVILLGMEEGNFPDYRSTTQRQIEEEERICFVCISRAKKSCVLIRSQYNNIQKRNGGIWKKTMQESRFWTKLYNRYGCSENSEMVTEHNINKK

SEQ ID NO: 64340 - protein, 578 aa, Firmicutes bacterium CAG:884
MKLSRVKIKNYRNFFDEDISLNNETIIIGPNDVGKTNLLMAIRILLDKSLSYLDLEPEERDFNIFSDEEEITIILEFSEISENSESFIYASLGQDIEDSKMYLMYKGYKNSEEKFKFFMSAKEDKESFHEIPGRNKYINLINCVYLDSTRQLKSFLKKSKANIINSYKQKRNSKEIDDDNNLILEIGKQVNYLNQKVENVSYISKSTEFIKSELSEMSSHNDNLDIKFSSYNDTNEIMDNVELITQVDGKNVNIGGDGRSNQIYMSMWIKEKNEKYDDSKQFVIFILEEPESHLHFPLQSMTIRQLLKKINSQLIVTSHSPQVVLEFNPFSIVKLSYTKDKKTIVSNNGCSKELEDDVIKFGYRYNLITGSMFFSSGVFLVEGVSELLIYKYISSKLDINLEKYNIMIVPVDGIGFKPYAKLLDRLSIPYAVRTDNDIVINSKNKKIYYSGINRLIDLHNEKIMKNDWISKEEFSNLNTEKLSSESLKLYQKYKKDFMDEGLFISEKDLENDLSNIDFLSDYIKQNYNGKDEFVKYLQNSKAKNMYDFIDEIKNINITRDNIGDFYKPIDWLIGKVNE

SEQ ID NO: 64341 - protein, 526 aa, Firmicutes bacterium CAG:884
MNNFTLTKEQLDIINAEGNIVVIAVPGSGKTTTITYKIKKILSELDEYQGVIAISYTNKASNELKGRVMNISADLHNSFFGTIYSFYLSEIIIPFAKYLYNYYKEVEVVSRNDFDCIEFEKLKEEEKIEYLAKYFKDGLIILEEIPFLANYVFDNSISCRKYIKAKYAYIFVDEYQDCECLQHTIFKKIVGLGIIGVAVGDPDQSIFNYSGSSPKFLLELSELSDFNSFGLTINHRSHPSIINYAYQFLFPQKKYEICDDKRVYKWNITGDEKILANRIDNLIPRLLSKFNINNKNEIAILCRNNSTANLLFNYMKTPTIYFCETPIDKSSKSYEIFFRDLLIYISGSQKLYPENILDNQAIVINKRKYQNYVNTIINFKIDFFNTEVLPIDEMLNLTKNIFGGDIDLSNIIDTLNNDNYLVTYKPMDLEKVHIMTIHKSKGLEFDAVFILDLHEYILPKIDFKNGGYIDINEDKCVHYVSLTRARKAVIMAVNSIRHNSKGEAKKGIESEFVDNLKRPDLIMYRK

SEQ ID NO: 64342 - protein, 732 aa, Bacteroides sp. CAG:530
MKIQSVHIKNYRKLKNCHIDFDEKKTVLVGANNSGKTSAISAIVWFLKNTDKFSLKEFTATNWAAINEIGEKWLEHDYVDEALLDSHQWDNIVPSMDIWINVEDGEQYRVNHLIPSLSSWDGKKVGVRGQYEPKDVKKLYTVYKDAKIQAKTLESTEEWEKAGSPDLYPKNLCDFLGKGLNLREYFDVKYYIIDPSLDPDDEDEVQPTPDNEIGNNPLDGLIKVDTILASRDFSDPEGQTDSDIDTLSKQFQQYYKSSGQEDEELTCEGLKILGGIVTANKTYDEKLKKTFEVPVGELKNINYPGFQNPEIRIRSKIQIEESIKHDSAVQFAIQGMEELVLPEKYNGLGYRNLISIYLKLIDFREKWLKELSERKSIEPIHIVFIEEPEAHLHAQAQQVFVKKAFDALCNNKLIEENPWLSTQLVLSTHSNHVVNELDLNCMRYFKRVIDIDEKIPISKVVNLSSTFGTDDETKQFVTRYIRLTHCDIFFSDAVIFVEGPAEKILVPSFLAKAGLDSYYISVIEVNGRHAHSFRKLIEKIGIATLIVTDIDATDAKIEDGKEKHQSVITAKGNDYKTGNPSIKSWLSGKERIDDLLALDEKEKLVNNVRIAFQTPVNVKWDKTKDNFTEICPYTFEDALIFTNLELFRQEGLKKMGTITTISNLLKHSNSANELQNKIFKKLESKSGFKKADFAISLLYKDDFVDLVVPVYIQEGLEWMKSYLDSNGNRNGE

SEQ ID NO: 64343 - protein, 115 aa, Bacteroides sp. CAG:530
MENNIDFQVDETLEKCILSTPRKSFFLFAGAGSGKTYSLVLLLKKTHNSIGKKLLLQGKNVAVITFTNAATDEIINRLDYSPIFHISTIHSFVWDVIKHYQADIKNCIVFILKKI

SEQ ID NO: 64344 - protein, 876 aa, Clostridium sp. CAG:964
MKDKYKVCSLFAGIGGIDLAFQQAGFEIVWANELDSDACKTYRYNFQNTVLTEGDIRKINADDIPDFYILTAGFPCQSFSVCGNRKGFADERGNLFFEIMRIVDAKKPKIIFLENVANLTEHDNGKTFNRIHNELSDRDYYIRYLIADACNYGIPQHRTRTYIVAFKDFDMCNKFQFPKEQPLKKHIFDIIDRSVKADKNFYLNENSVQYQKMKNAITDENQIYRFSDYGIQKSKDEISFTLKANMGTWYNRVPIIKDNFGIRTITPQECLALQGFPKSFDFPDIPIKSMYKQCGNTVVVPVVKKYCKTNERSRYIQMKFEKITIKNFRNFENVNIDLSNKNIFFGLNDVGKTNFLYALRYVFDKDIRKQNLTESDFHNKQYDKPIEIIITIDISDIHNSDCQKLRAQLKGALLSKHNKVYIKLFAEYNKTEMIALPILSWGGEMDHLYEMKQRGYLYEIDYVFNTIYIDSYVDLNTLFKKNVSQIIRNEKEEDRDTLEKIQNTVNELNEHISELSGIKEFEGRLTPEYKKFHDEGISVSIKSEIAIKGLYSNVIPYIKQDDDDNLYPTAGEGRKKLLAYSIYDILSDDTSESKINIFLIEEPENHLHKSMQIALSQILFNDQKYTYLFVTTHSPFVLYEMDNVNLVRIYNQKKTNSKSVFYKVPDDFEKNRKMLNRCLSEAIFANKVLLVEGPSEYILFNKVLSVIHPFYESDGIYILPVDGVGFEKYISILGRLEIFNAIKTDNDLRSVKNKNTFSVLGFSRCNNIVGKNILPTEQINENNVTAKRKLYNTNIKILDDIRNNCHIFLSKVDLENDLDEAIHDRLSTLLCVDEPVEYLQKLKHYNMVELVGKLTDEDCVAIYNHYNFACLKEVSE

SEQ ID NO: 64345 - protein, 500 aa, Clostridium sp. CAG:964
MKLSPIQEEIVNTPGNLIVQASAGTGKTHTMVNKIAKEIKKIHNHQVIAAITFTIKAAQEIKDRLSVDVTRHFIGTNNSFAIDEVIKPFMKDVFGADFDLDMSTDYSAKVDSFQDGIEKIKNEGILSSYKNNKENFIFDLAQVIVEKSLACRLYLQAKYIKIYIDEYQDCDKSMHKFFMYLCDELKIETFIVGDEKQSIYIWRGAYPEAFKSIVGKPNFKKIFMGDNFRSCQQIQNYSNLLCKETRHLYKPISDLNNIIWLTPNEENWASEVLSYIKPDFKTALLRFSNENAKLGASQLSADGVEFIYIPQTPIADITTETAWLYSAIAKFLLIETYSVYDLISEIPVEGNESRKNVSTIKKLLKNIENTKCDKRSFEGCVIKLAEYIGYDTRTDHIQKLYKTISDISYRVAFEPDKYQHISITFHSSKGLEFEQVIVFAEDYKLSDMASVYNHYVAVTRGKTKLIIVNSSNYNAVCFKKNLESILSESHLKISDVVTTR

SEQ ID NO: 64346 - protein, 662 aa, Firmicutes bacterium CAG:94
MQLSKIKIRNYRLLLDAELEVDSKTTLIVGRNNTAKTSCFECIGKVLNGTPFSFNDYPLSKRENLYANITSFMANEITFENLCERLEPISIEFLVDYSLDDPEDHLGALSPFIIDVDMDTTTALIRAEYKLKADEKSIWKILEANYYEDGCFSPADDVYKAIISNFHKLFEMTIYAINPKNSEEKQIKKHQELAELFPFHIIQAERRLGEDGTQDNSLSSLISDFFDMNEDELDPRVAEKVKELRSIVENANKNVQQQSDDILSALVSNAVGFGYPNGEELQLGVTTQLSIDDQIKNQTQLSYTAGSSKERLPSTYNGLGYKNLIKMEFLLAAFAKKVEKCGDACIPLLFIEEPESHMHPQMQHAFAEYLEAFLARITSVRIQTFLTSHSAHIANTMVFSKIRYAQKTKAGVIYKNLNAFAQENPSNTDFIRKYLTLTKCDLFFADKAIFVEGASERLLLPDMIDKCAKAGAFDSQKYKLPDQYYALIEIGGAYAYKFIPFAEFLGIPCLILTDLDSVSGQRGANGRIYYNSVPVSRGETTSNETLKWWVRKNKGIAEGDDTKIALTDITSMSPADKTRRKCHIEFRTTEDGLCGHSLEEAIRNVNRTHYGLGASPTEDDLEFTGKSKTDFALKLICECEDYAIPTYIKDGLVWLNDQRVLE

SEQ ID NO: 64347 - protein, 580 aa, Firmicutes bacterium CAG:94
MSEEHKRINYDLAKAEADKVDEQIIAALQNGNSFRVEAGAGSGKTYSLNKAIEWIQTNKWAEYSRKKQTVVCITYTNAAVDVIAERLSNDSFILPSTIHSFAWSAIKQYQSFLIDIVTSDPDFLPDEGDFFKVSEVTYTLGHRYKENGIQYLYHDDVLKLFCQLLDNAKFRRVFADKYPLILIDEYQDSYKPIIDRFVDFFIAKKKGPQFGFFGDAWQTIYQSNKACGLIENENLKIIKKSSNFRSAPRIVQLLNNLRPDLPQTSAIDDFDGEVVVITCDDYIGPRRTERNLKGELPAEELKTRLSNVTKKIICESSKEDNLKVLMITHKVLATQQGYEKLLDILADGLRDKEDPFLMFFMDTVEPIYKALKDSNMQLLFDTLGIKRFPITKKSEKSKWKELQQQLEDARAKRAIDVFELIKQTKLIPIPPKLDEWYHLYQKAPETIYASNTSIQAFLELDYLQFTAAIDFLFPDAMFSTEHGVKGEEYDNVVFVISKGWNLYQFETYAPMITGHSPVPKGKEASFERNRNLFYVCCSRPKKRLFLFVTIPVESVFKTFLIDLIGEDNIYTYSQFLKTTP

SEQ ID NO: 64348 - protein, 586 aa, Cryptobacterium sp. CAG:338
MRIARVQVNNYRNLKSVDIKLGALVTLVGENNSGKSNFLRAMTLPFMADEGSVGKRLSWFDINSDVKDHYYSFIQEHSNEIADGSMGLESFRAVIPSVTVTVDLQYDPIDAYDAKDLLVADGDDLIPRIRYRWFVANPQSLLELVKSLVMDVTDIQSIKMSLLPMSEYKYEIVSPDASGDRHLPYDVLARFRYFSLPAERDNFAASAGRLGSKPLVHLLQENVNPAGQKRIEQGYGEFLETIRDAAKLDEVINWQDYSDDPRAKDFFDSVSVLPNMPLMSSIFSSIRLGYNDESLSLQGLGYRNLILMAVMLNAYLETSDGISLRIVAVEEPEAHLCVNNTLLMASFFKVFGEKNSRTQLIYTTHDAEFVNKVGLDKVVILHNGAAVSLVEALQPEDMDYLANNPNTDIFKLLFSHRLILVEGITEELLIKSYLQSKHELNDIKVLSFHKGYRDIIRIWKDINYGNGNKLAVIRDYDNQDNAKREHEKLRDRQVCVTTTDGYTLETDFVAEESNYRLLVERYGTEYGWMNMSEDELQEDWRNKKTDVMLRICHDLVNGELSGLTMPAHIKEALDFLNSPIVEDVAE

SEQ ID NO: 64349 - protein, 453 aa, Cryptobacterium sp. CAG:338
MRIEVAGAGSGKTSSMASRVLSEEIPDGRVLFCVAFTNAAVLHIESKLVQMNGSVPSGVRVSTIHSFLNTEIVQSYYHLLFGKRYDSISTIKLSGDYKAQNARIGELERCGLLHQAKIPERAKWVVDKKSNENARVKAMRGKILAVFQSYCHMIVVDEAQDIDKEMTSVLCALDRLGVPIELYGDPKQDVRGRKCFRQLIAAFPDCVTYRSDCHRCPERHLRLSNRLAPVDERQVADEKNSVGSVRLFFESDIAANTEKFIRDEDFGLVYISKKNDRFDTHGDVAGDKWFESLRYELETGIREKCGDEATDLEIKRAAYYIATKVVSLLNSGRSVKELTNICVESGTIDYEKRRYIRIATALTYMASSRSKGVSVKSIEAVKGLEDGRCLLILTTDLAPYLTGDKVDDNRTKHLLYVALTRSRDDLSILVTREVEERYSRDQLRRAVGISSDN

SEQ ID NO: 64350 - protein, 619 aa, Firmicutes bacterium CAG:582
MIKAVEITGVENIYKNKYDNDLKYLYSLNKVNIFIGENNSGKSRLLRYLITSDKVVNISGPFSDEETKSFKKSKSNFLVSINKYNNISEKKIILPQNVIELDDANFYCEASDYINSLKINSSNILNPNVKEQYKSIKLYLDEMHNYIVKEKNFHINETLKSLDIIYIPILRGIELFNNYYELTHEKELDTIQMTASQRNAIEEYKLNSKHVYLNKVSKAYNINTKIIFTAEDLFDDIKDKLLGEEKDRKFVKDFENFISKEFYNDEGFTIIPQLKKGYLNIKIGNGEERALHELGDGIKQLITIFYKMYDKKNNSTIFFIEEPELNLHPGYQRLFINILQNCKEFKDQQFFITTHSNHIIDCCLDYTNTSIYKFINSNKKNNSFKVVNTSSKDIEVLELLGVKNTSVFISNCTIWVEGISDKILISKYLEVYLKGKSTVQYKEDINYAFIEYGGNNITHWAFIDNKDISTINASGISNRCYIILDNDNDSPTKVKRKRNLKKAFKDKYYELKVREIENTISRKVLEKTLFPNGNIKYSKLYEGQAYATKEVYMGSFIDKHYELSRKYGSKSTGTIINKLEFSKKIAENIKNTDDLTIPIKNMCEKLYKFIEESNYRKEK

SEQ ID NO: 64351 - protein, 456 aa, Firmicutes bacterium CAG:582
MEVFGINLDDAQVGAIKDDAKTVIVSAGAGSGKTQTILGKVKYLIEEKNVKENEILCISLTNETVNNLKVKLDKMNYKVDVMTFHKLGLSLMDEKMNIVNDNYLNFIIDEYMLSYIRNNKLRNKTFKRIFFTESNMDSVMKTQDYLELKKVMITFIKYIKSNDLDIRKIKIKHIGYINREILRMIFEIYIIYTEELSSSGKIDFDDMIKNSSCKKVYVNYKYIIIDEFQDTSVLRLNLIRNIMKYNDIKLFLVGDDWQSIYAFSGCTLDIFVNISKYLDNVSYHQLKYTYRNSQELITASGKFVMKNKYQLIKDIISYIHEDKPIVILYNCQINDILKYIKGDVMIIGRCNKDIENIQWENKYTIHKSKGLEADNVILVNSDNIPFKHKSHVLLDYFLKTNEGIKYPEERRLFYVALTRTKKKIYIMVNNRESIFIRELRKNYKEFITIKKNGKPF

SEQ ID NO: 64352 - protein, 668 aa, Bacteroides cellulosilyticus CAG:158
MCNFDKKMKIMHISKIKIHGFRCFNSEGASIEIDRRLNAFIGLNSSGKTAALEALRKLFGITNAERNISKQDFHVACEEGDEVRERSLSIEARLDFDESETDAIPHFFSSMVVDAEGENPYIRVLLESIWTKNDLAEEGDIDTKLYFINVPESEDSTDESKHAFPKHLRGLIQAFYVPAIRRPSEQMRYISGSILYRVLSSMKFSDEFKENYLTKITELNSLFQSIDEFSTIESTLSDIWSEFHKDERYKDVSLSFGTSEIESILQKLEISFSPTEIDRPYQIDELGEGYRSLFYFTLVCTLLKIEEEIDDEERVKPLLTILAIEEPENHIAPQLLGRVIKVLTSISKQDKAQVFLSSHTPAIIKRLDPESIFHFRINEDYATEINKIYLPKGDEDAYKYVKEAVKNYPEIYFARLVVIGEGDSEHLIFNRLMEVYDKDFDDNIISFAPLGHRFVNHIWKLLSSIHVPYITLLDLDVGREGGGWGRVKYALQQLINIGKSKKKLLEVDGGEVLSDEAFEKMHTWGHTDNKLDSLMGWVTFLKKYNIFYSSPLDLDFLMLEHYPEIYKKAIPKNGGPRIPEKDKEPDKFAAKVTNAVAATLKSEDAKGETYTEEQKELMIWYNYHFLGRGKPVTHMNALSLMDDEKIKEKTPPVLMEIFDKIDKILFKK

SEQ ID NO: 64353 - protein, 605 aa, Bacteroides cellulosilyticus CAG:158; identical to SEQ ID NO: 63485

SEQ ID NO: 64354 - protein, 607 aa, Prevotella sp. CAG:1124
MVIKQIQVRNFRLLKNFIIDLQPELSLVVGKNNVGKTSLLIVLDKFLNSGKERTKKFQYNDFNLDFQKEIEDLLEQPLLEKDNYEIKAISLRIIAEFFDEDSLDNIGNKILTNLDDDNNFFAIGFDYQLDFDSYTRLIEDYHEAKVKFEESSKKTDSQILFDKREFMESNHHRFFKTIRKSVHVEKVSMSLEENRYIKLDGLQGFKLDDVINFEYISARRSVDNKEVDHTLSGQTSELYKAQEDSDENMEARETFITALKDTDKTLTDIYSNIFDGIIKKVSMFGGMHQQETIIKVISTLQHRELLNGNTTVVYEHDNRKLPENFNGLGYMNLISMIFEISLIIERMKRAQSRRPADINLLFIEEPEAHTHPQMQYVFIKNIKNLLKDGIARKDGANASLQTIVSTHSSHIVADSDFDDIKYLKRLKDENSVISKNLQDLKKLYINEDEEGNENEDKMAAYRFLKQYLTLMNSELFFADKAIFVEGDTERILLPLMMQKVDQNNKPDYAKSELALLSQNISVLPIGAHSHIFEKFFNFIGLDKLLVLTDIDICSSESHHKKCAYEEGKKLVTSNAALKHYFNKSDIAYYMNITTEQKYLNGMTQKRK

SEQ ID NO: 64355 - protein, 640 aa, Prevotella sp. CAG:1124
MGEELMQIMQHIHNGHHFLLSGGAGSGKTYTLVQVIKEIIKENPTSLIACITYTNAAVREIESRVNHENLRVSTIHDFLWECIGSFQKELRDSLIELINEREISINANVNLPINSDFFIKEGEFLHIQYKEYLRVSDGIISHDEVLRVANYMFTHYKKLRKIVKGTYPFILIDEYQDTSPLVIKILLETFDEDDSRSCHIGFFGDVMQAIYDDGIGDINTYKYPNGKVYEVKKEQNRRSPQTVIDLANKIRLDDLVQRPSKDKTAPNMMKDGQVKIGRAIFIYSRTESTTIYDIRKYLHDNESWNFDDSQTTKELNLTHRLIAGKAGFNTLMEIHAGDCILKYRNKVDNFIKHNLVNTDDKTFGEILTFLNNTFTDERSRKSFSQTSAMENFIKNNQALYDKVLNYPYNKFVKMYVSSDQLIDDKKQEEDETSKTGSRRSELIRHLMKIERCIYLYSSGRVEDFLKSTEKKIETITDKRSLHEAIDLLSNVEDKNIGEIIDLADKLDIVKKDDTLERYAERCPYVYERVLTVPYKEVQHLYKYLEGMTPFSTQHKTKGTEFDNVLVILDNGKWNNYNFEKLFTSSKLQDSVVQRTRKIFYVCCTRSKENLAVYYHKPSDEVLTKAKEWFGTDCVIKIDKS

SEQ ID NO: 64356 - protein, 720 aa, Bacteroides clarus CAG:160
MVIRQIQVKNFRLLKEFTMEMENELSLVIGKNNVGKTSLLVILDKFLNQGDRKGFQYNDFNLDFRCQLKDLIEKEVVDDTKYKEIGIQLRLLIEYDDHDDLEYISPILMDLDADNNFLGLGFDYILTYDMYVNLKNAYQKFVEHEKSKEEKSRENGGEYTAKTLDDFLNSKQSNYFATIRKSILINKTDGTFIEEQYINLKDATNFRLCDVINFQYINAKRNVDNKDVDKTLSSQTSELYKIQEAADEQQDAIEKFQDSLKDTDKVLSSIYDNMFSDIVNKVRRFGGMSKNETVIKVVSSLQHREMLKGNTTVVYQQEDKELPENYNGLGYMNLISMIFDIDLIIKRMQRNKERKPADINLLFIEEPEAHTHPQMQYVFIKNIKNLLLQGIQHKNGIKRKLQYIISSHSSHIVSDCDFDDIKYLTHPICDGSVERNAVIAKNLKVLQNEYDDDHKHYFAFLKQYLTLNRSELFFADKAIFIEGDTERILLPAMMKKIDQECELEGNEEFLMSQNISIVEVGAYSHIFEKFLRFIGLRKCLVITDIDCCKPVTKRDKNGKERKYIEKTKYDATDDSLVTSNASIKYFLNNTQKVKDILAMHPAILSWNFENKKWETDEKGYLRLAFQYGKKTYQPRSFEDAFFSENEKFITENTFSSLQSNSLEQFKSDKDAYELANNGVSGKSSLAIEILLNSKKEGTCDFSNWKIPTYIKEGLLWLRKN

SEQ ID NO: 64357 - protein, 657 aa, Bacteroides clarus CAG:160
MAKEKLKDELQNITEQITKGHHFLLSGGAGSGKTYTLVQVVKWIIEHYPSSQVACITYTNAAVKEIVERVNHDNLVVSTIHDFLWDNIKNYQKELSKTVIRLLNMPNSGLHISGLNEVPVDYFCNRDKPVTISYQEHTNLKEGILSHDEVIVVAYEMFKGYKKLCDILKSRYPFILIDEYQDTFPMVVEIMLDFLKRSDKKSIIGFFGDAMQCIYDKGVGDLNKYKYDGTNGDVYEVQKRQNRRNPSSVIDLANKIRTDGLVQKPSNDDKAPNMENGHVKSGEILFVFSQQEGNMLPNVKLYLTQQKGWNFHDAKVTKELNLTHNLIAEKAGFATLIEIYNGDPILAYVKNKVKPCVEAHFTEDEMEGKTLADILNDLQAKGIESNKYKPTKTQKSFITSHTLLYERAKKYKFESLIHTYVDKSQLVDDKKQSEDEESKTGSKRSPLVKHLCKIEQAIRLFKEGNVSEFLKVTGYTQSRYSGDDRKIKSKADKIKLNESINKLQNADNKTIRDMIELADKENICLIDDKVDNYKERYPYIYDRMMEVSYSEFVNLYDYLEGQTPFSTQHKTKGAEFDNVLVILDNGRWNNYNFEKLFTASIDELQESVVQRTRKIFYVCCTRTKEKLAVYYHKPTAAVLAKARELFGIPNVMEIPKY

SEQ ID NO: 64358 - protein, 640 aa, Eubacterium sp. CAG:115
MLISELKIYNFRRFKSIDGAPGLKVSFHKGLNALIGENDSGKTAVIDALKLVLLTQSNEYIRPVDEDFYQSIDGTICTEFKIDCTISEFTQNEAKNFIEYLTFKKDGDNVEYTLNLHYRAWKEGYKIYQELRVGDVEDGISIDGKARDLLKAVYLKPLRDAEREMSSGRSSRISQILLSHPVFKDKKEHKVVSIFQDANQKIEDYFTNDVDGKRILKTIRDNLKSFNDNGQASNAEFKTSDIQLKAILESLSLNAPEINPGLGESNLLFIAAELLLLKDDTDGGLKLALVEELEAHLHPQAQLRLISYLQNEYSENDVQVIISTHSPILASKINLKNLILMKDGNGYDLAEEKTGLQKGDYLFLQRFLDSTKANLFFAKGIIMVEGDAENILIPVIADILGYPLEKYGISIVNVGSTAFLRYSRIMVRNDETTINIPVSVITDCDIQPYDVDPHTKEKTFNEKIAESAQAETCKNAKYTCGSVHGFTSPRWTLEYCIAMSCLSDDFHKAVHYGMKIQNAQENVSLNDEKIDKANREVETEAKQWNSLDKANIAFNIYNLMLTKDGKSSLKAIVAQCLASIMRWNISMIPNDITQEKMFDLDLYGLTIDEQKKAVLKSKLESDDFLRYIVNAIKYAAGENV

SEQ ID NO: 64359 - protein, 641 aa, Eubacterium sp. CAG:115
MVEWQITDQDIESTEKLLLPNGAHFSDDAIKVIRCWYSTDVAACPGSGKTTVLLAKLKLLADRMPFADGAGICVLSHTNVAVNEIKKRLSSYEDKLLSYPNYVGTIQSFVDKFVTIPYLKYIYGRNIQTVDTLIYSQHMMSKMKTNKDKYRALDYVIKNNLQTSKQFTSPIDFIKALYIREDDSLCVGNQKKALAGAQKDSTNQFKELRDDLIKDEGLIRYQDAYLYANEAISKLPEKYTALFSSRFKYVFIDEYQDCDENQRQALDMIFDSKKCTVIRIGDSDQAIYNSSEDKTSDWVPQHDFLSITTSCRYSQEIADVIGKLKKDENGILTLVGYTGIKPTLLVFEPDKIDRVIDGFINALDSCGLNDENGIYKAIGAVRSENTTGLKIGSYWSGFDSSVIKQSDYNYWAYVDNIVTSLLEGKLYKAEKIVRKLLCQIFRYMKISNSKSGKEFTVATIKKMLEDEYRELYRQWIYELSIFQNVNRASINCFMRQKINELLIKIAPQLNNIVNQLPDYFFNDASKNQLESQTEKREKNVYIDLSKGRRIIFDTIHGVKGETHDATLYLETDRKKASDINRILPCYGVGKPGCSPLYDYSRKLAYVGMSRPKKLLCVAIQAKTYEASKGVFDNSWNVVHLT

SEQ ID NO: 64360 - protein, 663 aa, Ruminococcus obeum CAG:39
MYLKKLLIKNFRIFDETGIELVFNKGVNAIIGENNSGKSSVIDAIRLVYSTVTYRKDIFFSKSDFHVGEDGAVADYAQFDVYLEDVPRRMTEIWNPQSESGMGGDFHIKFEKYISPSGVEKVRSVYWGFGTDGNLLSSDTFEATDVVFLGALRDSESEMKPSRNSKLAQLLRNLVPGEDVRAELVQILNDANNNLLEKEQLKKTRNTINQNLARIEQEFLNQQIDIGLVEPRFDSIASSLRAWVKPKWILINKADPVYEKAYTYFQSHMDLKKIQEDAKGIYFEISILDSETEFDKELADRISEVANKSFELYQNGLGYNNLLFMSAVLGDMAIEKGGVYQNLLLVEEPEAHLHPQLQELVHNFLSDANKNDGNIQIIYTSHSPTLASKIDIENINLLYEYGHKKYCLPFSQTNLTEENKKYLQRYLDVTKSQMFFARGILFVEGISEAILLPAMAKALDRSFEKYAVELVNVDSVAFTPFVNLLSSDKVKTCFSKVSIITDDDRCAKKNEKDYIDKNYDYDDISSEVVTNLQNGQPSDRCNDLTTLCSGAGINIFTAIKTLEYALCCSEDNVYHMIEALKTCYTDLGPKLETKVGLLSQLSEKAACVWLFIRARDKCKGAVAQYISQVISDQHELRKKGEQIEKEFIIPDYLKNAIYSVTEQ

SEQ ID NO: 64361 - protein, 587 aa, Ruminococcus obeum CAG:39
MVEKMTEEQKEFLDAEGKVVIKACPGSGKTYTVAHKLLSYVDNWKDYHSGVAVLSFTNVASNEIYEKAQSIHGGLGKLGYPHFIGTVDSFIDEYIVLRYGHLHTVGKVRPRIALADNWKIPYKYWRSECHRNGCVDNIEQFYYGIDKNFYKGNEQVTCDLRKAKVLPCQQYKRMLSDKGIVFQNETALFAYQLLKKYPKVAAAIAERFPIIIIDEVQDTSINQMAVFDLLSESGMRSMFLVGDPDQSIYEWRNANPECLLQKLEDPNWKTIELTGNFRSSQNICNVTSFFSASLRGNGSNNAIGDWKDETEKPILLLTKKNSEEEIINYFLNKCSKMGIEISPKNVAVLTRGRIYSDTDITGLWKSKEIELFAKAAYEWKFGSRKKAYQEASKASYNIVFNEDVDDYVMKQKIREYTDEDTWKDYVIDILVDMPDIETEIGEWVKSFSPVFCSVCGKYGYGISTDKELKDIFKIKQSDKKTPNFKQIPLRKYFEKKTEDKYTRSSIHGVKGESYDAVLIYVKSRTGSTITPKLLMEGPLNQELMRLAYVAMTRPKRLLMLAMPDTKGIKNCGRFSEELWEYEVLESS

SEQ ID NO: 64362 - protein, 662 aa, Anaerotruncus sp. CAG:390
MQLSKIRIRNYRLLIDAELEVDPKTTLIVGRNNTAKTSCFVCIGNVLEGENISFNDYPLLKREDFYTKIALFMEKKLSYEDLCKQVEVISIDFIVDYSLDDPDDNLGALSPFIIDVDVDTTTALIRAEYRLKTDEKTLWALLESSYYKDGAFAPNEEAHDVLADNFGKLFGLTVYAINPNNLEDKQVKSQKELHDLFPFHAIPAERVLGEDDTQNSSLGSLISGFFDMSEGDLDPEVAEEIKRLRTIVEKANKDVQKQSDEILSSVVNSSIGFGYPNIEELKLGVTTQLSIDDQIKNQTKLSYISGTANESLPSSHNGLGYKNLIKMEFLLAAFARDVEKRGVACVPLLFIEEPESHMHPQMQTAFATYLEKFLGKLSNVQIQTFLTSHSAHIANTMEFAKVRYAQKSNAGVIYKNLNTFAQANSDNVNFIRKYLTLTKCDLFFADKAIFVEGASERLLLPDMIEKCEATGVFGSGKYPLSAQYYTLIEIGGAYAHKFIPFIEFLGVPCLILTDLDSVAARISKGGKVVKKSVVVSQGETTSNETIKWWIRRNKGLPENDTSKIDLTVITSMSPDDKTRGKCHIEFQTAENGLCGHSLEEAVRNVNRKHYDLGDSTSEEDLEFKGKSKTDFALDLICECADYCVPAYIKSGLTWLNNQRVLE

SEQ ID NO: 64363 - protein, 581 aa, Anaerotruncus sp. CAG:390
MGGKHTGANYDLAKAEADKVDAQIIETLKTGHSFRVEAGAGSGKTYSLNRVIEWIQSNKWSDYSRKKQNVVCITYTNAAVDVIAERLAKDSFILPSTIHSFAWNAIKQYQSVLIDAVTTNPDFLPDEGDFNKVTEVAYTLGHRYKENGIQYLYHDDVLKLFCLLLDNAKFRRVFADKYPLILIDEYQDSYKPIIDRFVDYFIAKGIGPQFGFFGDAWQTIYQSNKACGAIEHDNIDVIKKSSNFRSSPRIVQLLNDIRPDLPQKSAIDDFEGEVFVITCEDYTGPRRTDRNFKNELPPEELKSRLNKVTEKIKQETPADEELKVLMITHKVLATQQGYEKLLDILNDGLRDKEDPFLLFFMETVEPIYHALNTSDMQLLFDTLGIKRYPITKKAEKNKWKELQRQLDEVRKKRAIDVFEIINRTKLIPIPPKLDGWYHLYQNTPETIYASNTSIEAFLNLDYAQFIAVKDFLHPEAQYSTEHGVKGEEYDNVIFVISKGWNQYQFETYAPMITKKAVIPSGKQASFERNRNLFYVCCSRPKKRLIFFVTVPIDSTFKSFLVELVGERNIFTFSQYIERKIN

SEQ ID NO: 64364 - protein, 630 aa, Clostridium sp. CAG:269
MYLSELEIEGYRGIKERTKIKFKKGINLLVGDNRSGKSTVIDSVRLLLQENEYSREGIKENDFYHSIDDKEVADKIKISGRFDELSDEKKVEYITWLDEEFKALLNIEIHNKLDGRNNYKKNIWGGNSFNSAFEWDILNNIQCVYLPALRDAEKRLKNTRGSRLARLLLNLSEEERKDCKKNNRLTELENDVQEFNSSLSKNSDIGKARKLINESMNKSLGNMFSEKINIQFEEQSYSKIVENLKVMFYPENTEDENIIYRDLVENSLGYNNLIYIATILAEFEGLKQNFSTPRILLIEEIEAHLNPQIQIKLIKYLEKQAKENDIQVIITTHSPTIASSISLNNIICFNYVNGKIKITDLIDCKLNEKEVKFLDRWLDATKSTLLFSKGVLLVEGLAEALLIGKLASLYLKTRKYGVNSLEEAGISVINMNGIFFNYFFKLYDGYAPKVLTQEENETKKDFEDRQKKFIEKEKFDEEEFIKTDFIPIKCVALTDFDPNAEEKTTNPQLYRKKQVENMTLNCRVYNNTKTFEYEMALFTQNAKIMLEILDDYISTEGQIKQDIEKYLVDINRDNQLDNKKRAEFILDKIDTNWMGKGLFAQLLEEKIKEDNFEIPNYIKEAVDFLIKKEK

SEQ ID NO: 64365 - protein, 633 aa, Clostridium sp. CAG:269
MEKEITKKYCRKSKYCNCTSECNSLLKKRTFENDKCYLKNLNLSQIEYLLEESYKNVYLNACPGSGKTEVLAIKVAEEIIDWNEKSKGIAILTFTNSAEDEIKHRISEFIDISNIYPHYIGTFTSWLHGYIANPFLYKKINYTGNADEDKSLKVIDNDNEAGFLNSFSSQYGYNVLGKIKANEFYFSKKYNKYIYCGKIHDGKRIFDELLSKDEWRYKDLYSIKKKFYQKGFCLYEDIENLVYDTLNEDKKLLDLISKRFPIIFIDECQDLSYIQLEILRLLLKSGVKIHLIGDLNQSIYEFRIIELSDIKQFIKSNSFYEMKLNENYRSCKDIVNLSNYIVKYPEEIIAHGKYIDKKPMKLITYDKNNLNNVIKQFINISRDNNIEKNRCKIIVRNNSLKREIYGITENTSINTIEELAKSLLWFKHYENIAQFNYAILAMGKSIQMTFFKDEECLGKSNYYRPKCIELSEWKKIIFEVKRILMNKKEILYFDITWKLWKEKIKNIINGEIIQLFEGRKAELGNIRKGKTNVKIKDTLKNEFGMKNEISVETIHNCKGMSIDSVLLLTPKSANSDFYWKKWIDNTTIEEENRFAYVAISRAKYLLFLAIPNDKNYTDEDKEKFKDLGFEIIE

SEQ ID NO: 64366 - protein, 309 aa, Clostridium sp. CAG:813
MHPQMQRVLIKYLKHYFDNQKIQGLITTHSNEIIKVSEIKKVRVIRIGVTSLLNNIFDLNKFIKTLPDKDEIQFYSLLFRINYSDLIFANKIIMYEGDTEKMFLERILNLEKYINLNEQYISFVQVGGAYSHKYKPLLDFLGIKTLIFTDIDYKKSFTTIDKILDSEITNEGLKLYYNESKGALKVKNLYEWQQDNPNIRIFYQTQKDGYGRTLEEAILNKCLSINIVDVKSRRYWKVMKKRKKLKYSIPQHDTTNNDEVSDNLSCRDIAKATSDNKTDFMYSIVLQNDDKVAKFIPNYIEEGLDWLMQ

SEQ ID NO: 64367 - protein, 649 aa, Clostridium sp. CAG:813
MANAVNNNMFLVNAPAGSGKTTFIKDKINEIVNNDKNCKILCITYTNRATDELISKINSKNVKISTIHSFVSEFLNIYFSNKNIIELYFEIYKDDILNRINNISNDEKIEIANQKYREEHDGNLSFEYLKNNTETISYNELPFNSLYYGGLSHDALLLFAEILMDKYPIIKKRLTALYKYIFIDEYQDTSANILRFFYNSVKDSSTMLFLCGDKMQQIYKSYDGSFEDYLSLFNSETYSLKMNYRSSKNIVKILNNIYNDSLFTQKCPDEIDDSNVPQIYITNDIGTVLNDIEVQYPEILKLYIYNKERFENIGAKNLYEKISNMEKYSFGRKYSPVDVLLKNDLDNPDPLFKLLFEIHNFLKIYKLKQYGLLIQKINNKKQKIYNKDLLKINKHEDKKHFRNLIEEIYRKYNENTTIIDFLKFLNDKKFVLNQIIENYLEDTDENEYFDVLNQNLEEFRNICQYLENPKISTQHGVKGEGHNEVVFIAEDSGNPSVKMYKFFELISKNNICYSEFEKFYYDYVKDIKKFESSMQINFSEVKKNEYEKYKNSFEELIKNLQLKYDGNIYYNFFFLNALNLYNSKPNVTNFKELIKINTVFGTLTAYKLFYVGCSRAKKILKVIVNYSQINKFHNEFKTKMNNFGFHVVE

SEQ ID NO: 64368 - protein, 697 aa, Fusobacterium sp. CAG:439
MKLNKIAIKNYRQFHNTDICFDNIISILAGPNNSGKTSLVELCRNLFEQNFYSINYSDINVHSYYKNKLELIEKIIDIYQKNNSKNIFSDDLEKIFLEYVVNSIEVQIQIDYNEQEDIVNFANYMMELDIANNSFYFIYRYEFNKKIFIKQIVENFEKFSKDILHYNELTSLYNSSTKEEEKNKIEEKQQSAKNCIIDRYFNESFENKFYFCDKEYKNEIKMDSSEFKSLFHFIRINADRNLSDEKSNNNYLISQNLLDIISNDENWQNLIKTVPNDMLSLFKATNIESEIIKKSTDSLNPIMAELEHTKDCIIGLPHLELSLTDENIIKFIKNSTIAKYKYDNYVFEEQVQGLGISNLIYMHIQLEKFKNEFNNKVINFFVIEEPEAHMHPQMQRVLIKYLNDYFGNQKIQGLITTHSNEIIKVSEMQKVRVIRSSETLLSNKIFDLNQFINNLSNEDAVQFYSLLFRINYSDLIFANKIIMYEGDTEKMFLERILNLDSYKNLREQYLSFVQVGGAYSHKYKPLLDFLEIKTLIFTDIDYEKSCIIISDILNSETTNNGLKSYYNGSKEALKVKDLYEWQQNNPNIRLFYQTERDGYGRTLEEAILNKKLGINVEDVNDKNYWKTNKETNNLIFSIPNKNAEGQNIDNEITSRDIVRATSDNKTDFMYSIILQNDDKIVDFIPDYIKEGLNWLMQ

SEQ ID NO: 64369 - protein, 650 aa, Fusobacterium sp. CAG:439
MANAINNNMFLVNAPAGSGKTTFIKDKINEIVSNDKDCKILCITYTNRAADELISKINSKNVKISTIHSFVSEFFKIYFSNKDIIELYFETYKGDILDRINNISNDERNEIANQKYKEEHEGNLSFEYLKNNTKSISYNELPFNSLYYGGLSHDALLSFAEILLDKYPIIKKRLSSLYKYIFIDEYQDTSANILRFFYNAVKDSQTTLFLCGDKMQQIYKNYDGTFENELSTFNNSDFLLRTNYRSSQSIVTVLNNIYNDPSFVQEVSNIQKQGNKPQIYIAEDVNSTLNAIEDITPKILKLFIYNKDRFEKIGAKNLYEKVSDMEKYSFGSKNSPVDVLLTNDIDNPDPLFRLLFEINDFLKKYKLKQYGLLVQKINNKKSKIYNKELLKINKHEDKKNFQNLIEGIYSKYNEDILIIDFLKFLNDKQFLLNSVTENYLEDSEENEYLTVLEQSIEEFRKLCEYIENPKISTQHGVKGEGHDEVVFIAEDSTRNPYVRMYDFFELLAKNEVRYNEFEKFYYEYVKDIRNFEYLNNIKLSELKKDTYNQYVNSLNELLQSLNQKYNNNVYYNFFFSDAYASYLSRPGVTKFNNAVKINNIFGTLIAYKLFYVGCSRAKEILKVIVERSKIDSFYNEFKTKMQQLGFDIIE

SEQ ID NO: 64370 - protein, 527 aa, Listeria monocytogenes
MNHIKRMHIKGLKKFKDIDIEFNEKINILVGENESGKSTILEAINIVLNQQYRSIDKYILKDLMNINSMKDFHKNPQVNNLPSITIEIELELDNQANVDTIYFRGINDKDKGQFEKFGILFECEFDKEFEDELRSEIEDGVIPFEYYKLTWSTFQGSSYNIMKKPLRTISIDNSIADSNSSFNYFNKSLFDNKYSSSDKMKARNSFRNEVDLIFNALNLEGLGNNRQFGINSKKTILDNVLTVYEESISLENKGKGMENLIKTEIALNKSKNKLDVVLLEEPENHLCHSNLLKMLDEIKKNTNEAQLILTTHSNMIASRLDLRNILWIGSDEAISLNKIDQEDAIFFEKADQNGILNLLLSKKVILVEGPTEYMLLPIMYEKIIGKSMEEDFITIISCNGIAYKRYLAIAESAKKKVAVITDNDGKQNVIDSKEEYNKDKVLQRIFTDGNLSNWTWEICMYELNKNYFEEHVTVNKTSKYLFNKQDYGKVKGKMLNNKAEIAYSILNDIDDLKIPEYVKGAFTWINE

SEQ ID NO: 64371 - protein, 791 aa, Listeria monocytogenes
MDKNFGRTIINWLFSYSDERRMMGYNILSLKKSKDELLNVVSNLEKEIRNLKENQVNNESEQKKLSMLVNEYTNRFGTISNTNNFASDVVRMEDEDANIFHHLVSLNGGNEFNKEQVNAIRFDMRTHLRIIAGAGSGKTQTICAKAAYLVLKEKIQERNIVMCTFSKKASQEMKERVNEFLGGNSRIEVLTFHGWFQKEYNVLIKKYPYLEKYGIAGEVPGKGSGKDSHDRILMNLIKQYHLYNFDKYEEKPINERLSYWRNMGYNDEEIVAFIARYFDDKEILKDQLLSEVFSEMLKELERIKRREKVINFDDMLINLKCVLENDSNALSLIQTRYQYIFIDEFQDINPLQKQIIELICPPDYEKSVINSTKLIIVGDDDQSIYFFRGAEPRYIKEFDRQYRQTSIELMTNYRSIAPVVHIGNTLISNNQHDRIKKSMIPHKLNEGDCYAKVFQNEQLEANWIAMRILSLSSEEKPFQDQIGKPNYTETIVLYPNKNQLKSMIIALQEKGIPFVTKSDDDLLGIFGINFFKRSFNLLMDIIDAETIEIKKHLYKQLIKNICLYYYIPFAKSTDFVSDETNYTSEKLTDFICKEKKVSKKEMALIKSIFRDINEFIKTEELNIKVFVNWLVETPKVKKQLIDEEKDWLLKEVSNVKTLKELILKYKAARTLKEEMADKLREYDNNNYNAVYLLTIHSSKGLGYKNVFVKGIYKNSLPDYRSVDKESIELQPLIEQASPPTTMEEQRRLMYVALTRAKENLYVTYPREINDKPTLVSPFIKESNIMFSEEKI

SEQ ID NO: 64372 - protein, 641 aa, Alteromonas mediterranea UM7; identical to SEQ ID NO: 63770

SEQ ID NO: 64373 - protein, 558 aa, Alteromonas mediterranea UM7; identical to SEQ ID NO: 63771

SEQ ID NO: 64374 - protein, 641 aa, Alteromonas mediterranea UM4b; identical to SEQ ID NO: 63770

SEQ ID NO: 64375 - protein, 558 aa, Alteromonas mediterranea UM4b; identical to SEQ ID NO: 63771

SEQ ID NO: 64376 - protein, 556 aa, Acinetobacter baumannii 1605; identical to SEQ ID NO: 62630

SEQ ID NO: 64377 - protein, 593 aa, Acinetobacter baumannii 1605; identical to SEQ ID NO: 62631

SEQ ID NO: 64378 - protein, 695 aa, Streptococcus tigurinus 2425; identical to SEQ ID NO: 63902

SEQ ID NO: 64379 - protein, 605 aa, Streptococcus tigurinus 2425; identical to SEQ ID NO: 63903

SEQ ID NO: 64380 - protein, 695 aa, Streptococcus tigurinus 2426; identical to SEQ ID NO: 63902

SEQ ID NO: 64381 - protein, 605 aa, Streptococcus tigurinus 2426; identical to SEQ ID NO: 63903

SEQ ID NO: 64382 - protein, 615 aa, Ralstonia sp. AU12-08
MHLSKLVIKNFRKLKFAELSFQAGLNVLVGGNNVGKTAVVDALRALLAGHDDPYPRLGEEDVHRPRDGAPSGDIVFEYVFSGLSLDDEADFLAALVPGAAGSLEAHIKVRYSDADKAGRLRAKRWCGEHEDVGLTSDMMENLRGVYLPPLRDASQGLKPGRTSQLARLLQLLADETGIDGINKALQELDSKLKAHLPIVNTHEAINTRHKTMLGPQLAQLLEVGLSASDFKSLKSRLSLLVDAFEIEQNGLGFNNLIYMAVVLSELTKNPDSCYRGLIVEEPEAHLHPQLQAVLLQYLQSIQAVKGEKPVQLFVTSHSPNFASIADLNSLVCLVDTGTAVETFLPRSVVFEKGKREKLERYLDVTRAELFFARRVIFVEGAAELMMVNALAKRIGCDLRQHGVSLISVEGLNFDSFLPLFGDKALKIPVAILTDADPVPSEDGPPAVAGAVAVEGTHQSSPAGAAADESVDEGDDDDPEPVYPAPGDVITVSANTAKMKGREDTHVKVFHGLKTFEYDLALESDNRTAMLKALAELHPKIAKSLTATVDAEVGDAAKAKALFRGMFERRKNNVQKGSFAQSLAQVISDDKVSFIVPTYIKAAIQHACRTEEAPKP

SEQ ID NO: 64383 - protein, 587 aa, Ralstonia sp. AU12-08
MSGLTPEQQDVVDAPMVPLCVIACAGSGKTKTAVHRLVRMRRNLGEARGRVALLSFSNVAVDTFRKAYDNLASSLPSSARRSMVDIDTLDGFLTTNIIRPHGHRTMKSARTAFLVTGSESFLEGFKFSTSSFPQPITALHLAFVKGDEVFFHVFNEQIELVDTSTARNLIAKLGRTGAYTHDLGRYWAYRALKEHPQLLAALARRYPHILIDEAQDIGSVHQAILELLIGAGSCVTLIGDPNQGIYEFAGADGKFLIDYHQRTGVKQHSLQRNFRSTPSIVALANGLCGRSDVAERAAPSTPNGAFFTGYKRNQHPQLVTAFQSAMSAVGAKITRSAVLCRGRGLADTLRGDETPAGQGLVKAFAAAAVLRDRRKDFLTAFQRVAVAVVALLDNAPHGLVSQITQSGSDAVNRELRKAIWAFTRDAATGLPASSLVADTQWHSLLLSRIKVLLASLESKFGLKPTDNIGRKLSKKALPNAPLSSVEDLAYSDATRLRVDTVHKAKGESLDAVLYITLKEHALALLDGVSTEVGRIGYVAATRARDLLWVAVPDSALKELRPTLLARGFKEVGIATTPDISRTNQTSD

SEQ ID NO: 64384 - protein, 708 aa, Lactococcus lactis subsp. lactis A12
MYLSRLKITNFRNYRFSTFDFKNGVNTIIGENDSGKSNALTALRILLDDRFYYSPKNLKDSDFNCSFDSWKGHWIIITAEFEGMTPEESRREAIASISQKVDVEESLENLNFQMSSISTDTGSVSVIIRPNDKKRKELFAASGNKDKFNSIRQSISLVDYEFLYRSKSIVNFSDENIYNKIVGDLENYDAPDPDEKQNEDDVIGIKLDIKDITNLISVIFIDALRDVLLLMSKGNNPIKTIVQTIESHISEDNILEVHEKIRELNSSISGITELRNVQGELNNKLVDILGLVYSPELSLSSNISDELTSLSKFLNLNPENEEGLNSLGLGHLNMIFIALKIVEYNISSSREVLNIMLVEEPEAHIHHHIQKTLFRNLGIHDDSTQVIMTTHSPNIAEVSEISRMNIVKGSNNISSVMKPFCGLNQFGTEQLNLKLDLTSAIERYLDTKRSALLFSKGVMLVEGDAEEIIIPTLVKKVLGISLDEIGVSLINIGSTSFEYIAPLFSEERIQRYCAVITDLDEQAVPEDSVLYKKNAEDNGKSRKEKLERLFENNLWVHTFLADTTFEIEFSNCETNITLYKEAVSELYVNQASIDNWKGELSQEVCDKRNEVVLKLADKFGKGWLSLIVSKIIFSTNDRVCIPSYIIDALLFASQESLSPKIIANMINGVVESEPVLNIEDFIGTDSKYKNTHPSMFEFVKKWKDRYEK

SEQ ID NO: 64385 - protein, 590 aa, Lactococcus lactis subsp. lactis A12
MSKMEDELKEKLLSDLNESQKSTVEDCGNNLYITACPGSGKTRALTRKIAYLHNLYPNSMKKIVAITYTGRAAEEIQERLEILGIDSDNVWVGTVHQFCLNFILKPFSWQSLRISRGIRIIDEYVTEKYLKECAANLKLKYDYRNKPNLKLTSEAEFLETDENNLKLAKAYHRKLKRNNEIDFELILTLSLSILLRNPESCLMLSRTIRSIYVDEFQDTTEEQYRILSALSNSNHDIKYMFVGDADQAIYTGLGGVVKTKTDLEEIMPIKFFEKTLDGCYRSTQDIIDYYSKYQQQPIRIISKAEWCSEFSIIRYNDEVSKDELPEKISDIIRQELDRGVKEEDICIASPNYFILFPLIKELKMLLPDVNFRSQDIYPIKPDDLNLFYKISFIVFTTVGKRVWLRKKIASEIIDILKNDYGIRFDDNFTALDLLDLLNSFSSSKNNGLEYLKDFVYQLFIELNIDEDNSVELCRSTREFFNKAQERIENNDIGVELENFRNAYDVKRGVNVSTIHKIKGEEYNTVIGIGLLKGYIPNWNNVIHDQDHGKCEAKKTLYVLMSRAKKSLYLFSETGRKTASKNDLVPTEFLS

SEQ ID NO: 64386 - protein, 691 aa, Thauera terpenica 58Eu
MRIKHVEIENFRLLRKVAIGLEERTTLIVGRNNSGKTSIAELFRRLLSERTLTFRLEDFSLGCHEGFWAAFDAFRAGADVPDVLGHLPSITITLDISYDVDAPDLGPLSDCIIDLNPDCAEARLVLTFGPRTTAAETLFAGIVTAGEDVAADRSTLFRALGSRLPAAYASSLEAVDPNDPTNRKALEPKTLTALVHGGFINAQRGLDDDTHRERDVLGKVVEVLFQSALTDPLDPEKRTTAEQLKVAVEQIQGDLHAGFNAKLTSLLPTFDLFGYPGLADPGLVTETSFDVDKLLNDHTKVRYLGVNGVTLPETYNGLGVRNLVYMLLQLLRFFREYQATPSAAGVHLVFIEEPEAHLHPQMQEVFIRQLDQITSAFVAQLNENRPWPVQFVVTTHSPHMANEARFESMRYFLSVPDGESLRRSVIKDLRLGMGDAPVPDREFLHQYLTLTRCDLFFADKAVLIEGTSERLLLPAMIRKTDAAAAGEPQLASQYLTVMEVGGAYAHRFFDLLTFLELRTLIITDIDAVKSNQNGKRVAVPVAEGEFTSNGCIKAWFENDVSPAALLAKTAVQKMVGLRRLAYQIPEADGGPCARSFEDAFILANPDRFPLGDGDAAELAYEHAAEQKKSTFALEHAIEQTDWNVPRYISEGLRWLAHGNLVALEPPPAVAIEIVAEVAGVAVNVVEAGENG

SEQ ID NO: 64387 - protein, 524 aa, Thauera terpenica 58Eu
MADGVESPADAAGRVALERMFACLDEARSFRLEAGAGAGKTYSLDKALRRLIDHRGSELLRQRQQVGCITYTNVAKDEILSRIGAHPAVRSETVHGFCWSILQDFQATLRALVPGLPGWAERLEPTGGIGARRVHYELGFPSVGDEQVTIRHEDVLALMIQVMAFPKFRAVLTARYPVLLIDEYQDTDAAFVDALKAWFLDRGEGPLIGLFGDHWQKIYGDGCGSVEHDALEVIDKNANFRSVAPIVQMLNRMRPDLPQMVSDPDAPGEARVFHTNDWPGVRRTGQGGGHWTGDTSADAARAYFGHIKRRLGGEGWDFSVGKTKILMLSHSVLAREQGYASIPPIYGQFNEPWLKKDDPHIKFLTDQLEPACAAFEARRYGEMFESFGAGMPRIRKHVDKVAWADTMETLIALRLSGSIGEVIDFLAAQPHMRLPEAVEERERRLAETGPEPVEGESRRVTQLRKLRAVSYSEVIVLDQFIDGHTPFATKHGVKGAEFENVLVVVGRGWNKVSAPRTPSLHSRG

SEQ ID NO: 64388 - protein, 707 aa, Haemophilus parasuis 174
MKISQIKIKNFRKLKNCIINLSNKETLFVGANNSGKTSAMHALMFFLSNESKKFKITDFSIDYWKQLDEIGKSWLHEDVSNHIGSDINEWRKYCPSLYVTLSNFIELDLPKIKHLIPSLSWDLNSSLYVSLIYEPKDLGKLKADFIKHIKQIKEAYSERIPTILPTSLKEFLGENITSYFSINAYLFEEGNESNLYPLQNFPFEGIFKLSIIPAQRKFADSTDIDNKSNNLSDELGKFYENHIDFKKLPSIDDINTLLAIQELQNRITSELNIKFQEPLSKLKGLGYPSANYDPDIKLESFIDNSDILKRHTKVKFGNDTNLALPEELNGLGYRNLIYIFFKLLAFKSEWQREGKASEIEYDLPIEPIHLVLIEEPEAHLHSQVQQIFVRKAYEILTQDVSDLFSTQLIISTHSSYIIHEIGFENLHYFKRINNKDILCSEAIDLSNVFNNSNIENKKFVSRYLRTIHCDLFFANAIILVEGSAERMLLPYFIRYNFPELHSSYISILEVNGAHAHRFKPLIEALGVPSLVLTDLDSVDQEGKKVNPKRGEGQKSSCDNLTSWLSLPDRNLETVLDYSDSEQIVNNSFISYQKEIPINWRGKEKTVIPYTFEDSIMYSNLDLFQNKEKMKEATGMLKKMHQAALEQNIDDCCIKAFNALSGEKARMALDILYMFDPDVNIFNTPDYIETGLTWLKKELGLDNGECHE

SEQ ID NO: 64389 - protein, 599 aa, Haemophilus parasuis 174
MNNVDNDIYSYATAQPPKSFLLFAGAGSGKTRTLVTLLQKIKEDQRNNLTKNGQRVCVITFTNAACDEIKHRLNYDQTFNVSTIHSFAWDLIKNFTNDIRSYLKEKLEEDIIELNDKIIKARTTKSRDSYTKDKEKNELRLDNLKYIHQFIYSPTEILVGKDTLNHSEVIGICADFLKNNPLMQDILVSQYPILFIDECQDTQKELLISLLETQKRKKDYFCLGLFGDLMQRIYSNGYAELVENLPSDWEKPFKEENYRCPKRIVKLINDIGSSLKNNRFIKQESKNNDEGIVRLFILDKNTPNKLEIEQKVREEMASISCDETWKDIKNVKTLILEHAMAAKRAGFDAFFSPLSKNDIIRDNLLQKTGESVLFLLNQFLPLIEYIQSNRPFEIMRILERYSLCMNKDNIVENFDYFNSIIKDFSYRVSDESSLKELLLYIYEYDILELPNDIRNGLHFDQEADEENRAFLWNQALNANLKKLKNYSSYIKGEVGFGTHQGVKGLEFPRVMAILDDSESQGFLFKYNKLLGTEPLSSTDNKNISEGKDSVITRTLRLFYVICSRAEESLAIVVYSNDPARLNQEVISSGWFNEGEIIEI

SEQ ID NO: 64390 - protein, 592 aa, Sphingobium sp. HDIP04
MIENFRGIQSAKLVLPDHAVLIGDNNTGKSSVFEAIDLALGPDRLSRRPPVDEHDFYQGRYLPSPNPDAPEGAEPGPAPKITVEVTITNLSPEQEARFGANVEWLNTTTGDFYQEADPAGVDAAEIKAALRVTFVGQYDPDEDDFVGNSYFTRSLSEDETPASFSKKDKQHCGFLFLRSLRTGSRALSLEHGSLLDIILRLKEIRPQMWEGTIGTLAAIDVASDPAIGISGVLESIDKSLKKYVPREWGVKPHLKVSNLTREHLRKVITAFIATGAGDHAAPFFRQGTGTINMLVLAMLSQIAEDKQNVIFAMEEAETAIPPYAQKRIVHELRKLSAQSLFTSHSPYVLEEFSLDETVILSRSDNGQLSQSKIELPESIKHKRYRQDFRTRFCEGLLSRRVLIAEGATEATSFPVVARRLAELSPATYASLEALGVCVIDAGSETQIADLGALYKSLGKRTFALCDKQTDAAKAAIEAQVERLFMHDEKGIEDLILNNTTQAALERFSDQLDWPQHLLNQYPNPKAQAAAALGAYFKWSKGNWGIAEFLAQCSEVEIPQWLRDACTTLKAACDPPPQPAEADGEDLFADILG

SEQ ID NO: 64391 - protein, 608 aa, Sphingobium sp. HDIP04; identical to SEQ ID NO: 64315

SEQ ID NO: 64392 - protein, 596 aa, Sphingobium sp. HDIP04; identical to SEQ ID NO: 62726

SEQ ID NO: 64393 - protein, 605 aa, Sphingobium sp. HDIP04; identical to SEQ ID NO: 62727

SEQ ID NO: 64394 - protein, 426 aa, Sporomusa ovata DSM 2662
MKQRGYLYEIDYVVNVLYIDSYVDLNSLFKKNVNSLIKNESDVDKKVLERIQQTIIKLNSHISSLSGIKEFEKKVTPEYKKFRNENVSISIKSEIAVKGLYSNIVPYIKQDSDSNLYPTAGEGRKKLLAYSIFDIISDEYAETKINLFLVEEPENHLHKSMQIALSQILFTDEKYKYLFVTTHSPFVLYEMESVNLVRIYNETKINSASTFYKVPKEYKKNRKMLNRGLSEAIFADRVLLVEGPSELMLFEKVLSCINPFYEADGTYILAVGGIGFEKYFVILDKLNIDNVIKTDNDLRYVKSTKTYSLLGFSRCNKIIDERLLPTKRIKENSIAAKKKLYAHNITQLNEIRDDYKVFLSKCDLENDLDEVLHSELVKYLNTEDAVAYLQDAKHYNMVKLVEKLTDTDCRKIYNHYNFACLKAVML

SEQ ID NO: 64395 - protein, 502 aa, Sporomusa ovata DSM 2662
MILSPIQKQIISTSGNLIVRASAGTGKTHTMVNKIAKEINDNKSHKVVAAITFTIKAAQEIRERLTVDSSQHFIGTNNSFAIEEVIKPFMKDVYGADFDCDMNTDYSLKIDTLEDGIQKIADESTLCSYNNNKANFIFELAQQIVETSTACRLYLQAKYFKIYIDEYQDCDKDMHKFFMYLCDKLGIETFVVGDEKQSIYIWRGAYPDAFKSICQKNNFKKIFMGDNYRSCQQIQNYSNLLCEETRDLHVPIDSIDNIVYLSATSNTWVTEVLKKIDASQNSALLRFSNANAKSGALLLERQGMEYVYIPQTPIADITTDSAWLYSAVAKYMILDQYSVYDLISEIPVEGNDSKKNVATIKDYLKNIETSINIEDVDEFESKIQDLAKYLGYSTRRNHIEKLFQTIIDSTFHVAFEPEKYQHIAITFHSSKGLEFDQVIIFAEDYRLSDMASIYNHYVAVTRARYKLIIVRLNNYNSDVFHNNITEIISTCNLHIGDVVSLV

SEQ ID NO: 64396 - protein, 596 aa, Sphingobium ummariense RL-3; identical to SEQ ID NO: 62726

SEQ ID NO: 64397 - protein, 605 aa, Sphingobium ummariense RL-3; identical to SEQ ID NO: 62727

SEQ ID NO: 64398 - protein, 689 aa, Peptoclostridium difficile CD41; identical to SEQ ID NO: 63298

SEQ ID NO: 64399 - protein, 621 aa, Peptoclostridium difficile CD41; identical to SEQ ID NO: 63299

SEQ ID NO: 64400 - protein, 696 aa, Peptoclostridium difficile CD44
MILKKMKVKNFRLLKNFELDFKDELSLVIGKNNCGKTSALIILDKMLNSSKVMWEDINLECQKELYEKIIDFDISEQEKVASLETVNLQLFIEYDDNDSYANIQKFMMDLNPENNIIVLEFISLIAAKKIIELKNIISEKNIEDFKSFSKFMSKYFANFFETKKYSRGFDVEANKITQDRSEEIDNKDIQKVIKVAGIRADRAVSNDDRNHVLSGLTGKYFSSYKAAKDESESVFTRLEEKLEEADKELYKIYNGEKSESEEPIDGIFSDVIDVIKTYGGAENGIDIAIESSISEKNLLSDNTNLSYRQGGDCSLPETYNGLGYLNLIGILFEIETKIQELFEQPADINLLYIEEPEAHTHPQLQYIFIRNIKSHIKAHRKKLLEDKNKQLQILITSHSSHIVSECNFDDIIYLKKNENMVIAKSFNSLKEEYGGDEQKGFKFVKQYLTMNRSELFFADKAICIEGDTERILMPMMMHKIDNKEKPKADLIPLLSQNISIIEVGAHSHIFMPLFSFLGTKVLFVTDIDSVKAEKKIDKNGKERTVYTSCHPDEGTHTSNASIKEFFKDTGIDTSNNQFKELVGKNAEDKIKDNMRIAYQIPESDGEYQASSFEDAFIALNKDFILKNKEGFYQYGALKDFAADEIESGDYYKFALNNVKKKSAFASSLLYFDKEDGNEDEKWTVPHYIEEGLLWIQ

SEQ ID NO: 64401 - protein, 635 aa, Peptoclostridium difficile CD44
MDTVTLEKEVLEALQCIKNGESFILEGGAGSGKTYSLISLINALTEELPDIKIVCITYTNNAVAEILSRIENENIWVSTIHEFIWDLIRKYQNEIKDVLVELINDEDEKNFKKPKDFSEDLISKDYFKNLYVDYDEYYSVTPNDENRIKISHDHILIVAEKMFEKYKKIADILKDIADCIFVDEYQDTSPLVADILLKHLEQSSKKNVIGFFGDSMQSIYDNGVGNLNQYSLTKIVKTQNRRNPRVVIEVANKFRDDGIIQEPSEDINAPNMENGTIKEGSIKFLYGNETDDFISIKEKSIFESWNFSDGKQTKELRLTHKYNAEMAGFKGLYDLYNADLIITLISKIKKKIDKGNLDSDKTLGELALEVKPTYKKVELLDQINGNEIYHSIYSVLKDMPWKEAYEKCRVTNESLMSYKLNGMSGRYEANSYRDRILRRLDILEEIIELYEANKFNDFLRITKFSIHNRNDKICLKQAIDYLVSEDNKTIEDVLKFAEVKGLLKEDELFSDYILNKGFYLWERIKKITFNQYRKSVLYLKEFSPICTQHSVKGSEYDNVLLVLESDWNKYDFNTLFGKGSSNSNVQLRTKKLFYVCITRAKKDLIIYMPTNDSDILGKAKEFFGEENVMDISSIK

SEQ ID NO: 64402 - protein, 689 aa, Peptoclostridium difficile CD51; identical to SEQ ID NO: 63298

SEQ ID NO: 64403 - protein, 621 aa, Peptoclostridium difficile CD51; identical to SEQ ID NO: 63299

SEQ ID NO: 64404 - protein, 689 aa, Peptoclostridium difficile CD68; identical to SEQ ID NO: 63298

SEQ ID NO: 64405 - protein, 621 aa, Peptoclostridium difficile CD68; identical to SEQ ID NO: 63299

SEQ ID NO: 64406 - protein, 689 aa, Peptoclostridium difficile CD133; identical to SEQ ID NO: 63298

SEQ ID NO: 64407 - protein, 621 aa, Peptoclostridium difficile CD133; identical to SEQ ID NO: 63299

SEQ ID NO: 64408 - protein, 687 aa, Peptoclostridium difficile CD169
MTKIILSNYRCFGEEPTTIEINNLTGFIGHNSSGKTALLSALMKLFGEKSSDRIIERSDFHIPESIDPDSISKNELYIEAQFEFPELERGKDSISIPVFFKNMVVSEPGGKPYLRIRLEANWEKSSNPEGSIDSNVYYITSTTEEINPEDKRNIKRYELDQIKMIYVPAIRRPDEQLKNVSGTIISRLLNGISWSEQTKARIKTKASETEEIFFEEKGVESLKKSLETQWNSYHKDIRYSNPKINFNSTDLETILKKVEVTFSPTGTHRDHRVEELGDGLRSLFYLSLVNTFLEIEEEILKSINDGKEEDIFTLIPPVLTIVAVEEPENHISPHLLGRVVEKLNFISTKENSQTILTSHSPAIVKRIEPTDIRYFRICKEYECTKVKSIILPNEEKEAEQFKFVKESVLAYPELYFAKLVVLGEGDSEEIIIKQMIELKAESVDSSEISIVPLGGRHVNHFWRLLNDLEIPFITLLDLDRERDGGGWGRIKYAIQQLINIGHDKNVLLYTCEGISQDNEFKEMHTWDVTDTENMAKWIEMLKGYDVYFSAPLDIDFAMLQSFKDKYISALTSAEGPRIKDHGKIQDIVINEDAEDESLKAAYKDRRDSDIKSTLKQEGGDGSTYTEGEKELMIWYSYFFLGRGKPTTHLSLFSNNTDIDFESFPYCLKEFVNSIIEKMIDDSGGGRK

SEQ ID NO: 64409 - protein, 431 aa, Peptoclostridium difficile CD169
MEENEEELVSKEDWSPAAGFRLEVEAMNTVINDKNTLVVAGPGAGKTDLLAQRACFLLETNTCRYPKKILAISFKKDAAENLKERLELRCGKELASRFESKTYDAFAKEIVDRFRNSLDEAYRPLNNYNIAENRDVRRAFEIAGLNFRGNQTEFNKVYGNKLSINKLPLHTDFVDKIFIDAWNVLLKGNKDNNFVSSLTFGMISRLAEYLIRTNRYIKKAIEMTYSHVFLDEFQDTKSIQYDLVKACFFKTETIITAVGDGKQRIMLWAGARKSIFEDFQNDFLSQKRTLIMNHRSAPRLVEIQKAMYNSLNEEAIDLKTNEKWNYEDGEVYLRLFEDYIKEADILSEEIVELVETGIEINEICILVKQSVDIYSKEIINKLSERNIKARNEAMYQEILKEDIIKTLVSLFRLSLSDRNPDDWDYIYDIHR

SEQ ID NO: 64410 - protein, 302 aa, Peptoclostridium difficile CD170
MKSIILPNEEKEAEQFKFVKESVLAYPELYFAKLVVLGEGDSEEIIIKQMIELKAESVDSSEISIVPLGGRHVNHFWRLLNDLEIPFITLLDLDRERDGGGWGRIKYAIQQLINIGHDKNVLLYTCEGISQDNEFKEMHTWDVTDTENMAKWIEMLKGYDVYFSAPLDIDFAMLQSFKDKYISALTSAEGPRIKDHGKIQDIVINEDAEDESLKAAYKDRIDSDIKSTLKQEGGDGSTYTEGEKELMIWYSYFFLGRGKPTTHLSLFSNNTDIDFESFPYCLKEFVNSIIEKMIDDSGGGRK

SEQ ID NO: 64411 - protein, 621 aa, Peptoclostridium difficile CD170; identical to SEQ ID NO: 63299

SEQ ID NO: 64412 - protein, 687 aa, Peptoclostridium difficile CD178; identical to SEQ ID NO: 64408

SEQ ID NO: 64413 - protein, 428 aa, Peptoclostridium difficile CD178
MKRNWVSKEDWSPAAGFRLEVEAMNTVINDKNTLVVAGPGAGKTDLLAQRACFLLETNTCRYPKKILAISFKKDAAENLKERLELRCGKELASRFESKTYDAFAKEIVDRFRNSLDEAYRPLNNYNIAENRDVRRAFEIAGLNFRGNQTEFNKVYGNKLSINKLPLHTDFVDKIFIDAWNVLLKGNKDNNFVSSLTFGMISRLAEYLIRTNRYIKKAIEMTYSHVFLDEFQDTKSIQYDLVKACFFKTETIITAVGDGKQRIMLWAGARKSIFEDFQNDFLSQKRTLIMNHRSAPRLVEIQKAMYNSLNEEAIDLKTNEKWNYEDGEVYLRLFEDYIKEADILSEEIVELVETGIEINEICILVKQSVDIYSKEIINKLSERNIKARNEAMYQEILKEDIIKTLVSLFRLSLSDRNPDDWDYIYDIHR

SEQ ID NO: 64414 - protein, 253 aa, Peptoclostridium difficile CD201
MIELKAESVDSSEISIVPLGGRHVNHFWRLLNDLEIPFITLLDLDRERDGGGWGRIKYAIQQLINIGHDKNVLLYTCEGISQDNEFKEMHTWDVTDTENMAKWIEMLKGYDVYFSAPLDIDFAMLQSFKDKYISALTSAEGPRIKDHGKIQDIVINEDAEDESLKAAYKDRIDSDIKSTLKQEGGDGSTYTEGEKELMIWYSYFFLGRGKPTTHLSLFSNNTDIDFESFPYCLKEFVNSIIEKMIDDSGGGRK

SEQ ID NO: 64415 - protein, 598 aa, Peptoclostridium difficile CD201
MNTVINDKNTLVVAGPGAGKTELLAQRACFLLETNTCRYPKKILAISFKKDAAENLKERLELRCGKELASRFESKTYDAFAKEIVDRFRNSLDEAYRPLNNYNIAENRDVRRAFEIAGLNFRGNQTEFNKVYGNKLSINKLPLHTDFVDKIFIDAWNVLLKGNKDTNFVSSLTFGMISRLAEYLIRTNRYIKKAIEMTYSHVFLDEFQDTKSIQYDLVKACFFKTETIITAVGDGKQRIMLWAGARKSIFEDFQNDFLSQKRTLIMNHRSAPRLVEIQKAMYNSLNEEAIDLKTNEKWNYEDGEVYLRLFEDYIKEADILSEEIVELVETGIEINEICILVKQSVDIYSKEIINKLSERNIKARNEAMYQEILKEDIIKTLVSLFRLSLSDRNPDDWDYIYDILGELYGIDEGYNPKILNDFITKVELMINDLKVNLNITDEKQFSDLVDSKVEYISYEKFASKFQKYKSKDYFDDLVDKFKKLVWIEYNETKDWIKAIDNFEGKNSIPIMTIHKSKGLEYDTIFFVGLEDSAFWNFKNQPDEDRCAFFVALSRAKRRIDFTFSLDRPAGFSNSQKHYCINEFYELFDNTEIVKKIEY

SEQ ID NO: 64416 - protein, 689 aa, Peptoclostridium difficile CD206; identical to SEQ ID NO: 63298

SEQ ID NO: 64417 - protein, 621 aa, Peptoclostridium difficile CD206; identical to SEQ ID NO: 63299

SEQ ID NO: 64418 - protein, 689 aa, Peptoclostridium difficile CD212; identical to SEQ ID NO: 63298

SEQ ID NO: 64419 - protein, 621 aa, Peptoclostridium difficile CD212; identical to SEQ ID NO: 63299

SEQ ID NO: 64420 - protein, 689 aa, Peptoclostridium difficile 655; identical to SEQ ID NO: 63298

SEQ ID NO: 64421 - protein, 587 aa, Peptoclostridium difficile 655
MKRNWVSKEDWSPAAGFRLEVEAMNTVINDKNTLVVAGPGAGKTELLAQRACFLLETNTCRYPKKILAISFKKDAAENLKERLELRCGKELASRFESKTYDAFAKEIVDRFRNSLDEAYRPLNNYNIAENRDVRRAFEIAGLNFRGNQTEFNKVYGNKLSINKLPLHTDFVDKIFIDAWNVLLKGNKDTNFVSSLTFGMISRLAEYLIRTNRYIKKAIEMTYSHVFLDEFQDTKSIQYDLVKACFFKTETIITAVGDGKQRIMLWAGARKSIFEDFQNDFLSQKRTLIMNHRSAPRLVEIQKAMYNSLNEEAIDLKTNEKWNYEDGEVYLRLFEDYIKEADILSEEIVELVETGIEINEICILVKQSVDIYSKEIINKLSERNIKARNEAMYQEILKEDIIKTLVSLFRLSLSDRNPDDWDYIYDILGELYGIDEGYNPKILNDFITKVELMINDLKVNLNITDEKQFSDLVDSKVEYISYEKFASKFQKYKSKDYFDDLVDKFKKLVWIEYNETKDWIKAIDNFEGKNSIPIMTIHKSKGLEYDTIFFVGLEDSAFWNFKNQPDEDRCAFFVALSRAKRRIDFTLA

SEQ ID NO: 64422 - protein, 696 aa, Peptoclostridium difficile 824; identical to SEQ ID NO: 64400

SEQ ID NO: 64423 - protein, 635 aa, Peptoclostridium difficile 824; identical to SEQ ID NO: 64401

SEQ ID NO: 64424 - protein, 689 aa, Peptoclostridium difficile 6042; identical to SEQ ID NO: 63298

SEQ ID NO: 64425 - protein, 621 aa, Peptoclostridium difficile 6042; identical to SEQ ID NO: 63299

SEQ ID NO: 64426 - protein, 689 aa, Peptoclostridium difficile 6057; identical to SEQ ID NO: 63298

SEQ ID NO: 64427 - protein, 621 aa, Peptoclostridium difficile 6057; identical to SEQ ID NO: 63299

SEQ ID NO: 64428 - protein, 689 aa, Peptoclostridium difficile DA00132; identical to SEQ ID NO: 63298

SEQ ID NO: 64429 - protein, 621 aa, Peptoclostridium difficile DA00132; identical to SEQ ID NO: 63299

SEQ ID NO: 64430 - protein, 687 aa, Peptoclostridium difficile DA00134; identical to SEQ ID NO: 64408

SEQ ID NO: 64431 - protein, 428 aa, Peptoclostridium difficile DA00134; identical to SEQ ID NO: 64413

SEQ ID NO: 64432 - protein, 687 aa, Peptoclostridium difficile DA00141; identical to SEQ ID NO: 64408

SEQ ID NO: 64433 - protein, 428 aa, Peptoclostridium difficile DA00141; identical to SEQ ID NO: 64413

SEQ ID NO: 64434 - protein, 689 aa, Peptoclostridium difficile DA00212; identical to SEQ ID NO: 63298

SEQ ID NO: 64435 - protein, 621 aa, Peptoclostridium difficile DA00212; identical to SEQ ID NO: 63299

SEQ ID NO: 64436 - protein, 687 aa, Peptoclostridium difficile DA00215; identical to SEQ ID NO: 64408

SEQ ID NO: 64437 - protein, 428 aa, Peptoclostridium difficile DA00215; identical to SEQ ID NO: 64413

SEQ ID NO: 64438 - protein, 689 aa, Peptoclostridium difficile DA00246; identical to SEQ ID NO: 63298

SEQ ID NO: 64439 - protein, 621 aa, Peptoclostridium difficile DA00246; identical to SEQ ID NO: 63299

SEQ ID NO: 64440 - protein, 689 aa, Peptoclostridium difficile Y10; identical to SEQ ID NO: 63298

SEQ ID NO: 64441 - protein, 621 aa, Peptoclostridium difficile Y10; identical to SEQ ID NO: 63299

SEQ ID NO: 64442 - protein, 689 aa, Peptoclostridium difficile Y41; identical to SEQ ID NO: 63298

SEQ ID NO: 64443 - protein, 621 aa, Peptoclostridium difficile Y41; identical to SEQ ID NO: 63299

SEQ ID NO: 64444 - protein, 689 aa, Peptoclostridium difficile Y155; identical to SEQ ID NO: 63298

SEQ ID NO: 64445 - protein, 621 aa, Peptoclostridium difficile Y155; identical to SEQ ID NO: 63299

SEQ ID NO: 64446 - protein, 729 aa, Peptoclostridium difficile Y266; identical to SEQ ID NO: 62500

SEQ ID NO: 64447 - protein, 597 aa, Peptoclostridium difficile Y266; identical to SEQ ID NO: 62501

SEQ ID NO: 64448 - protein, 689 aa, Peptoclostridium difficile CD104; identical to SEQ ID NO: 63298

SEQ ID NO: 64449 - protein, 621 aa, Peptoclostridium difficile CD104; identical to SEQ ID NO: 63299

SEQ ID NO: 64450 - protein, 332 aa, Peptoclostridium difficile Y312
MTSHSPAIVKRIEPTDIRYFRICKEYECTKVKSIILPNEEKEAEQFKFVKESVLAYPELYFAKLVVLGEGDSEEIIIKQMIELKAESVDSSEISIVPLGGRHVNHFWRLLNDLEIPFITLLDLDRERDGGGWGRIKYAIQQLINIGHDKNVLLYTCEGISQDNEFKEMHTWDVTDTENMAKWIEMLKGYDVYFSAPLDIDFAMLQSFKDKYISALTSAEGPRIKDHGKIQDIVINEDAEDESLKAAYKDRIDSDIKSTLKQEGGDGSTYTEGEKELMIWYSYFFLGRGKPTTHLSLFSNNTDIDFESFPYCLKEFVNSIIEKMIDDSGGGRK

SEQ ID NO: 64451 - protein, 621 aa, Peptoclostridium difficile Y312; identical to SEQ ID NO: 63299

SEQ ID NO: 64452 - protein, 689 aa, Peptoclostridium difficile Y171; identical to SEQ ID NO: 63298

SEQ ID NO: 64453 - protein, 621 aa, Peptoclostridium difficile Y171; identical to SEQ ID NO: 63299

SEQ ID NO: 64454 - protein, 689 aa, Peptoclostridium difficile Y307; identical to SEQ ID NO: 63298

SEQ ID NO: 64455 - protein, 621 aa, Peptoclostridium difficile Y307; identical to SEQ ID NO: 63299

SEQ ID NO: 64456 - protein, 687 aa, Peptoclostridium difficile Y381; identical to SEQ ID NO: 64408

SEQ ID NO: 64457 - protein, 428 aa, Peptoclostridium difficile Y381; identical to SEQ ID NO: 64413

SEQ ID NO: 64458 - protein, 689 aa, Peptoclostridium difficile P15; identical to SEQ ID NO: 63298

SEQ ID NO: 64459 - protein, 621 aa, Peptoclostridium difficile P15; identical to SEQ ID NO: 63299

SEQ ID NO: 64460 - protein, 696 aa, Peptoclostridium difficile P29; identical to SEQ ID NO: 64400

SEQ ID NO: 64461 - protein, 635 aa, Peptoclostridium difficile P29; identical to SEQ ID NO: 64401

SEQ ID NO: 64462 - protein, 689 aa, Peptoclostridium difficile P36; identical to SEQ ID NO: 63298

SEQ ID NO: 64463 - protein, 621 aa, Peptoclostridium difficile P36; identical to SEQ ID NO: 63299

SEQ ID NO: 64464 - protein, 687 aa, Peptoclostridium difficile P61; identical to SEQ ID NO: 64408

SEQ ID NO: 64465 - protein, 428 aa, Peptoclostridium difficile P61; identical to SEQ ID NO: 64413

SEQ ID NO: 64466 - protein, 689 aa, Clostridium bifermentans ATCC 638
MFLSQLKIWNFRKYGTKENGDTGITVSFNDRLNLIVGENDSGKTAIIDAIKLVLGTQSYDNIRIEENDFYRSKDGTRTDSLKIECTFEDLSDLEAGRFLEWIYIDDEGKAKLEVRLVARIKDNKVTIRKTGGKEGVDINFEASENLRVTYLKPLRDAEHELNPGYRSRFAQVLKSHPIFKNNGNTHKIEEIMQDANKNIEEYFKVSISQDNSESSGSDSAEENNEELNYKDDPSSIISSISDTLSNFLGNNKDQYDVNINISEMELNKILSRLMLKIDEDKVGLGTLNQLYMAMELLLLDIKEKNNEFGLALIEEIEAHIHPQAQLRVIKHLEENIKSQTILTTHSITLASIANLNSLILCRNNNAYSLNSKYTRLSSGDYEFLERFLDSTKANLFFAKGVIMVEGDAENILIPTIAKIIGRPLYMHGVSIVNVGNVAFLRYSNIFISKDGEQTIGIPTSIVTDLDVRPIQYYQDDDNDCDSDFKYTVYEIKDTKECFINKINSKKRLKEILGRASRQILRNNEYLDKVNIIEDNYSKYKDVVKKDKEEKYNLQDIKVFTNNWTMEFDLALSCIREYVYAAVLIAKYIKSDEGGIDDIDIDEFINDAKEEIDEFIEEGKVDMDIAYQIYKPLLKGNASKAVCAQYLSKILLNKSNESEELVNKINEDENIKYILDAIHHVTKTRSEVTE

SEQ ID NO: 64467 - protein, 655 aa, Clostridium bifermentans ATCC 638
MNMIFNDIEITEDDIRYAEEILFDKVNIFDEQERIPIIQDFNNSFDVNACPGSGKTTVLLAKLIILSRKMPLNNGQGICVLTHTNVAIDEIKSKLGDKSDILFKYPNYFGTIQNFVDKYLAIPYFKRQKNENIKSIDDDIYYDNIKKLSKEVYPNIDSIIQFCIEKGYGNYTCDSHERNFMTFIANKHFNIDNNDIRDNYNKVLTDKFYYSELKDIMLNKTLDNGILRYEDAYFLAGLYIKKFPDIKKYFSNRFKYVFIDEMQDVSKIQMKIIGNIFNDDKVIIQRFGDINQSISKFDSNNNNWIFNEELKTINSSKRYGDGVVKFLEPLRVEKFGEFKGNEDIDTLNPHIIIFDDPEIESVIPKYLELLDKYNIKEEKNKRIKVIGKLALSVSNPYKSISSYVRGYNSKGNRDIPLHKKVINKLNRVKTTKEFYDYLISVILLAIDIDGRKVSNEEFTRLMEDKYINEFTIYRSNILKWTKNFRENTSLVLEDILDKTQSLFSEVEEVNCNNDILKNKINSNTGEVEESQEYLEAIELVISMDNIDTIMSTKGETHKATLYLESKLVYSNGDDRSDISRILDYMVNKKEEVDDGDKEALMNAYVAMSRAEKLTCIAIQYETIKGRIKEFKEYGYEVIGCNTEIDVLISNELQEL

SEQ ID NO: 64468 - protein, 663 aa, Vibrio parahaemolyticus 10290; identical to SEQ ID NO: 63134

SEQ ID NO: 64469 - protein, 583 aa, Vibrio parahaemolyticus 10290; identical to SEQ ID NO: 63135

SEQ ID NO: 64470 - protein, 640 aa, Pseudomonas alcaligenes OT 69
MRLSNLLISNFQSFGPAAEEISFEDVTYLLGPNGAGKTAALQALCRMFSVDPSLRRIRRSDFHVPATEAKQPEQRHLWLEADFTFEETLEDDDNDTVPPFFGQMAMREVGGTPWIRFRLEATLYEDGEIEEQFLFVTKTDENDEPVSKQAVPKRHRDTIHLHYLPAKRDPSDHVAYGATALLGRLLRAANWTEDRETVKDLTEQITDCLVENESVKTLSDSLTTAWQRLHKGDFFASPRLTFENSEIEALLRHLTVSFSPGHGENQVDFARLSDGQKSMLYLSLVLSALTIGRDVRSGENKAFDPHKLKPPAFTILAVEEPENSLSPHYLGRIVNSLKSSVDVDAQALIATQAPSMLRRVEPENIRYLRLNGDRRTQVTTIQLPQKHTDAYKFVREAVQAFPEIYFARLVVLGEGDSEEIVLPRILQAKGAPVDEFAVAIAPLGGRHVNHFWRLLSAIGTPYITLLDLDVGRHQGGWGRVKYVRDQLAQYAPENNLPAGWPYHEWNDPNTPVRTHNWFESGTVSLFNELEKRSVFFSDPLDLDFAMLCAFPQAYEAEAIAATPKSHTKVLGDSHFNPDQYDEDEQSLFEAYHKLFKLSSKPAAHLGALGRLTDQELLDGLPESLDRLADKVIERLDESPE

SEQ ID NO: 64471 - protein, 444 aa, Pseudomonas alcaligenes OT 69
MVDEALSQDYEIGPQYIRGKQITFNHLLPLALRIVKESVIARNAIRQSYSHVFLDEFQDCTADQYELIKLLFHGTPAILTAVGDTKQTIMGWAGALEGIFKTYADDFGARPLRLFLNFRSQPALLRMQNDVIREIEADAVMPEDLAKGDGGEILAGRFPNAAEEAQAVANLIQRWISQEGIPPSQIAVLMPRQIEEYGEFLMFRLTELGIAHRNDHNLQDLLKEPAVSLVVDYLTCLYGQEQAEAWSRLMDHFTPFEDDDSRSSAQRIFEETYREHLKKVKQERKTANPYASWWDMANEFLKKLGFSSVSALSADYRSKARLLEIVREVRERIRGLLATEPDLLRALARLSDDSAVRFLTMHKSKGLEFHSVVVLGVEQQTFWGQLDQERCVFFVGISRAKNRLVLTTADYRPWPKNARRWDEHRAPHAEFVSHVVRHLTKQHF

SEQ ID NO: 64472 - protein, 741 aa, Flavobacterium indicum GPTSA100-9 = DSM 17447
MNQKLYDIFLKLILLPNYLKKQHLYMKIDFIEIRNFRKLQSCKIDFSEEETIFVGANNSGKTTAMDALIIFLKTKIFKTQDFTLNNWKELNKIAENWVSDEELTEEKQSIKILENYLPTLDVWIQVEDSELHYVSHIIPTLDWKGGLLGIRLRYEPKEMIDLIQEFSTTYNKANSLLSEKGKKFKLWPKTFWDFCERKLSSHFTVKTYLLDPEKSTERQELSENSIALDGDVLKGLIRIDIINAQRGFSDANSEPSENKNDKKLSSQLRAYYDKHLNPTLEPTESDIDALESINTAQDAFDKNLKESFKTSLSELESLNYPGFGNPQIQLSTQVSTSDGLQHDSAVQYYLDEGLSLPEKYNGLGYQNLISIIFKLIRFRDDWMRVGKNSISEDEIIEPLHLVLIEEPEAHLHTQVQQVFIKKAYSVLRNNGNLEDKKDFTTQLVISTHSSYLAHHKFISLRYFKRNVSNTLSTSEVINLSTTFGTEDESTKFTKRYLNTTHNDIFFADAVILVEGPAERMLIPHFIKNFHPLLDNCYITILEIGGSHAHRLKPLIETLGIICLVITDIDSVDPSNNGKKCQPELGKNYKTNNDTLKTWHPQKELLDDLLNLTFDKKVKSDLPIRVAYQIDVELVNEGSSIYANPYTFEDSLVIENKEGFKSIDKPTGLLRKMVDASKKDNLQEFVKETYSIITEPQSKKAEFALDVLYFEDPKNINTPVYIKEGLEWVEEQLKSNKQGLNS

SEQ ID NO: 64473 - protein, 624 aa, Flavobacterium indicum GPTSA100-9 = DSM 17447
MTQYNNDIDIHVDNEIYECIDPNSPKSFFLFAGAGSGKTKTLINVLSRFKEQHGANFKFRNKKIAIITYTNAAADEITRRLEHNSIFSVSTIHSFSWDLIKNFTPDIKVWINNNLIVEIADLEEQQSKSRGVNKTSIGRAKKIESKRERLASLSKIKKFIYNPNGDNITKDSLNHSEVISITANFIKSKTLFKQILLNKFPVILIDESQDTKKELIDALFELQNQYKEKLSLGLFGDTMQRIYVDGKENLGVGLPADWIQPAKKMNHRSKKRIIDLINKIRSEIDGQEQLPRTEKTDGVVRLFAVSRAKNKSEVEKLICQKMKECTDDEKWENDDTDVMTLTLEHHMAARRMGFSTFFDPLYAVDKIKTSLLDGTSTSINLFSKIVLPLYQAHIKNNKFEIANIVKKHSELVNKQALLKEENKLSTFHSTNEKVNELLSLWIEGNQPTLLEILEKINEANLFKTPSTLKLVLARTGAEVIENEEELDEDGDILGAWEVALTAKFSEIIEYSKYINEESTFGTHQGVKGLEFDRVMVIIDDEESKGFMFSYDKLFGIKPLTSTDQKNIDEGKETGIDRTLRLFYVACSRAKESLAIVSYTDTPEELKKNIINYGWFIDNEVEIIK

SEQ ID NO: 64474 - protein, 613 aa, Stenotrophomonas maltophilia MF89
MYLAELSISNFRKINNAVLHFQSGLNVLVGANNAGKTAIVDALRSLLAGHDEPYPRLDSDDIHRPKTGSPSGNIVFKYIFRGLSPDDEADFMTALKPAKDGQMEAHITISFSEADKTGRLRAKRWCGDHDDVGLTADMMENLRGVYLQPLRDASQALRPGRTSQLSRLFQLLVDDDGKIEINKALKLLDDELKTKAPIVSTHKAITTRHSEMLGPQLSQLLELGVSVSDFQRLASRLSLTVDLFELEQNGLGFNNLIFMAVVLSELTKNPQASYRGLIIEEPEAHLHPQLQAVLLGYFETIKAVDKEKPVQLFVTSHSPNFASIANLDSLTCLVDTGIKVETFFPRDIKFSVGKREKLERYLDVTRAELFFARRAILVEGAAELVLVSVLAEKCGHDLRKHGVSLISVEGLNFDSFIPLFGEKALKIPVSVLTDADPTGPSEEDEEEEEKGDGSAEADDHAPEDGTSSGKKKAAPVYPSIGDKVQASANTLNMLRFADSYLKIFHGLKTLEYDLALYASNRKIMLAALKELHPKISANLEKKVDAATGDAEKARVLFSGMFERKNGNVQKGRFAQALAYLIAKAKKEEFTVPEYIQAAVEHACQPGPKKAEDE

SEQ ID NO: 64475 - protein, 578 aa, Stenotrophomonas maltophilia MF89
MSVIACAGSGKTFTAVRRLAHIRQCLGDHRGRVALLSFSNIAVETFRREYQALAMGSLKIPSHQRVEIDTLDGFITTNILRPHAHRTMGCTTTPFLLSGSESFLLGKDYRFWVESPRTDSYPVPQGHIHRVVIGPSGAATGFFYQNSGMLARINNGPKVAAALGKLGAYTHELARYWVDLTLREQPEILRVLARRYPHILIDEAQDIGILHQVIIERLSQAGSQISLIGDPNQGIYEFMGATGSFLSSYHSKPGVSAAALTRNYRSVPAVLDLANAISARTDDPDRTAPPTLHGAYFVPYTTADTKKVMAAFQATLVSAGLDPARSAVLCRARKWANELAGHEGAPGVGTTKILAQAAMARDIHSDYSTAFRLVATAIMGLTDNAPKGIVARLTQPARYPEERALRRVIWAFTRDPVSGLPSAALPAVSDWQPALLQRIRVLMTNLSTAHGLNHTSSTLGARLSKRSLPGSPLMSPPDLGADQPLRVKISTVHQVKGESLDAVLYMATKPHVSALLGGGSTEDGRIGYVAVTRARDLLWLAVPATALKSLRADLQAKGFKDATATAATPTAGHDNGSL

SEQ ID NO: 64476 - protein, 690 aa, Escherichia coli HVH 9 (4-6942539)
MYIHQVEIKNFRLLADAELVLEEQTTVIVGRNNSGKTSLSEIIRRFLADGSATFQLEDFSSSCYDRFCDALEALKEGMEDHLVRELIPAIELRLKFQYDPAQPQLGPLSPFVIDLDPACSEAQVVVRYELKDGHLTQFLESHTEMPLSREDRLAFLRILRERIPNNFCVKIWAEDPNDPDNRRELPPSALRGLVKSGFINAQRGLDDVTSRESDVLAKTVENLFATASSASAGTADKQIADALKGAVQDIQTQIDTNFGNQLNSLIPALETFGYPGLGGQELHTETLLDVSKLLSNFTKVRYSGYSGIALPESYNGLGTRNLIFILLQLAGFYKAFCAEVTEPGVHLIFIEEPEAHLHPQMQEVFIRQLAKIAQQLVDGTEDRRPWPVQFVVSTHSPHIANAAGFESIRYFLGAPAQGTREGVRKTKIKDLRKGLNHIPIEDKKFLHQYMTLTRCDLFFADKAILVEGLSERLLLPVIIKKLESAEPERPKLSSQYATVMEVGGAYAHLFFELLAFLELQSLIITDLDAVLRAGGQACAVHLGTYSSNACLKAWFSEDTPFTLAGLIARSDDDKARNGNRIAYQCAEVTDGPCGRTFEDAFILANSALFGLVGRNTQELEIEARDKAAEWKKSEFALKYAITETEWNAPKYIVDGIRWLAGSNELMTQDPVLAQVVEATTSIEEGASADV

SEQ ID NO: 64477 - protein, 577 aa, Escherichia coli HVH 9 (4-6942539); identical to SEQ ID NO: 62941

SEQ ID NO: 64478 - protein, 690 aa, Escherichia coli HVH 198 (4-3206106); identical to SEQ ID NO: 62940

SEQ ID NO: 64479 - protein, 190 aa, Escherichia coli HVH 198 (4-3206106)
MSEIHSPAEAASQRALESMYACLSEGRSFRLEAGAGAGKTYSLIKALRFLIERNKDLFEKRSQQIACITFTNVAKDEIVARTDRSPIVFCDTNHAFCWSLISSFQKPLRELIETMPTWAEKLEEVGGSLGNRSIEYNLGHRSIRDHRITLHHDDVLSLTISLMEHEKFRRVIAERFPIILVDEYQDTDKN

SEQ ID NO: 64480 - protein, 567 aa, Escherichia coli HVH 222 (4-2977443)
MYIDNVYLKGFRNYSDSFVKFNYSTLIIGGNDVGKTNLLYSLRILLDKSFSDLDLEPKNSDFHIDAKGNQCEELEIIINFREVKEDAVLSKLAGYVSDDAQTYIKYKAYRATLDYKLYIGHKESEMDEISGRFYLKYLNLRYVNSQRDLAKYISTEKKHLLRLAQEMRNEEQVRKDENTLNELTNLLNDVNDKVKEISYVSTATEELNDELKKLSYNNEKISVMLDSGAIGVDQFIEKLELSSNTNGKKVMLGGDGFNNQVLLALWKAKSVREHDTENEVVIYCVEEPESHLYPHQQRKLSEYLISKLPGQSLVTTHSPQIAINYSPDSIIKICSYNGESYAASEGCSDCISNAWSGMGYRMSILPAEAFFANVVFLVEGPSEMLFYQALAKECQIDLDFFNISILSVDGVQFEVYRKILDALEIKWVARTDNDSSKVPRKKEWQYSGLNRALALCGMEPLKNELTEISQAQRIEKHKIYKDKLKHHNIFVSINDLEGDIGVELSTQLKEYVGVDNEEIAADYLRGKKAIRMQEFLGEYSYALKNISDGELIQPLLTAVKLATEELR

SEQ ID NO: 64481 - protein, 540 aa, Escherichia coli HVH 222 (4-2977443)
MIDFTHEQKAAIDYPSSMVLTACPGSGKTAVIVEKIVRDLVECKEYQGVIAISYTNKASDELKKRCLKATPNSKSSFFGTIDKFYLTEVILPFIKQLWGRVDDLHVVKLNELASSEKDRLSAFFNVEFICEKINEYDFKDIKELYANGILILEFIPLLAFYILRNTLACRRYIAKKYTSIYIDEYQDAGCVQHLLFLYLFELGVKAVAVGDADQSIYSYAGKSSKYLMSLLDEKSGFAPFKITINHRSHSSIVNYASRLLNENCDLLITDEIRVYRKTVNGTQCEIAKWIDANINNIKRKFNISKEKEIAILTATNSSVALVSGLINSKARAYLDDELSVLGGDVSLLLKNLLNYRFNKTITAQAIIESLNYKVLERNAIRKMRGVIRDVRDSNDNQLIPDLRKAVKLLINADISANHIDAINSILHNKMMLNNYLPVSDDELQIMTLHKAKGLEFDFVFHLDLYDWILPRREYIKHCFDEVFSHYEQCLNLHYVGVTRAKKAVVLINSTERLNYQSELKKAKPSQFLSLKGLESLYKKI

SEQ ID NO: 64482 - protein, 594 aa, Escherichia coli KOEGE 73 (195a)
MRISRIRLINFANFSDVDVETGESIVIVGENKVGKSNFIRGLQLILDPGLSERDRQLGFEHFWDGLGEEKLGETIEISVDLTDFTDDPRLMAHLNDCVLNPGPPMVARLTYRFQPKTGLNRAPESLKDYEYVIFGGADPDMHIGGAFRRMLPIDVQGALRDAEKDLSSWRNSPLRPLIEELSASLDDETREEIQTQVDEAQQELANHDEVAATAERISERLVAIAGEQHAVPLSLGLAPTRVDALLRSLRLLLDSGIRGIGDASLGTANLIFLALKSLELDRLVDDGERDHTFFVVEEPEAHLHPHVQRLVYRYFLGTDGGNDDEGTPLTTILTTHSPHIASVTPVRSIVLLRYDSEDEKTIAVSTANAPFSRRDEDDLQRYIDVTRGEIFFSRGVILVEGDAERYLVPAFADALDIPLDMLGITVCSIGGTNFTPYVKLLGPHGLNIPHVILTDRDPIAGREPLVRRRLINILGVLEGDVDHDDMDTDEVIARAGEYGCFVNEITLEPELFTGGLAEAMQSVIERELSLAQVTLDRIQAWVDDTDQLDIVRLLKLIERIGKGRFAQALAPSVSEDNCPDYIREALEYICDAVT

SEQ ID NO: 64483 - protein, 605 aa, Escherichia coli KOEGE 73 (195a)
MPSRSVSAAYLAQAAELAGNPGQLAAYHSQGHCVVLAGPGSGKTKTLVLKLARILAEDVQAPRGAACITYSQECARELTRRLEALGLREAPNLFIGTVHGFCLRHLLMPYGRLADLPIPFPLSVVSQRESERLLRQSGDRLFGANHPYKAIDLGRHRRSVLNRNSVAWRAEEELAAWAEAYEVALRQQGLIDYDDMVIFGQRLIIEHDWVLPLVQAKFPILAVDEYQDLGVALHRMVKRLAFEGGVRLFAVGDADQSIYGFTGADGALLLELADRRDVETVRLQLNYRSGAGIVNASEMVLGEVRGYRANDPNRQTTIAFQLCPDGLVDQAVHAVAQIIPAALAAKPGRTLGDIAILYKDYRAGDVVADAVTAGGFDYIRVDTAAPYRKVTLTSWVEDCAAWCAGGWRIGHPQLRGLIDRYIAFHRARLDDACARRKGQELTRLLWALRADRHPACDFVASLRNGLVDSLLATEPTLSDQAEQLDRMTAALAEGGTLAMLDITSLGGRDGSPEHLNLLTLHSAKGCEYDVVIMVGLDLGNLPWRNEAPEKLRESRRLFYVGLTRARDEVHMLYSGFVDGRYGPMRLGRSPFLDELEERMRGAGLR

SEQ ID NO: 64484 - protein, 607 aa, Escherichia coli UMEA 3113-1; identical to SEQ ID NO: 62590

SEQ ID NO: 64485 - protein, 630 aa, Escherichia coli UMEA 3113-1
MNLSNAQRQIVEAPMDIAIQVLASAGSGKTRVLTERVRYILNNTKRDAVIALTFTNKAAEEMSSRLSDFDPDEDRVWIATIHSVAQRILEKYGHTIGLPSDLYIYDRDKDRMEVFMQSLREDGIDIDEYLSIADSKELKNRERNLQSYMDIFSKIKRELLTEFEVSELYPDNNIWKIYQDYQASLLNSGGIDYDDILVYAHRILLTHDWIAKIYRSKYKHVCVDEAQDLNKAQYEFIKVLCGDVIKSILMVGDPNQMIYGFNGSSKDYFCEDFINDFFPNQFELKENYRSAKAIIRAANKLRPGSQAEIDYALEGGVRISEVASEEDEADTVVATIKYLLELKVHDEIEGDISLNNMVVIGRNRFVFGKLEKCLKENLIPYSLRKGERALEPSTRFGKVLDYAIRVKLNSKDWVDGKKLCQVLCISEPAGWTPDVLREMAVQISSSDDDYSIVFEKLLTTIDSLNIENPKIPKLIKEFNALLTSLVENHNGISDDKIEDVKLSIEELKEFSGMWTRFKRKGLGDSLVAFRNALALGQLAESSMDEGLTLSTVHTMKGLEKDIVFLIGMCEGVFPDYRARTPKELEEERNNAFVAVTRAKRWLYVSYPRQRMMPWGDLRFQQKSRFVSEIE

SEQ ID NO: 64486 - protein, 690 aa, Escherichia coli UMEA 3117-1; identical to SEQ ID NO: 62940

SEQ ID NO: 64487 - protein, 577 aa, Escherichia coli UMEA 3117-1; identical to SEQ ID NO: 62941

SEQ ID NO: 64488 - protein, 770 aa, Escherichia coli UMEA 3155-1
MSAADATTSLTGQISLRFVELCQFRRLGKVQLEVDPKTTILVGANNSGKTSILAALRHFLADGSPFGAFDISVSQWPKLRELGRAWDALEEDPSTSGASEDEWVEQLGTLLSAMPTLDLWFDAKAGMFHYVSPFLSKFSWKGGGVGVRLRLEPATNIEDLKQLAWKYHLTRIPVKDMGKDSLAWPIDLLDFWLREPSLLGQVRAYKLDADNNPLDGIKTYVSQILDANSSPIDRKHLQKIIKVDFVAAQRGLGSEEADSRSASGPHRIGLFSNQLLKFARQHLNVAATGHGHRADLIKAVADAQQELDKKIHEAIGPSVEEVKELGYPGLHDPQEIRFRTRIQTAELLDHGTAVQYSMQKDSLEELLPEYSIGLGYQNLQSLSYQLVSFKAARLNPEKGAPVPVHLVMIEEPEAHLHVQVQRIFPGKAHKLISPNGSAESGLKSQLIISTHSSHLAHAENFDRLRYVRRVAKSKEQNMPTTEVVNLGQVFGDDKTTRQFAERYFRVQHTDLLFANAAIFVEGVAERMLLPLFIERDFAILNSRYLSFLDIGGSHAHRLKSLVERLRIPTVIITDIDPVEEKVGNPKKNDEPTTTLVAVANTGQPGLQCGNPTLRGWHPKLQQLEDFKDPKDEHLVWNEIAECFVRFAWQLPVAEADGQWPSTFEDSLILRNIPWFKQLIDEKVDGDGKKIKPPKGALGSVARKVAENDNIPDLLSALHKLMHGSFNKGDFAASIFEMVAADEPIVCPKYIEDALEWLQTQLEPSREVMHD

SEQ ID NO: 64489 - protein, 649 aa, Escherichia coli UMEA 3155-1
MTNSPILDGNDRDAGVVEEICGYLTDTPPRNYFLFAGAGSGKTRTLVEVLRRLTGVTEHEKGGQLARSLKMYGRSIRVVTYTKNAVSVINRRLGDNNLVSVSTIHSFCWELINGFNDDIRESLIAVKEAQLAKETAEAQAKPRGITAAKQRDLDEITNEIEVLRTTEVFKYHPDRNTYGPGALPHNYVLDATAWLLQNKPTLQSILKDRHPIILIDESQDTMKGVLDSLMVLAKKSDRDLTLGLLGDHRQRIYMDGHADLPSIVPESWATPELQMNHRSQRRIVTLINKIWETEFEGRTQPTKGSAQHPRTEKAGGTVRLFLGDTSRSPEDKVLSERWCAERMFEISGLADWNQGQYQLLALEHKLVATRGSFLDVYEAMVLLDPNAAAPSGSRDNKGPSTVQILLNELAHLEACVSDEGIVNEFKATEVFRRYGGLDNMPEDSEARVERTDEMLEAIAIFAMACANSESTIAEVLAPVLSANLFEVDHRLLEAYVDKSPAPQAPGRGEDESKQTRMRRGWCALFASPWKQLKCYRNYLAGISELATHQVVKGSEFNHVMVVMDDALAGGTLIKYDKIFGGTQLSPTDKKNAEAGKETTIDRTLRLLYVTCSRAQESLALVLWSSDPSAAMARIEKSMWFTKDEIQVIP

SEQ ID NO: 64490 - protein, 594 aa, Escherichia coli UMEA 3355-1; identical to SEQ ID NO: 63846

SEQ ID NO: 64491 - protein, 593 aa, Escherichia coli UMEA 3355-1; identical to SEQ ID NO: 63847

SEQ ID NO: 64492 - protein, 594 aa, Escherichia coli UMEA 3682-1
MRISRIRLINFANFSDVDVETGESIVIVGENKVGKSNFIRGLQLILDPALSERDRQLGFEHFWDGLGEDKLGETIEISVDFTDFTDDPRLMAHLNDCVLNPGPPMVARLTYRFQPKTELNRAPESLKDYEYVIFGGADPDMHIGGAFRRMLPIDVQGALRDAEKDLSSWRNSPLRPLIEELSASLDEEDREEIQTLVDEAQRELAGHDEVVATAERISERLIAIAGEQHAVPVSLGLAPTRVDALLRSLRLLLDSGIRGIGDASLGTANLIFLALKSLELDRLVDDGERDHTFFVVEEPEAHLHPHVQRLVYRYFLGTDGENGDERAPLTTILTTHSPHIASVTPVRSIVLLRHDAEDEKTIAVSTANAPFTQRDEDDLQRYIDVTRGEIFFSRGVILVEGDAERFLVPAFADALDIPLDMLGITVCSIGGTNFTPYVKLLGPRGLNIPHVILTDRDPMAVGEPLVRRRLINILDVLEGDVDHDDMDTDEVIARAGVYGCFVNEITLEPELFTGGLAEAMQSVIERELSLAQVTLDRIQAWVDDTDQLDIARLLKLIERIGKGRFAQALATSVSEDVCPDYIREALEHIRDAVA

SEQ ID NO: 64493 - protein, 605 aa, Escherichia coli UMEA 3682-1
MPLRSVSAAYLAQAAELAGNPGQLAAYESRGHCVVLAGPGSGKTKTLVLKLARILAEDVQAPRGAACITYSQECARELTRRLEALGLREAPNLFIGTVHGFCLRHLLMPYGRLADLPIPFPLSVASQRASERLLRQSGDRLFGPNHPYKAIDLGRHRRSVLNRNSVAWRAEEELAAWAEAYEAALRQEGLIDYDDMVVFGQRLIVEHDWVLPLVQAKFPILAVDEYQDLGVALHRIVKRLAFEGGVRLFAVGDADQSIYGFTGADGALLMELASRRDVETVRLQLNYRSGTGIVNASEMVLGEVRGYRASDPNRQTTIAFQLCPDGLEDQAVHAVAQIIPTALAAKPGRTLGDIAILYKDYRAGDVVADAVTAGGFDYIRVDTAAPYRKVALTSWVEDCAAWCAGGWRIGRPQLRGLIDRYLAFHRARLDDACARRKGQELTRLLWALRTDQQPACDFVVSLRNGLVDSLLATEPALSDQAEQLEHMTAALAEGGALALLDITSLGGRDGSPEHLNLLTLHSAKGCEYDVVIMVGLDLGNLPWRNEAPEKLRESRRLFYVGLTRARDEVHMLYSGFVDGRYGPMRLGRSPFLDELEARMRGAGLW

SEQ ID NO: 64494 - protein, 565 aa, Vibrio coralliilyticus OCN008
MYIRKVTINNYRSFRFFEAQLQQLTVVIGENDTGKTNFFTALSLPLSGNQIDFNQKRLSVSDINKDAVIDFLKSVVDDDTEENQLTNIPKVSVTVEFADPKNAYETALLAKWIVADGDEETYKIRYDFKPKDDKDLLEVVKKSLAGKTLDDINWFTLPVELYDYQVVSVNNEKPIAYSDLKHVSIHSINAERDDFSESSSMKSNSIFTKLLMNTLNDDDKGQINTAYSEFFSAIEKTETFDKVIGTNDDFENYDSIIKQLECTPNLPNLKNILSNITLKYGNESLYQKGLGQRNLIYILILFAYYKSCGDTFNLCCIEEPEAHLSVNNLRLVRDFIEKSSSNSGSLVQTIISTHNPSIINKLKISNVLAFTGEKAISLSDTPPKLVDYLRKRPNFDILKLLFANKVILVEGPTEEMLISTYLSKQPDLSDIDIIPIGQRGYATFLDIWLALNKDNQNKKIGVVRDYDNSDAAKTKHDAYDTAHANVTVRTTTNYTLEIDLVEAEDNLALLNGLFEMEGDLDAVSKHMINGKTARMLDVCDAMVDEENPLDIQLPAHIAEVIGAVS

SEQ ID NO: 64495 - protein, 458 aa, Vibrio coralliilyticus OCN008
MIEVQIAGAGAGKTYGLAKTLIDHIKACTSHKTTFALTYTNSATAKIEQEIIKQHGFIPSNLCIQTVHSFLLNEIIYPFSSFTLGDVYNDASIMMLPSNVRFKNWHLKRLKDKNIIHAESVYNIAKQIVDETTSKHNNRAKKAKVRRLLAILGSCFDKIFIDEVQDLDKDALRFFEVLGCNDIDVYMIGDPKQAIKFPQDLDAFVRKVAPKEYATILPINNQTRRVPTEILAVSNSFCYEDQQQESLSEIVGELMYIESTDGRYDELLTNYLDTKQLVCIDKKNGRYTTSSKHKHAFPREIEEMIRDSNHKKDKALFVIAAFSDFMDDVAEVGARIAINRLKASHGLTLSKQHFAQLLELCNSCTGNDVQFKVQSIESIKGLDADVCVIILSSNTLKYLTQNAISEANQFNKEWKKVYVALTRAKKRLVLALDHELLAKEDMAAVRDSIGELGFVTHN

SEQ ID NO: 64496 - protein, 207 aa, Listonella anguillarum M3; identical to SEQ ID NO: 63214

SEQ ID NO: 64497 - protein, 548 aa, Listonella anguillarum M3; identical to SEQ ID NO: 63215

SEQ ID NO: 64498 - protein, 688 aa, Streptococcus intermedius B196
MILKKMKVKNFRLLKNFELDFKDELSLVIGKNNCGKTSALIILDKMLNSSKVMWEDINLECQKELYEKIIDFDISEQEKVTSLETVNLQLFIEYDDNDSYANIQKFMMDLNPENNIIVLEFISLIAAKKIIELKNIISRKNIEDFKSFSKFMSKNFANLFETKKYSRGFDVEANKITQDRSEEIDNKDIQKVIKVVGIRADRAVSNDDRNHVLSGLTGKYFSSYKAAKDESESVFTRLEEKLEEADKELYKIYNGEKSEGEEPIDGIFSDVIDVIKTYGGAENGIDIAIESSISEKNLLSDNTNLSYRQGGDCSLPETYNGLGYLNLIGILFEIETRIQELFEQPADINLLYIEEPEAHTHPQLQYIFIRNIKSHIKAHRNKLLKEKNKQLQILITSHSSHIVSECNFDDIIYLKKNGNTVIAKSFNSLKEEYGGDEQKGFKFVKQYLTMNRSELFFADKAICIEGDTERILMPMMMHKIDSKEKPKADLIPLLSQNISIIEVGAHSHIFIPLFEFLGIKVLIITDIDAATKNNNGRYVKSHPQEAKYTSNASIKDFFKDTCLDESNNEFEELLKKTPEDKIKNNIRIAYQIPETDGEYQASSFEDAFIALNKDFILKNKEGLCEYGALKDFSNDEIENGDYYNFALNNVKKKSAFASSLLYFDDENGEEDEKWAVPHYIEEGLLWIR

SEQ ID NO: 64499 - protein, 635 aa, Streptococcus intermedius B196
MDTLTLEKEVLEALQCIKNGENFILEGGAGSGKTYSLISLINALTEELPDIKIVCITYTNNAVAEILSRIENENIWVSTIHEFIWELIRKYQNEIKDILVELINDEGEKNFKKPKDFDDDLISKDYFKNLYVDYDEYYSVTPNVENKVKISHDHILIVAEKMFEKYKKIADILKDIADCIFVDEYQDTSPLVADILLKHLEQSGKKNVIGFFGDSMQSIYDDGVGNLNPYNLTKIVKTQNRRNPRVVIEVANKFRDDDIEQVPSEDINAPNMENGTIIEGSIKFLYGNEADDFISVKEKNIFESWDFSDGKQTKELRLTHKYNAEMVGFKDLYDLYNADLIITLISKIKEKIDKENLDSDKTLGELALEVKPTYKKVELLDQINGNEIYQSIYSVLEGMSWEEACEKCRVTKESLMSYKLNGMSGRYEANSYRDRILRRLDILEEIIELYEANKFNDFLRITKFSIHNRNDKICLKQAIDYLVSEDNQTIEDVLKFAEVKGLLKEDELFNDYILNKGFYLWERIKKITFNQYRKSILYLKEFSPICTQHSVKGSEYDNVLLVLESDWNKYDFNTLFGKGSPNSNVQLRTKKLFYVCITRAKKNLIVYMPTNDSDILDKAKEFFGEVNVMDISSIE

SEQ ID NO: 64500 - protein, 770 aa, Escherichia coli HVH 190 (4-3255514); identical to SEQ ID NO: 64488

SEQ ID NO: 64501 - protein, 649 aa, Escherichia coli HVH 190 (4-3255514); identical to SEQ ID NO: 64489

SEQ ID NO: 64502 - protein, 531 aa, Pantoea dispersa EGD-AAK13
MRLDEPDGVPRVRFRLNATMGLDSDIEDALVYVLDVNEDDSPQSVAQVPRAERNHIQVHYLPARRDPADHIAYGANALLGRLLRAVRWDAERETIKGLTDQISDSLAANPSVKAFSESLKATWATLHKGKFFTDPRITFVASEIESLLRHLSVSFTPGHDGSLVDFSRLSDGQKSMLYLSLVLSSQAIGRAVLAEEDTSFDSDKLRPPVFTLVALEEPENSLSPHYLGRIVSSLNVMTKNMDAQALIATHAPTMLRRVAPELIRYLRLDKSRETCVTCIKLPDETDDAHKFVREAVQAFPEIYFSRLVVLGEGDSEEIVLPRLLQAKGAPVDESAITIAPLGGRHVNHFWRLLAALKIPYFTLLDLDVARYAAGWGRFKYVNEQFAIHQPHNKLPEEYKIPKWNAEKYKVRDFKNYLNILEERGVFFSYPMDLDFSMLLAYPEAYDVDEEEPDDATIKAVLGKSHYDPSQYNEDELALFNTYHQRFKLGSKPAAHIEALTNLDDADLLARMPDSLDRLAEAVIAKLTELPE

SEQ ID NO: 64503 - protein, 554 aa, Pantoea dispersa EGD-AAK13
MIAVEEWQPADGLTLEPNAKRAAKARKRCLALTAGPGAGKTEMLAQRADFLLRTGTCRYPKRILAISFKVDASRNLTERVERRCGRNLASRFDSFTFHAFAKRIIDRFRTVLTGEYALDAGYTIVDKKSGTSRHEIAFGELVPYAIKILQTSKIARNAIRQTYSDIFLDEFQDCTNLQYNLVKFAFQGTKIRLTAVGDTKQKIMAWAGALDGIFQSFIKDFNAVPLNMYRNFRSKPTLLRVQNEIIRKLDPDSVMPDDQLEGEEGEVFAWEFKDSQTEAIYLADLINEWINKEQLPPAEIAVLVSKQPDLYADHLFRELEQRGIPYRNEQQMQDITVEPVARLIVDYLSCLYGQREPKAWIRLMNQLVPFADEEIQASMRKGLDQLIRKHRKEISGAKRTDTPFSEWWKFGRALLKHLGLQTLVALSPDYESHERLKQVISDARARIKYLLEIESDLPLALKRFADDQAVRILTIHKSKGLEFDSVVIMAVENETFFGKEEDNRCAFFVGVSRAKRRLILTHTNKRDEPANAMHWKVFRTARLEYFDYVLPFVR

SEQ ID NO: 64504 - protein, 623 aa, Acinetobacter baumannii EGD-HP18
MKIDKVILKGFRNYKDATINFNNNTLIIGENDVGKTNLIYALRLMLDRSLSELDIEPSELDFHVQGGVQSENLEIIIKFFDIKEEAALSILKEHVSDDGECVFKYMASKENLDYKLYLGQNETDLSEIQSRYYLKYINLKYISSQRDLSKFIAKEKKQLLRISKTKITEEQEKLDRENVLEISKQLVDLDDKVAQLEYVKTATQEVNLELKKLAYAHDDYDVKLNASGIEVDDFINKLQLGAMSGGSNVMLGGDGRNNQILIALWKALSEFEHDSNDEVVFYVVEEPEAHLHPHQQRKLASYLSSELQSQCLITTHSPQIASSFSPSSIIRLFKKDFSTIAASNGCTKELEKAWEELGYRMSIIPAEAFFSSGVFLVEGPSEEILYKELLLKNKVDIDYYNLSVFAVGGIQFKVFAAVLRALEIPFSLRTDNDISTVEMNCKVHGFNKNDSLNPCYVYKKIEINYTDEKCIKWQYLGVNRCYGILNRDSEKWKHSLYPLNRVNILGDKRWKAFEKMINAHGIFMSNIDLECDLVSVASEEIKKALGKKNNNSAVDFLKKSKALNMQILMAKLEKKGFEKIYESDFGKPIRYLINLLLKQSDTDTESPVLINTNSETAKEVVLL

SEQ ID NO: 64505 - protein, 539 aa, Acinetobacter baumannii EGD-HP18; identical to SEQ ID NO: 64089

SEQ ID NO: 64506 - protein, 638 aa, Listeria monocytogenes serotype 4bV str. LS542
MYLSSLRLKNFRSFDSESHEIKFNKGLTVLVGENDSGKSAILDAIRIVLGTTDFSWYRVNDSDFHNEDCSLEIEIICKFSDLSPLETSAFLEYLTYEEGKNPSLYLHWKCRYMQSFKPPRPVSSMVTGKNGDGPALSPESREILRVTYLRALRDAYSDMQSGRNSRLSQVVQNIPDILKGESDLKEGVKLEELSLIGIFNLSNNLLADYPALKKIKEQMTDILKNQMLLDSDNLATRFRVTGSATADTRKLTSLLEKLDLTIDKDTTSLKGIPGLGTSNIMSMACELLLRRNSQEACQLLLIEEPEAHIHAQRQMKLVKSLQADSEANSQQIILTTHSPQLASAVKLENIILIKNGKAYPLSKSETSLGPDDYIFLERYLDSTKANLFFARNVIVVEGPGEALLLPTLSRLLNRDFVDFGVSLVDVRSTGLRRYSKIFQRKNKDDPKHSGDWLNVNVACVTDRDIMPNCAPRICLNNDYRDDNTNWPEKNDRKWRAESDFNDTEKDTYLNDIESKASGQNVKTFVSNKWTLEYDLAYYGLESLDMKKALINALVKTTYAQVNWKSKTTEILMALDSRASKEEKASYFHSFFTIRKASKAEFSQQLASELEANFFRKEEELKALLPPYIVDSILYVTKY

SEQ ID NO: 64507 - protein, 635 aa, Listeria monocytogenes serotype 4bV str. LS542
MDGITEITITDKDIDWVEEILDGDIKFDLPRRNIIKNLESIDIQAFPGSGKTTILVAKLAILAKKWTSATSGICVLSHTNVAREEIEKRLGNTEIGAQLLRYPHFIGTVHSFFNSYIGLPWIRSTGNPVEIVDTDFVCTNRWKSLPASFHKSLLSRRKTHMDLCFKNELGKIDLGNLSESTSTYKIAKKIIEKSQEKGYFTFGETLLFAKEAISNNPQIVDYVQKRFPLLFVDEAQDTNSFQWDLINSTFPNSIQQGFGDENQAIYNYVGENVTDRFPRENPLILPESKRFNKSISKITNPLAISNAEMIGASTTFECNNTIFLFNTDKVGTVLEEYSKLVLSTFTDEELEKYQSEGCHAIGMVHKKKEETTPEQFPKGVFDYWNNYNHRSSSINTMPEYLVEYFILGRNELDLTGEAHLQIEWVLKGLRILINKSTDTIVIENINSLFNSFLSKLDDEKQNIFREKILLIMNKTSFPEAEWVEIQIVVSSILSLFDVEFGMSDFLDWRNNTNITLSENSDEMGPENVFRYIDESNRSVDITLGSIHSVKGQTHLSTLVLETFSYNHNIASILPFISGVPSKKKLGTRDKNRLKCHYVAMTRARGLLCLAIPKDKVDKDTITNLELLGWNIRVIE

SEQ ID NO: 64508 - protein, 625 aa, Actinobaculum sp. oral taxon 183 str. F0552
MRIQILDIKNFRGIASGHVIFKKHSLLVGGNNIGKSTVCEALELVLGPERLYHRPVIDEHDFYRGRYQKDDGSFLKIVIRVVLTSLNLKQQLRFHQHLRLWNEDELTFVDEEVDGISHADDPNVDWALPVVFIGRYDPEEDDFVGDTFFDHPLDDPDSLSDEEKASLGQGRSIFTRAHKRDCGFIYLRALRTGSRALSLQRGSLLDTILRLGEQGGANMWPAALRSLKELNPAIGEIRQLKSIRAQLQERLGRFINLASEGDQTSFYASDLTRDNLREVVKLFIATWPSNYPVPFSRQGTGSVNLLVFALLTMIADLKEQNSAIFVMEEPEIALPPHIQRRVVKYVLQEMGQSIVTSHSPYIIEQYEAENVVVLGRDDKSCFTGKPIDRSAIEQKNYRAQRRQFAEAILSRAVFVVEGATEVAAVNATSIALERFHAGYSHIDLSGVSLFNAGGDQEAPKYGPIFKALGKPVFGMRDKPNRQDQPGTRDNIDAYDKFWESPESGVERILVDQVPESVLHGFFKKVSPRPDYPANCGYNASMEGKELKALAQKVLKARKGDSYGYGYAAILIEQCQSENELPSFIRYALLYIDRYLTPSTQSNPIRSEGETTMSSETASDGQPDNE

SEQ ID NO: 64509 - protein, 585 aa, Actinobaculum sp. oral taxon 183 str. F0552
MGNLTMNDGGPAGMKLSDTAENALQSECPVLVLGGPGSGKTTLSLLKAKSYVSELAPEQAILFLSFSRAAVRQVEIRCRDLLNAEEQRSIEVRTYHSFALDILKTHGRLLTGTPPRILYPSEETLLKSCHSGLWEKEAKRLAAEEGRYVFGEFASAANKLLVGSKAVAKLIADKYPVVILDEFQDTNDSQWELVKTLSLLSRMVFLADPDQRIFDYDKHVSAERLHHLRNDLRPAEFDLGGNNHRSPNSGILAYANAVLHNKAFPGSIGEIETITYYPNSFDKSVHFAVVSTLSKLRKEGLERPSVAVLARTNAMVAKTSDCLSQDHEFRSRPMKPIVHDVLWDTGLTTAAALVVASILEWTALPKVTALAQTFELIAEYFDIKNASNSKGVKYAQEASKKYSNTAKSLKAGDKLRCEVTKHFEKVYDSESLFIGRPADDWLKARVLLDTTTGKLNHVFGDVKFVRLFRATDQIGGCLSDLWDRHGNYINASRLLRRPLSMQSLQSDYREPVGCSLMTVHKAKGKEFDGVVIVDGHPKSADAFFREKASPSERESARRLLRVAITRARRHVFLVRPYGALPLADE

SEQ ID NO: 64510 - protein, 598 aa, Atopobium sp. oral taxon 810 str. F0209
MPHKGHLTFGDQMHISELDIHNYRNLDGISIKFNDELTYIVGENNVGKSNVLDFLDTLFNRTTFNENDFTQQGTPITASVKLSLSEEEIGFFGILGDPVDPNSIKINMSSDAPDDDIVFTFDTNGDGISLRDIRRANYFHISSVDFDNRTLAFDSMRGVGRVLSRSVELYREQSGKEIIDLFDQTEVKALLAHLNGKIANLPLLSAYRLQAAIDTANGDAMASVVSLADQNNIGIKSTGNGVQYVTLMILSILQCLMSLSKARRENSTVTLKKERDKNKEPRSAIRAIISIDEPEIHLHPYMQRRLIKALSVIAAGEDEGFNAIVKDLLDIDVFQAQLIVVTHSPEILEKGSYKNIVRLGITQGKLAAVSGKDLTLEDKVLKQLQSQFSVVREAFFARAVIVVEGQTDEVALPIFANAMNKDLDGYGVLIIRAEGKGSVPGIQELLASFCIPNISIRDRDKTNNTSTGTSFYTVKHDFEEEWIESIFHAGDQHLFVKLIETVDPNGRGAEITSKQIEKAAGKLEVSIGSFPQNGRHDFKDTEFDGSFSRTMKTLIMMYAWLQSRKGALMPQTLAHLTPESEIPQVYRDAIIEAVRLAQ

SEQ ID NO: 64511 - protein, 601 aa, Atopobium sp. oral taxon 810 str. F0209
MNANVEDRLSRLKSEIKKSHEGDESQTAIVFSEAPRVFVTAPAGYGKTKTMTSKIVYQLVSGMIPNPKAILALTFSVAAARKMRNEVDSAIKSYKLSTRSVISNRIFITNYHGLARKLLSLYGNLVGFDKELVNTARMCDEKDLSASLLGAGYQLDPMKSEYLKTFALLVKEHDVEHMESSIGPYNTILRDVALDANYMTYSGLITFAIELLDKYPAITHITHSYYQCVMIDEAQDTNILCYAFLRRLVGPNTHCCFFGDPLQRVYGFMGALPDFKSQATDNFNLRHEDLSINHRFEPGSNLQRIDKVIRSAIGSAGTSLPQETAELPIIVANSFEEEYEGVCAKATHMLEDDPDSTVAVLVNRRGDLAKYIENNLAESEVSYFNGLFLDDSSEYASMCDACLRALNLCIESGRPLTTPEAKDVLKKISNRVAASSSEYASAYSMLVDALAKQVVADCRGMDPAERYEYIVDVFATRSLRRYSEYINAKLTLSTVHSAKGLEWDHVIVAGVNREDFPFFTICKSCQSGGSYDAPCQPPSPPYGTDFLSELNIWYVALTRARKSLTVITSYQTFISKRNWLKQTNPSCLLFLPRLSPVTANG

SEQ ID NO: 64512 - protein, 558 aa, Clostridium symbiosum ATCC 14940
MKFENVKIKNFRNFEDVNIDLSNKNIFFGLNDVGKTNFLYALRYIFDKDVRRLNLMDSDFHNKRLDKTIEIMVTLDITDVSCTDCQKLRAQLKGALLSEHKKVFIKLEAKYDMQEMLALPILYWGGDVEHLHEMKQRGYLYELDYVFNVIYIDSYVDLHSLFKKNVSLLIKNESEKDQEILDDIQGTVDQLNIHISSLSGIKEFEKKIAPEYQKFRNEGITVSVKSEIAVKGLYSNIIPYIKQNDDDNLYPTAGEGRKKLLAYSIFDLLSDESAEKKINLFLVEEPENHLHKSMQIALSQILFTDSKYTYLFVSTHSPFVLYEMDNVNLIRIYSERKITSASTFYKVPDNFEKNRKMLNRSLAEAIFADRVLLVEGPSEEMLFEKVLSVINPFYEADGIYVLSVKGIGFEAYFTLLDKLNILNVVKTDNDLRSVPSSKNYSVLGFSRCNNFIGEKVLPTARISENTIDAKRDLYNKNIESLDKIRDKYHIYLSKVDLENDLDEAIHDKLVKYLGASPVDYLQDSKHYHMVELIEKLSDTDCRTIYEHYNFACLKEVSE

SEQ ID NO: 64513 - protein, 500 aa, Clostridium symbiosum ATCC 14940
MKLSPIQEEIINIPGNLIVRASAGTGKTHTMVNKIIKEIEDNHTHKVVAAITFTIKAAQEIKDRLSVDITNHFIGTNNSFAIEEIIKPFMKDVYGAEFDLDMSTDYSSKVDTYQAGIDKIRLEGVLCSYQDTKKNFIFDLAQEIVEESLACKLYLQAKYFKIYIDEYQDCDQSMHKFFMYLCDELFINTFIVGDEKQSIYIWRGAYPKAFKDIWEKANFEKRFMGDNFRSCKQIQNYSNLLCEETCKLYSPTENLENIVWLTPTSTDWAAKVISQIDSGKKSALLRYTNENAKLGAEALSIAGIEYKYIPQIPIADITTDTAWLYSAVAKYLILEKYSAYDVISEIPVEGNESKKTISTIKKLLSNIEFSQDDEGSFNIAVEKLAEYLGYQTREEHLSKLYRTVSDKSFHVAFEADKYQHVAITFHSSKGLEFEQVIVFAEDYRLSDMPSVYNHYVSVTRAKNKLIIVKQNNYNANCFQANLSKLFLKSGLNISDIVLLK

SEQ ID NO: 64514 - protein, 636 aa, Lactobacillus crispatus 2029
MRLKTLLIKGFKSFNEETKIDFSKETAFIGTNGSGKTACLLALNKLFSYNASDRIIHESDFYINSANQDSQSRDLYIEAVFELDKANKDEDKKCEAQYWNRLIIKNGQDKPLLRIRLESTWTNSGIADGTADTNIYFMTSLEDNNEENKIVARRSELSSIQFIYVPAVRNPERQLSNTSDGMISQLIKRVNWDDEIKQKIVSISSQLNDTFWDEKGSKLIQDTLNQEWKSLEPNSRFSNVKASVSSIDINKIMSRIRFEFNSNVTNNVFSVDEMSDGIKSLFYISNIASVLAIENTVQEDDIKIEYPVVTIFALEEPENHISPHLLGKVMDKVKSITKLDNTQTIITSHSPAIIKRVLPENVRYFHLTKDAVTEVKKIKLPDDKGEKYKFIKRAVQTYPELYFSKLVILGEGESEEIVLSKIISSYTGLDEANISIVPLAGRMVNYLWDLLESLNIAHITLLDLDYGRYLGGKKRIKDIIDELKRFNPNDDELEKIENKCADLAENKNNLLDLTKQLEKYDVFFSFPLDLDFMMLAAFLDKYKGIASGSPKTKADERKKILDRTLKGKREEEVDYDKNDIELMRWYNMLFLGIGKPLVHFTALEDISEEELCNNLPEQLKRLLESVKNKLDKKNDE

SEQ ID NO: 64515 - protein, 619 aa, Lactobacillus crispatus 2029
MNKDQWKPSNGIVLESNAKQAIFTNDNILVQAGPGAGKTELLAQKASYLFQTGLCPAPFNILAISFKRDAAENIKDRVSKRVGKEEGSRFISKTFDAFAKLIVDRFYLVLPKDLRPRPQYEISSNSTQTKIYEHAFGYVPDRNAVNDLLKVDLNDINPQSNNYKFWKYMLMGEEKTYLTFEMISRLALYIIQHNKYVRHIIRSAFPFVFLDEFQDTTVLQYDIFRECFLNSESKITAVGDNKQQIMLWAGADKEIFGKYTREFRATKVFLKENHRSALNIVKLQKLMYEKIDKDINPDIIINKNKDEGKVFLIETNEPSKEAEIVGENIIKEIRMGVKPSEIAILVKQRPEDYIRNIKEYLKTKNVTVRVESKYTETFSEPIVKLILKMILASINVINGQEWQELVDETSEIFLINLADAEIEQKYIKKLNVFLDKLFKNLLVQVHENRSKSNYYCKIVESIIDFFTINRLQVYYPEYLEIDQLNRTKTQFIEQLKECGSINELNTDIKEIWKEIIDNYLGKNSIATLTIHKSKGLEYNSVYFIGLEDSAFWSFSNQSESDRKAFFVAISRAKEKLYFTFCRGRQTVRNIYQTKKNIKEFYELFDKSGIVKEINDNNNS

SEQ ID NO: 64516 - protein, 500 aa, Pseudomonas alcaligenes NBRC 14159
ANDEPVSKQAVPKRHRDTIHLHYLPAKRDPSDHVAYGATALLGRLLRAANWTEDRETVKDLTEQITDCLVENESVKTLSDSLTTAWQRLHKGDFFASPRLTFENSEIEALLRHLTVSFSPGHGENQVDFARLSDGQKSMLYLSLVLSALTIGRDVRSGENKAFDPHKLKPPAFTILAVEEPENSLSPHYLGRIVNSLKSSVDVDAQALIATQAPSMLRRVEPENIRYLRLNGDRRTQVTTIQLPQKHTDAYKFVREAVQAFPEIYFARLVVLGEGDSEEIVLPRILQAKGAPVDEFAVAIAPLGGRHVNHFWRLLSAIGTPYITLLDLDVGRHQGGWGRVKYVRDQLAQYAPENNLPAGWPYHEWNDPNTPVRTHNWFESGTVSLFNELEKRSVFFSDPLDLDFAMLCAFPQAYEAEAIAATPKSHTKVLGDSHFNPDQYDEDEQSLFEAYHKLFKLSSKPAAHLGALGRLTDQELLDGLPESLDRLADKVIERLDESPE

SEQ ID NO: 64517 - protein, 555 aa, Pseudomonas alcaligenes NBRC 14159
MIKPERWVPSPGIRLERNAWEAIREREESVVLTAGPGAGKTEVLAQRADFLLRTNSCRYPKRILAVSFKTDASRNLKQRVQLRCGWDYSSRFDSVTFHGFAKRIIDRFHPILVDEALSQDYEIGPQYIRGKQITFNHLLPLALRIVKESVIARNAIRQSYSHVFLDEFQDCTADQYELIKLLFHGTPAILTAVGDTKQTIMGWAGALEGIFKTYADDFGARPLRLFLNFRSQPALLRMQNDVIREIEADAVMPEDLAKGDGGEILAGRFPNAAEEAQAVANLIQRWISQEGIPPSQIAVLMPRQIEEYGEFLMFRLTELGIAHRNDHNLQDLLKEPAVSLVVDYLTCLYGQEQAEAWSRLMDHFTPFEDDDSRSSAQRIFEETYREHLKKVKQERKTANPYASWWDMANEFLKKLGFSSVSALSADYRSKARLLEIVREVRERIRGLLATEPDLLRALARLSDDSAVRFLTMHKSKGLEFHSVVVLGVEQQTFWGQLDQERCVFFVGISRAKNRLVLTTADYRPWPKNARRWDEHRAPHAEFVSHVVRHLTKQHF

SEQ ID NO: 64518 - protein, 681 aa, Prevotella sp. F0091
MYIKEINILNFRSFKEALIPFHEGVNVIIGHNNTGKSNLLRAMGLVLGYSNGHRIGTSDLFYETDVAELQRQSPRIKITLVLRRSADENLYSADMALFANMMTDPALSEEAELRYEFKLDDSQEQNYKADVANAITAKEIWKIIEQDYIRLYKSSRSGGNQAAGININETLGQIDFQFLDAIRDVSHDLYAGYNPLLRDVLNFFIDYSVKNDVTKTEDEIKEQLKALRDDFVQQSRPLMQTLQNRLQDGKNVFLKYALDTGATFNGAEPDFDGTVTENEMFSVLRMFIRYAVGIEVPATYNGLGYNNLIYMSLLLAKMQADGNIAYMKRNAKVLSFLAVEECEAHLHPAMQYKFLKFLQDNNWNGHVRQIFMTSHSTQIASAVKLDDLICLTSPALGQINVGYPRAIYKEESSNDMVSKQYVQRFLDATKADMFFANRLIFVEGIAEELLLPVFARYLNKNLTDEHVLVVNMGGRYFNHFLKLFDTKNPYTINKKIVCLTDIDPCRKKKGDDRNYEVCYPYEYNIDTDNYDYKHHADTEVDQYVVHPNIRFYRQDVTYGKTLEYDLMRENPNCELLLTDSVSNRDEIKAMMTELDVNKMMDKMRNSEANTRIKSSIDQSGWEDEEKRKALLASRYLNSVSKGSNALELNVTLMDNLEKPEAERKEFHVPQYIIDALKWLLS

SEQ ID NO: 64519 - protein, 558 aa, Prevotella sp. F0091
MATIIKSEQTIPIDEPFKVTAGPGAGKTHWLINHIKNVVSNSHKLDVVRKVACITYTNVGIDTITSRLNMGNDVVEVCTIHSFLYANIVKPYIHLVAKEFGLELSKLVVIDDSNFKSEGIAISVLKLINKSWVNVRSYLQGLNNATWHYSNLAYNDYKPRFPIKFGKWFVGNDCYMGFKRWLWSRGYMSFDDILYFSQILLSRYPNIYTLIKARYPYIFVDEFQDTIPFVIDLLAKLGNEGVIVGVVGDKAQSIYDFLGATVQQFDSFTVPEMQEYEIRGNRRSTKQIIDLLNIVRTDFSQDWLNGSEGMMPELLVGDMLNCYQQCIEKSGTDEIQSLAFQNILANSMRKKNGVREVENILEMDFDSNAERQMVIKALIKAVEYTRMNDLRNAWHQLDIIDRDRIQTIVLLRYLLDGYKDYKDGSLMDFYNFLVNDLHVEITKIKGTAIRDFYQNHTYADAALGVKYCDSNNKHKTIHKSKGEEYDNVFVVLKEEKDLEFLLSPNLNDNNSHRVYYVAASRAINRLFICVPTLSAEKRIQLEGMPINILPPQKKIIAN

SEQ ID NO: 64520 - protein, 657 aa, Desulfovibrio gigas DSM 1382 = ATCC 19364
MKLEKIRICNFRCFGPKPKAIHFEDGVTAFVGGNGSGKTACFLALSRLFGVTQAQRTVQRRDFHIGKNCTELESDATLSIEAIFGFPELEEGNPDERADAVPEYFQQMVASAPGEPLKLRMQLRATWIDDGTYDGNVDTDVRWITTLSDEYKWEDCPRVQAFDRGAIQLIYVPATRDASSQVANLLKGRLWQAARWSEKFRKQSSWYAEKIQWLFEKEKPLRFIIHHLTERWRQLHEADTDTTPGLRLVDSKLEELVRKVEFIFMPDEEGRERKMADLSDGQRSLFHIALTAAALEAEKEACSQLADECAFEHDKLHRTQLTLLAIEEPENNLSPFFLSRIVAQSREIGSMPNAQVMLSSHSPAIMSRIEPEEVRYFRLNRHKRQAVVRKLSLPKDNQEASKYVRLAVKAYPELYFARFVVLGEGDSERLVIPKIAEAMGVPLDPSFVPIVPLGGRFVDHFWKLLSKLGIPYATLLDLDLGRQHGGAKTVQRIVAALQENGVDLSKNDHVLFGSADPDALGTLHDQELLDNGHDWIKALAEENVFFSHPLDLDFAMLSAFPEAYRVPNPGGGGPRMGEKAVANKIKMSLKENGNPDLYDDSYDEKFSWYPYLFLSRSKPETHIAALTRISPKELARNAPQELKRLIATIRQALSLPE

SEQ ID NO: 64521 - protein, 615 aa, Desulfovibrio gigas DSM 1382 = ATCC 19364
MSLVYPADWRPQGVEDLEPGAWEALRETSRCVLVTAGAGAGKTEFLAQKAAYLLQTGICPSPKRILAISFKRDAARNLTMRLEKRCTPEQARRFHSFTFDAFAKGLLDRFRAAIPGEFQPPSDYRIVMPGQKDYQEAIKEHNIPYVNAQQLESLVITTDLPLEGDDLNVRAVRSYWQSQYQREVLLSFPMIKRLVLLLLKENVFIRRALQITYPVIFLDEFQDITGPQYELLRAAFHGASPNMTAVGDDKQRIMGWAGAMPDAFQRFSTDHDACRIQLLCNWRSHKELVRIQHVIARQIDQNVVTPVARAKRTVGGEIAAIWQFDTEAQEAEMLASWLAREVENNVVEPHKTAVLVRMRAKEIEAKLSLAFIQKGLRLRNLARDIGGISIQDVLSEELTQILLPILRLGSTTRSPENWEATVRNLQFLEAIGSEDDKALQKLHRRLDAMVRTLRATMQNCQPTDVIAEAVALTVLGSIRPESIRNAFPQYNRQQDFDRVWGGIITLLKECASVGTDWPTLLDEFEGLGQVVLMTIHKSKGLEFHTMIFYGLDNQTWWSLRQNRKEELSSFFVAFTRARQRAFFTFCSGRGQPVDWIERLLQPVGLLRIRGQELIP

SEQ ID NO: 64522 - protein, 566 aa, Escherichia coli LY180; identical to SEQ ID NO: 62788

SEQ ID NO: 64523 - protein, 541 aa, Escherichia coli LY180; identical to SEQ ID NO: 62789

SEQ ID NO: 64524 - protein, 704 aa, Pseudomonas aeruginosa PAO581; identical to SEQ ID NO: 63366

SEQ ID NO: 64525 - protein, 142 aa, Pseudomonas aeruginosa PAO581; identical to SEQ ID NO: 63365

SEQ ID NO: 64526 - protein, 531 aa, Olsenella profusa F0195
MKITSIRINNHSRIPNCTIDVRDNLILVGANGSGKSSIIRCIDLALGKTTQQLYYSIDNSDFEDEEQPFAVEVRLEGLSEDELSFFPDDYDALDNSLTVRMEATLDKDDLTIRRYFPKGAGDNNLRREQLESIGWSMIPSDFSTTQLEPGRKTIVDDYLKEVDASGDESKLAEAIKSLSDAIDGSDAFNEALGSLADQLDPVLDGGITANKLHFVPEAAINGDLLNNVRLQIEGRSGTARQATEQSDGTKALIAFSIFGLLNSGGMIAIDEPETHLHPLAQRNLIRILKSTGRQLVIATHSGVVAGEFEPDNIAVTREGFSPVQPKRGFLAGQEDQKTLARWWISSRIELLTAKQIIAVEGQSDRMLLEKVAGNTGRHLERDGIEILEAGGCREMPHVLEIFGEDGFGLQISILVDEDAEEDMANALGANKEDLASKFVYVSRRDLEEEYVAAIGADSLWKALGESSLFTQNMLNTCTILDDSGKPNEDELAEFCRRKKNKILSAVVACKLLDEASAQRVSSVIEVLRNAI

SEQ ID NO: 64527 - protein, 575 aa, Olsenella profusa F0195
MPSNSYGATDEQQEIFDYEPYGMVITAPAGCGKTEALAYRAKGLLERYDFSGNGRRLLIVSFTNQARDNISERLRKYIDTKTLREHVTVCNFHGLAARIIKAHGGVVGIDKTWEVAGFDWVRRNAQTLNCNKETREQVEAALKSAKLTHLSDDEVMRSLQEQAKNGAVGQLAVAMESKRVEARVVTYDDQIRTALWVLQDDKVARLYQNHFFAALVDEFQDLTPQQLRLVKALCGDNITFAGDLAQSIFSFAGADPDYTYQEISNSTNKQIKLLKSFRSAPAVLNAVNSLSQMTHSEQLVAAFPNHWGNSGLSAFASFDNERTEASWIVKMAQRILQLCPNQRVGVITRVGFRIKGVKDTLAANGIQYTDWSSGIFRPEIARALRHTCDDLLSRATEGISFKSKLDIYRYIVERTTLLQSGTHAELEDACSWLFDQVLERDANLSRASEIRESICEMRGDESFATRKGIHCLTGHTGKGQQFDWVFIVGLDKGSIPFYKASTDQEIGEEARVLSVMISRARIGFVTTSTEINAYGYSREPSSFLSLLQSAPGFICGSDCIVDWCAKADWQGISKI

SEQ ID NO: 64528 - protein, 581 aa, Enterococcus faecalis E12; identical to SEQ ID NO: 64144

SEQ ID NO: 64529 - protein, 515 aa, Enterococcus faecalis E12
MEIVDEQVRKDILAASGNIIVSASAGSGKTTIMVNKILKKMSEISDHKTVAAITFTVKATEEIKRKSKQIGGNNKFVVMTNDSFVEYEIIRPFLIDAFGEMYNNDFVISYEDSVKSGSFDKGLNILEKSNKLGTYHNIKRNFKFELAKKVLEQSTAAQEYFKSKYTMIFLDEYQDSDTDMHNLFMYIKNVLLIDLFIVGDGKQAIYLWRGAQRNIFNQLENEGMQRFELVTNFRSHFEIVNYANLMHNASQFRDDYSKEVTHVVHCRTNDYVSSINELCESNIVDKNKNITIIANINNDAKDISDNLNAQGFNFVFIPKTPLDDGSENANVLKVIACYLLDDNYSVFDIAEVLRVEQNRTLLNKIDSLLKPLKKLVPLSSNQTKDDISISFFESITKFNNYLGMNITNDEKVLLLDSVTNKYFYPAFIKSNDLHKVMTVFGSKGLEFNQVISFANYYSFNDESKKNNHYVCVTRAEEKFVMMEGEFGKYSEQIGRKLIERGIDSESTTFKLIDHI

SEQ ID NO: 64530 - protein, 561 aa, Acidaminococcus sp. BV3L6
MKFSEISIKNFRNFENITIKLDNKNVFFGMNDVGKTNFLYALRYVFDRDVRKQEFIETDFYKKNTDVPIEIIVQIDISDITDPDSEKIRAKVKGALLSDQDIVYIKLFAEYNAAEMQGTPLLYWGGNLDDLQEIPLKGYTSEIDNVFNVVYIDAYVNLYNLFRKNTAILLKNDDIDDETSVKDIEKLVNKLNDKISSLSGIKNFEKLVNPKYNNFRNDEIEISVKSELAVNGIYSNVVPYIKEKGSEDLYPTSGEGRKKLLVYSIYDILAKQKEEKKINLFLIEEPENHLHRSMQMALSHRIFVESKYKYVFLTTHSSYVLMDMDNVNLVRVYNETKINSASSFYTVPQEFKTLKKQLNKGLIEAIFADRVLLVEGPSEEILFDKVLSTLKPFYQVNGIFILVTNGIDFKPYISVLAKLNIPYFIKTDNDLRTTGQDSSYSPIGFFRLNHILEQDLLPTDAVDGNEIEVKRRLYDLNKKVLDEIRTEKHIYLSKVSLEEDLDEVLHDKLIVYLPNANGDVISYLKKHKKYNMIELVNKLSPEDCNKIFKHYNFACLEEICK

SEQ ID NO: 64531 - protein, 337 aa, Acidaminococcus sp. BV3L6
MRCINFFMYLCKQLDIHLFVVGDEKQSIYIWRGAYPQAFRSILDMPNFSKNKLRENYRSCRQIQNYSNLLNEDTQSLYSPELDNSAIILLKTTSKKWANQVYSLLNNEKSCALLRFKNDDAKTGAKELEQAGTHFTYVPKTPISEITTDVAWLYNAIAQYFILKKYSVYDLMNEIPEESIGDRLVTNYLTRMLKSIEYALKNENDEDVIREVIEIAKHFGYTTTSEKHIRDMIKTIREEEYHAAFYMDKLQNISITFHSSKGLEFDQVIIFAGDYGLEKEDDIYNHYVAVTRAKSKLIIVNITDYNAWRSDRFRNNLTAIFQRSGVLPQDLMTVIEM

SEQ ID NO: 64532 - protein, 662 aa, Coriobacteriaceae bacterium BV3Ac1
MQLSKIKIKNYRLLIDAELEVDSKTTLIVGRNNTAKTSCFSCIGKVLDGEAVSFDDYPLLRREDFYTKIALFMKKKLTYEDLCKQIEAISIEFLVDYSLDDPDDNLGALSPFIIDVNVDTTTTLIRAEYRLKTNEKSLWSLLESSYYKDGTYSPSEEAHKVLADNFGKLFGLTAYAINPNNPEDKQVKSQKELYDLFPFHAIPAERVLGEDDTHNSSLGSLISGFFDTSEAELDPNVAAEIKRLRSIVEKANKDVQKQSDAILSSVVNNSIGFGYPNIEELKLGVTTQLSIDDQIKNQTRLSYISGTANESLPSSHNGLGYKNLIKMEFLLAAFAKDIEKRGVACIPLLFIEEPESHMHPQMQTAFAAYLEKFLGKLSTVQIQTFLTSHSAHIANTMEFAKVRYAQKSNAGVIYKNLSTFAQANPDNVDFIRKYLTLTKCDLFFADKAIFVEGASERLLLPDMIEKCETSGEFGSCKYPLSTQYYALIEIGGAYAYKFIPFIEFLGVPCLILTDLDSVADRKGRGGKIIKKSVVVSEGETTSNETIKWWVRKNKGLPDNDASKINLSEIISMTADDKTRGKCHIEFQTTEKELCGHSLEEAIRNVNRKHYNLGNRTSEKKLEFTGKSKTDFALDLIYKYSDYCVPDYIKSGLKWLNDQRVLE

SEQ ID NO: 64533 - protein, 580 aa, Coriobacteriaceae bacterium BV3Ac1
MGGEYIGENYDLAKAEADKVDAQIIEILKSGHSFRVEAGAGSGKTYSLNRAIEWIQEHKWSDYSRKKQNVVCITYTNAAVDVIAERLAKDSFIIPSTIHSFAWNAIKQYQSVLIDAVTTNPDYLPDEGDFNQVTEVAYTLGHRYKENGIQYLYHDDVLKLFCLLLDNAKFRRVFADKYPLILIDEYQDSYKPIIDRFIEFFIVKGVGPQFGFFGDAWQTIYQSNKACGEIEHEKIEVIKKGSNFRSAPKIVQLLNDIRPELPQKSAIDGFDGEVLVITCDDYSGVRRTERNFKNELPAVELRTRLNTIRAKIEQNTPADEDLKVLMITHKVLASQQGYEQLLDILDDGLRNKEDPFLIFFADTIEPIYHALDTSNTQLLFDTLGIKRYPITKKSEKTKWKMLYDQLTEARTQKAVDVLEAIIHSQLIPIPPKVDGWYRLYKDAPETMYASEATIQQFLQLDYAQFIAVRDFLYPDAQFSTEHGVKGEEYDNVVFVISKGWNQYQFETYAPMITGHASIPKGKEASYERNRNLFYVCCSRPKKRLFFFVTVPIDSTFRTFLITLVGEENILTYRQFMEMSN

SEQ ID NO: 64534 - protein, 704 aa, Pseudomonas aeruginosa c7447m
  MOD_RES (178)..(185): Any amino acid
  MOD_RES (495)..(498): Any amino acid
  MOD_RES (572)..(573): Any amino acid
MRIKFVEISNFRKLKSTHLDLDKNTTILVGANNSGKTSAMLALRIFLLSPTRLNLRDVTIANWTKIDLLGSEWEAGAEPTVDLDSLLPSLDVWLDVPLREIQHVVDILPTLDWSGGLLGVRLAFRIKNLDKLKSEYIAQRTAARDAAIVGPNGESIKIAVWPRNLTDFLERRLRAHLXXXXXXXXPAAVVPPGRSGLATPQRLPASALAFEHPPFKKLIKIDEIAAQRDFADASSSDGGEDKGEANNRRFKRRLSDQLRSYYDRHLDPTKTPSDKDYEALGAIQAAERSFDARLEEGFSAAFQELEDLGYPGMSNPKLKISTLLRGTDGLKHGSSVQYQVADPSGDGSNTLQLPEDYSGLGYQNLIAMVFMLMGFRDEWMRVEKAGILEGADVSHEIQPLHLVLVEEPEAHLHAQVQQVFINKAYTLLRKHADLGVAENYCTQLIVSTHSSHVAHEADFANLRYFRRRPAASMGETPTTTVANLSYIFGDGYETXXXXKRYLKATHCDLFFADGVIFVEGQAERILVPHFIRHHFPELSRRYVTLLELGGSHVHSFRNLVDALGIATLIIGXXDATTAVKIIDKNMRETTRWKSARPEQGKAQQTANSVLKDWHPGKKLIDELVALPPDGHISTAGGDYELYVAYQKPVNVKGASEDSDLIIPRTFEDALILENLAVAGKIEGSITSAKVRGIVAQDLSGDEGR

SEQ ID NO: 64535 - protein, 142 aa, Pseudomonas aeruginosa c7447m; identical to SEQ ID NO: 63365

SEQ ID NO: 64536 - protein, 677 aa, Leifsonia aquatica ATCC 14665
MRVSRIKVRNFRLLRKIDIDLDVQTTVLVGRNNSGKTTLAEAFTRFLQSSTLSFTAADFSAESYQDFRDAWIAFDEGRKEDARALLPEVSLTVEISYSEELSDYGPLAAAIVDLDPDCTDATIRFAYSLEGGRLDDFFEGVERDPQTGEAPDVEAVLSVVRERLPRLFERSIIAIDPNDESNTREVTLAAARSLLTVHFLRAQRGLDDEKDHPKDLIGKVFQNLFDAASNAEDGSPQKSTAVALTEAISDVELQLGDQVSKMMVDIIPALKSFGYPGLHDPGIEAATTLDVERLLADHTSIRYQGVAGVSLPESYSGLGSRNLILMLLTLLSHYRDYASRGNMPGLHLVFIEEPEAHLHPQMQEVFIEQLSSIAGLFPTLDARIYPWWPQFAVSTHSSHVANRADFSSIRYFRVEDAEDGSQRRRAVVLDLSEAEGLDTDFLHQYLTLTRSDLFFADKAILVEGTSERLIVPAAIRNSQHKLSSQYVALMEVGGAYAHIFFPLLDFLRLPALVITDIDSVGPVEGKERYAATSVHEGVSTSNATIKAWFPGREAQELAALLAAAETGAIIKGNRYLAFQVPELGAEACGRTFEDAFVLANPSAEGLTLTGDANSDEMLAIEAVQDAKKSDFALRFAVKETGWQTPRYIQRGLDWLLQHGRENAFGSDGSNENGVVVR

SEQ ID NO: 64537 - protein, 108 aa, Leifsonia aquatica ATCC 14665
MKGAEFDDVIVLIGRGWASYDFARMISGYARESEREPKELRSFERSRNLFYVAASRAKHNLALLFVQELDDDALAVLTGWVGPENVVSIEFADEKNPKTEVSATPTFS

SEQ ID NO: 64538 - protein, 580 aa, Leptotrichia sp. oral taxon 225 str. F0581
MKLKKLIIKNFRNFKNIEIELSNKNVIFGMNDTGKTNLLYALRFLLDRDIRKNGFLNTDFYKNDTSKKIEIILEIDISDRNLDDESSFSKNSKFLISKIKGARNSDENLDSFFIKLEANYDDNSLFGNPDMYWGSILENLQNIPRIGETYEIDRIFKMMYVNPNTDDLQKIFKRNRKLLFDDKNDNENDMELEKRIERSISEINENVSQLSTIKNIQNLLTENYKKYKLEELSIELKSEIVVNGFMDNLVPYIKWNDDENYYPTSGDGRKKILSYALNKIITEKNYENQIVIYLIEEPENSLHNSMQMMLSQQLFSQPVYDYFFLTTHSPKILYEMDETQLIRITDNSNSKSFSYLYKVPKEYKILKKKLNKGLSESLFYNEVLLVEGPSEYVLFEAVLAEVNPNYETLGKFLLQVGGINFKPYTELYEKLQIKYFIKTDNDLKKKRKSKENNPNKYDLIGFNRCIDVIKEKKLKSIEFTGNEEELKNKKIEIYEENTELIDKFIENNIYLSKIDLENDLYGIIPEELDKHTGKKDSVKWLQEHKLYNMVEFIESCMNEGLAKKIKENTQVLKEFVDNGR

SEQ ID NO: 64539 - protein, 292 aa, Leptotrichia sp. oral taxon 225 str. F0581
MEDKEINPIDKEERDKIIKTEGNICVLASAGSGKTSILVKKLEFDIEKEKNHYNFVAITFTNKAATELRDKIVKKERVFIGTIDSFLEKEIIDIFIKSIEDNIPEKFYYSYQKKDKFCNYNDGLKKLKEYKIFGTYDNDIQKLGKNFKCELALKLLKKSVRVQEYLKYKYKKIFIDEYQDSDQGMHELFCYFAKELGIKLFIVGDDKQSIYGWRGAKVQNFKNIVENNIEKISFNIFRLHHNFRSHINITLFSQILSEKNIEKIEKTNEKVIFYKKSTGNKKEDIQDIIKRQ

SEQ ID NO: 64540 - protein, 687 aa, Staphylococcus aureus subsp. aureus SA957; identical to SEQ ID NO: 63306

SEQ ID NO: 64541 - protein, 582 aa, Staphylococcus aureus subsp. aureus SA957; identical to SEQ ID NO: 63307

SEQ ID NO: 64542 - protein, 570 aa, Ochrobactrum intermedium 229E
MYLSRITVDNFRNFRCLDVSLAGNVVIVGENRVGKSNLLYGLRLIFDPSLPDSARELSLGDFWDGLEELDEESRILVSVEIREFDDDPDVLAVLTDYRVPGSPDTVALTYEYRARPPGLGRTPTSERDFQFSCFGGRDPTRKFGYDVRSRISMDVLPALRDAEGDLAVWRRSPPLRPLIETAFGAIDRDELQEVADQIATATSSLMEFEPVSKLEEAIATSFRAMSGERQDVEPTLGFSATDASKLHRQIRLLIDSGQRAVSDASLGSANLIFLTLKTMELRNLIAGDKRDHSLLAIEEPEAHLHPPHLQRLVYRSLFEDASRPDEDGEDPPLSIIMTTHSPHIASVAPVKSIVLLREDGGETVGCSTASLDLSTEEADDLQRYLDFTRAEILFARGVILVEGDAERFLVPRFAEELAADLDGLGITICSVAGTNFTPYAKFLEALKIPFSIITDFDPDGDRGGQKRTVALSRLLDGMRTKKYDKEYFDELMETDDWPRFDEGIEEFGGVFTNSDTLEMDLFKGAFTASIIEGLREGNFGKERTARIDAWEKDPHDSQPEAATRYDGGHR

SEQ ID NO: 64543 - protein, 194 aa, Ochrobactrum intermedium 229E
MRCAALVGNPWLRDALLAKFPVLAVDEYQDLGTALHRMVLGLCFRTGIRLLAVGDPDQSIYGFTGARPELLQQLSQREDVETVRLALNYRSGTRIVTVSEYALGEVRGYQAAEGAAEGTVYFHPLDGSYEDHAAWLFSTLLPEVEVRNPGLQRGNIAVLYAAAFMGDAVAEAAADHGWAFVRADANAFILGRTD

SEQ ID NO: 64544 - protein, 687 aa, Peptoclostridium difficile F665; identical to SEQ ID NO: 64408

SEQ ID NO: 64545 - protein, 428 aa, Peptoclostridium difficile F665; identical to SEQ ID NO: 64413

SEQ ID NO: 64546 - protein, 479 aa, Klebsiella pneumoniae 303K
MMIRSALDPAQIMNNQNGAVIHYALGEDDGNPTPPTLPDSYNGLGFKNLIFMVVELLDIHNQWLAIEENRPPVHLIFIEEPEAHLHAQLQQAFIRKIMDLLAMESQELMHYTTQVVVTSHSTHILYERGFRPIRYFRRKRSSNMSATDVLNLSVFYDNTDPEIRDFLERYLKLTHCDLFFADGAVLVEGNVERLLLPQMIATAAPRLKSSYLTVLEIGGAFGYRFQKLIEYLGLTTLIITDLDSVYCTPPVQDATEARADELDGLAENPAANDDGEEPDDDEEEQANTETPGKACIASHPGAMTSNQTLRQWLPKCDTVAALWEATEEMKIQSRTAECDALVRVAYQCQTNVTWKEETLALAGRTLEEAFALENLSWCQDVGCKPLKLRIARAVSMDLLQLAQRIHKRVQSKSFSKTDFALNLLLKKPDEWSVPTYIAEGLKWLEAEIAPPELEVAEGQEEDVEDMSVALAETDGGRVA

SEQ ID NO: 64547 - protein, 596 aa, Klebsiella pneumoniae 303K
MVAGAGSGKTTSLIKALAHLADTRGSALRRAGQKISCITYTEVAVGEIAADVGNSQLFHISTIHSFLWSVIRPFHLDIAKWVVARIHEKIAEKQAHYDKPRTQAKTKSRLEDEIAYLSAQLECIDDVDKFIYGTGSNYAKGILGHDDILKLVPACVEAHPLLRRIVAKRFPFVFVDESQDTDPDVISALRTIANDNPDMCIGFFGDPMQKIYMSGAGAIPLSDGWAEITKPENFRCPTSVLGVINSIRASGDGLQQIRGRTTIVDGVEQTVSGTVNLFILPSNVERSAYLTSVRRYLANETSDEQWLSDTREGDVRLLVLVHRMAANRLGFPNLFAALTDKAPMSLSEGVNDGSAWPLRPFVQHILPIFAAAQANDQFQIMSIMRSECPKLEPLRLHGQAMVAVLNEIQQGIDGLFALLEEGSQATVRDILLHVKDCELLRLDDRFENHLSDEPVNDGNDDFENVQNYLRCNAHELWAYRRYLSEESPFATHHGVKGAQFERVLVVIDDEEARFSQYSYGKYFQYIPLSDNDLANLEEGKESVLDRTRRLFYVCCSRALKDLAVVIFVPDVAVAQAAIVEQNLFPASTILGQHDLS

SEQ ID NO: 64548 - protein, 712 aa, Enterobacter sp. MGH 14; identical to SEQ ID NO: 63712

SEQ ID NO: 64549 - protein, 599 aa, Enterobacter sp. MGH 14; identical to SEQ ID NO: 63713

SEQ ID NO: 64550 - protein, 634 aa, Marinobacter sp. ES-1
MKLQSIRLFSFQSFGPEPTELTLNDITYLIGPNGSGKTAALQALCRLFAFDPSLRRIRRSDFHVPYDEEDVPEERQLWIEADFIFPELEDDDDVATIAPHFGHMRLDSADGPPRVRYRLDATMGVDGDIEETLVHVLDLDADGSPLTTAQVTRAERNHVQVHYLPARRDPADHIAYSANALLGRMLRAVNWENEREEIKGFTDKISESLAGNPSIATLSESLQTTWSTLHKGSFFADPQITFVASEIEALLRHLSVSFSPGHDEELVDFSRLSDGQKSMLYLSLVLSAQSIGRAVLAGDDDTFDPDKLRPPVFTIVALEEPENSLSPHYLGRIVNALATMTSNEDAQALIATHAPSMLRRVNPRHIRYLRLTSERTTKTTRIRLPKRTDEAHKFVREAVQAYPEIYFSRLVILGEGDSEEIVLPRILRAKGIPVDESAVTVAPLGGRHVNHFWCLLSALEIPYLTLLDLDVARHQGGWGRFKYANDQLLAYHPEDVLPKDHNIPAWNSDKYRVREYPGYIEAFEERGVFFSYPMDLDFAMLLSFPDEYGVEPNPPSEATVKAVLGNSHFDAAQYDDDERALFKTYHKRFKLGSKPAAHIDALAQLSDEELRDDMPESLARLANAVIAKLEELPE

SEQ ID NO: 64551 - protein, 556 aa, Marinobacter sp. ES-1
MIAVGDWQPADGLTLEPNALRAARETERCLALTAGPGAGKTEMLAQRADFLLRTGTCRYPKRILAISFKVDASKNLKERVQRRCGSDLAARFDSYTFHAFAKRIIDRFRPVLTGRDALDVNYQIGDRRVTRRQIEFSDLVPLAIQILNTSVVARNAVRQTYSDVFLDEFQDCTDQQYALVKLAFQGTAIRLTAVGDTKQKIMGWAGALDGIFQTFAADFAAEPLNMYRNFRSKPRLLRMQNEIIKVMDPTSVMPDEQLAGEEGQIFAWQFPNSQEEAEYLADSINTWINHEQLPPSEIAILIVRQPDLYGDHLIQALEQRRIPFRNEQQLQDISVEPAARLIVDYLSILYGQREPKAWIRLMAQLIPFADDDAQSSVRRDFQNFIAGQRKSVVQSVLLGEPFADWWDFVRAFLSKVGIETLSALSHDYESKARLVQVVNDTKTRVDELLKSEPNLPKALERFSDDQAVRLLTIHKSKGLEFDTVVILGVENQSFWGEEDAERCAFFVGVSRAKKRLMLTVSDRRDTPPSNPRRWKENRTSHSEFLGYAMPFLSLGR

SEQ ID NO: 64552 - protein, 598 aa, Acinetobacter sp. COS3
MHLKNLIIKNFRNFELIDIPLSSNVVLLGENRVGKSNLLFAMRLVIDQTLPDSARQLKISDFWDGSDLSKKPQIEIHLDFTDFEKDPYLTALLTDYRLAGDYKTVRLSYIFRCKSEVTSLPTSSEDFEFIICGGGDENRVLNNQVRRRISLDLLDALRDAENQLGSWRNSPLRPLLEDAVASIGSTELTKVSTDLEAANTKIIEQPSIKALNASLSKKILSLSGKGHDLKTSLRFSNADPLRLFRSLGMYIDEGKRNITEASLGSANVMLMALKLQEFSWRKARNERNYSLLCIEEPEAHLHPQLQRAVFKNIFKEKDASQELIITSHSPTLASIVPLRSIVNLRSCGTSTKAFSLAHLPINDDEKDDIERYLIATRSEILFTKGIIFVEGDAEEALIPSFAEILGYDLDGLGITICNVAGTNFNPYIKLAEGLGIPFAVITDWDPLDGKKPALGRARCLGIWDSRCEVNPTLKKIEEIDRKNFEETCKFDEFREIWAKFGCFLNNETFEVAIAQTANLSNVLLEILDEQGFGSTRTKRINEWKLDPNKIDSAQLLAMVKDIGKGRLSGKLKKKISGKKLIQVPKYIQDAIEYMVKNV

SEQ ID NO: 64553 - protein, 593 aa, Acinetobacter sp. COS3
MSNHTTLKKALAELEKNKEQFEAVHCKTHCVVLAGPGSGKTKTLTTAIARTLKEEVIAPRAIACITYNNECAIELETRLSKLGVDTTGTNFIGTVHSFALTQIIMPYSRCVESNIPQDFKVADLKECRIAIENAYKKIYQDSGDPYKQWEFAKEKRNRELDRTLPIWKGHNKELAEFIEEYEQELRKKGLIDFDDMPLIAFRMIKENPWICDAIEARFPILFVDEYQDLGHGLHELVQLLCFDGNVRLFAVGDADQSIYGFTGANPELLQSLTLRQDVQTFQLKFNYRSGTKIVKASSAALNENRHYESPEDTPEGEIKFHPVNGGLEEQAYFIVNKLLAELNRKGFKNENIAILYRAAWLGDKIVEALEDQQLPYHRTDGNSLIKRSSKFARFIEDCAKWVTGGWKDAEPPFRKLHNQALIIVYGHHYTKNEEQQLALQLIDFLQNSRSITETANEWLLRFNQELVKPWMAVCRNNLQEWEICSELLEKTSPTSNKDMSLDLFAGKTEGTGRIILTTFHSSKGREFDTVILFGVNNNVIPSSRDKTSPKALKETRRLFYVAVTRPKNTLHLVFQKNNHSDFVADFSQRCEQE

SEQ ID NO: 64554 - protein, 607 aa, Corynebacterium sp. KPL1824
MLTDADAAKGMWLESARIKGFRSCEKTEVEFCPDLTLLVGENNAGKSNIIDALRLATAPLSGRRTRFFEIDDPSFGAGVNPDIELVYTEGDEFQQALFIGALDLQSKKIHHHVRYFSPTDRYPRGRTERLAGLVASPDPESEVRSKINHVYLEPLRDAKRELDSANGRRLGSVLRYLLDEKEREEFLQSAHTATEQLSGSGAIQGVSKKIQEHLSSLTDAVRGQQVALGFEKPSLDHLARGLRLKMAEKGIDVTNLASSGLGYANLLFMSTILLELQEANQSELTLLLVEEPEAHLHPQLQGVLLDFLLEQAEESVKSAKEGRPAGRIQVITTTHSPNLASSVGIERTVVIRSAKRDNRRSSVALALKQIEFANDNDRRKIDQYLDVTRSDLLFTQRVILVEGISEAVLLPALARHCVFDRSDPEQLKRLRRFNATPIVNLGSVDFRPYLTLLLYDFGEGMHIADKVVVLTDEDPTLEGSEAKSFNRAEELESIATKLKAEDILTVKTTEYTLEATLLTGASENAQLLRKAFLQQHPKSHCKWDAIQDAQEPGREMYRRLQSKKGADGLDISKGQFAHDIALAIAEPGVVFKCPTQLKETIEAAAED

SEQ ID NO: 64555 - protein, 560 aa, Corynebacterium sp. KPL1824
MSLEFTSSQKSLIESESGGFFEACPGAGKTQTIVERFARRADSEDSRCGTALVTFTNAAAEEVQRRCAHKPKLLQAPNFVGTIDSFINRFFVTPFYKAEYGKAPKFWDSWSSFDSADVVIKGRCPVPLDHFQFDNDRAKLRKRHIQGYSQSQICELESQAYTKWTQFVRSGHLDADTARLLARTEIEENKYGIVELLAKRFEEVIVDEVQDCNSVDLLVLKSLRDAGIRLISVGDLDQSIYEFRGTSAPEVSNFLQSTDPQPRIDTNFRSSPAICKVVNSLRAGSTRDTSGGEVSTYDAPVHLIGYQHLSEIGPLVERVIDQYPELEKPVFLAHSTNNAALAAGGRSKGKSSKNKIVALAKASSLLLDSSSTSAKRTKALRETGILLQRLNPDKQLSTAEEEDYLENLRLSKSSYHELCLRLVVTVGNPSEQSSSTYRKKLIQAAEGVGISLDRGRMKTPKADVWPWVGTPAAKHQYEHSTVHGFKGLEANSVVLVIPHDSRTRDTIRDWKEGKGSEARRVLYVGASRAKRLLILAVHKKHREDVKQILERDDVPLAVSG

SEQ ID NO: 64556 - protein, 593 aa, Prevotella sp. BV3P1
MYLSSLHIRQFRVFDDITLYFKNGINILIGENNSGKTAIIDALRICLGCGKPDNYIYIQESDLHVNSTVPTENNTTIQFDLTFEFGDALIERECFYDFISQDKEDPAKQTIQLHLKFIQENNGKKKYFKRMIWGGDNEGQQVPYESLQEIFYTYLSPLRDAVSCLRPYSYDNKTSQLFNQLTKYNKGEEEIELNEERKDLLAKNLYHVFEDDASDWKHILTTGKSKVNAHLEGTGITRKHPNIEMRYVGRKFSDVVRGVELKCPVYKTIEDGQEQKYFELYQNGLGENNLIFTSVVLGDLINRCEDNALEIYNALLVEEPEAHLHPQYQNTFFEYLNELQSKGLQVFVTSHSPTITAKSDVNNISVLQRKQNIVQSFSFGKLTESDYPAESKRHLRKFLDTTKAQLFFANGVLLVEGVAEAIIIPILAKKFLSEKIDLCKSGIELVNIGGVAFNHFGLLFNNDDESKRLLSKCAIITDSDPEEDKDKSDRAQKAKDLEGQNLKVCLAPHTLEYDLFEQSEHNKSIMRDVYRKMHAQTNDLRGDFNASTLMKKLKSNKDKAEFALQLCDRLETEVAFDVPDYIKDAILFVAPSE

SEQ ID NO: 64557 - protein, 593 aa, Prevotella sp. BV3P1
MDIQLSAQQQAVVDCNEPRIVVKACPGSGKTFSVAARMAKLLQENNLSRHQGIAAISFTNTACEVIQKELKETFGCRNIDYPSFIGTIDSFINTYIFLPYAHLVMGCNYRPEIVGTTFNKWFDYDPTQTRYIRGKLGERIITSRDANYYFDLISFGLNDQLLRLAPYQAYHFGKADWDNPNKKDGSPKKVISELKEMKWKHFNAGKVNQADAIYFTFRILDKYPSIAQNIVRRFPILIIDEAQDTTELQMAIIDKLSQCGAESIMLIGDPDQAIFEWNTANPHLFMEKYNSPDWHSLDLSENRRSSEKICQLANHFSGNEMCSIASDKDYTDEPCIKGHLDTPESVNQITNHFIEKCNEMGLDESEYAVVFRGQKFGETNFGLVNNDNSSRQNSPWINGHYGVRDIVYGKYLIDHGKYTDGLSLIEKGCYKITKRVRYVSSSTMRREIAEVGFRRHRAEMFDFIQKLPSTNDTLSNWITKLQQMGINLTVDLGKANVRIESLFRTVNHQFRQERPYLKTIHSVKGMTLEAILVFLSKKAVHTNYTTILNNPAKYSVDNNEELRIVYVACTRPKKLLWIAVPSDDIDCWRNKLF

SEQ ID NO: 64558 - protein, 619 aa, Rothia aeria F0184
MSIYLSKVSLVNFRNFKNAVLRFNPGVNTIIGENGAGKTNIFHAIRLLLDDTLPNSYSYFTEKDFNRGIGDWKGHWIIIRLEFTEGLNNESVYSEKIISLLTHFCGEKNPNEPKSYSCSLVFRPNYNIRKELFEANGKAEDISSILEGISLEDYEVVRFGKGESDFFNGEDYKSIVGNFENNYFANPDIQEESCWLGTKTTSIFSLQREFNTAYIDALRDVQRLFRGLKRNPLRSILESKSTSIDKSDSFAEVVDIAINLNNQINMDQDVKNLADEISGIYRETAGITYAPGDISIKSQLPTDVSSLFQSLSLYIGNPTELNKYYQGSIDELSLGNANMLYISLKLLEFKIRQNGKPKNRAPIANILLIEEPESHIHPHIQKVIFNNIGGMSETQVIYSTHSPQISEVSNVENVNVIVPLEGESWISCNPGNKLGKDKIVPINRFLDVTRCNLLFSRGVILVEGDAEEIMIPYMIKIVYGISLDEIGISVINNRGTEFDNLASMFHRDRLRKRCAIVTDLDGRLNNKYSSDDAATQGKNRLNHLNNEYKNNEYVDVFYAEYTFEVDFALESKNNRMQLIQMAEKNMHIKNPGLILPKNLGLPIKIISQRQLWTWFTKMT

SEQ ID NO: 64559 - protein, 602 aa, Rothia aeria F0184
MMVGQMLNKLDNEQEAAINAVGNVLLIACPGSGKTHTLVNKVAKELSAIETHREFIIAITYTNNAAEEMKIRIKKMGIDVSQLWVGTIHSFCLEWILRPYSMYTESLSGKFEIIDEKKQELIIEKFMPENFSRKDLDNVKKFLNDYRVHKIAGEFLSGGDFKDRNMEKCVEKYREYLNNNNMVDFHSILEYSLEILSCNNFISENLSNIFPLIAIDEYQDTNILQYLILSKIAKGGKTRLFVVGDPNQGIYTNTENVIFGKSDLERLMGGGFAEHVLINNYRSSSKIVEYSKKYMVERVDMVSSGNLCGYNSEIRYLNYLEKDIDDFDISEKIKEIVEYNINILNIDPSEICILAPWWSHLAPLAQSLGDKLPNISVDGVRASAFWDVKKNVWYKISRLAFTEPSIELYRKRLFWAQEFLDQIAKDFGYVNNLIAPIDLLDVSNEIRSILAEKWIGNQRAESYLRDFFKQIIEYMEVKPPVLNMLEESVNLFFEGFRCKVESVKNIDIGSLEACKKVFNPGQGIKISTIHGVKGEEYDTVILFAALNGFIPHYTVPANKAKNNAKKLLYVTASRARKNLWIISEKREFYGSCKLPCEYVEKP

SEQ ID NO: 64560 - protein, 729 aa, Enterococcus faecium BM4538; identical to SEQ ID NO: 62500

SEQ ID NO: 64561 - protein, 597 aa, Enterococcus faecium BM4538; identical to SEQ ID NO: 62501

SEQ ID NO: 64562 - protein, 729 aa, Enterococcus faecium NEF1; identical to SEQ ID NO: 62500

SEQ ID NO: 64563 - protein, 597 aa, Enterococcus faecium NEF1; identical to SEQ ID NO: 62501

SEQ ID NO: 64564 - protein, 729 aa, Enterococcus faecium 10/96A; identical to SEQ ID NO: 62500

SEQ ID NO: 64565 - protein, 597 aa, Enterococcus faecium 10/96A; identical to SEQ ID NO: 62501

SEQ ID NO: 64566 - protein, 592 aa, Fusobacterium nucleatum CTI-5
MSDFYIKKIEIKNFRNFENISFQTKEKNVIIGMNDVGKTNLLYAIKLVFSYKFRNIDLLDSDFHKQNISKPFEIFISMQIFDKEKEEKSDFTEIILSEIGNLRNKENGEQNLLNIKLVGEYQNGISMFWNVSEKMTKDDMDEIPAVGASKNRIDSIFEIFDIPPYNDIEKKFLEISRKIVNNMEISETEKEKYTEIENLQNTLKENIEELDSVKKIDEEITNSLKKFNVSYEIKVATTLGLKRIYDDLKIFTKQDNEDRIYPTAGDGRKKTIQYAMYLYEIEQQHKKIPIILLEEPENHLFLRNQISLSNTFFNSDFFCNIFLSTHSPQLLYKISNGVNIIRIDKKNNQATSNSSVYTLPEEYNSLKNILQKDLSEALFCKKVLLVEGYSEKILFEYILDKKIKDIERRAEIYILNIIGVGFKSYYDFLKKLNIDVRLKTDNDLKNTQINIEISGIKRIAEILGVKVENKFIEFLKDKKINNKKDESISEKKNRIDITREVYNFAKKIGIISEFEEQKCYLSEVDFENDLAKVVLTNTEEQNKMITFLQRSKWAHLFEEKYYKQIFSEESIEKIVESEYFKCIKDLINDERE

SEQ ID NO: 64567 - protein, 448 aa, Fusobacterium nucleatum CTI-5
MNFSKEQNEILNLPFDQNIIVNACAGSGKTTILIERVKRHFYNIKKEYKKIVILVFNNAIKEEISLQIKEKNLFQVEVSTFHNFFIHHILPFSNKIKLNMFKNFDLKYRYECKIENFEEWKATFEENKIVTSSKDPKKDFLLEYILKILENNKSCQEYIKSKFECMYIDEAQDNNEIQYKFIEIFLTLGINIFMVGDPSQSLYSFRGANSKVFLDYENREDFISKKLNQNFRSHPFINEFANNYSFNFLREQDTINFIEDVSEAEKEVTELTVLRSKGEDCKKYEQKGYSYIKTPSMPSEIDNVQLVTLLLEEYFTTKNAIKFLKKITNMEDSFFKYKNKLTNFFKNPTNENLKILNTNVFSKINWLLSETEIDYIVEEIKNENFKDYYNLYEKEKIVMTIHISKGLQFDNILIHKKDFYNRRGELEKEKFYVACTRAKKKLFIIGDD

SEQ ID NO: 64568 - protein, 691 aa, Fusobacterium nucleatum CTI-3; identical to SEQ ID NO: 63226

SEQ ID NO: 64569 - protein, 633 aa, Fusobacterium nucleatum CTI-3; identical to SEQ ID NO: 63227

SEQ ID NO: 64570 - protein, 691 aa, Fusobacterium nucleatum CTI-1; identical to SEQ ID NO: 62870

SEQ ID NO: 64571 - protein, 633 aa, Fusobacterium nucleatum CTI-1; identical to SEQ ID NO: 62871

SEQ ID NO: 64572 - protein, 689 aa, Streptococcus sp. I-G2
MKLTKMVINNFRSFGECQAINFNNQTVLIGNNSSGKTSVLQALSKLFSDKQSDRIIRKSDFHLPKGLRPGENTRNLFIETIFEFDELDGTVYGPAIPTFFEHFSVSQDGAKPFLRIRLESSWEDDGTVEGSIDTQIYYISSDEDTIRDEDKHRAPRKDLDKIRVLYVPASRTPEKELGNASGSMLSRLVNSINWTEDEINEITDKIDELNNTFLSENGALTQINNEIQKSWELYHEDNRFSQAELIINSSEMAAALRQITLKFSPTTTEEAFTVSDLGDGLRSIFYFSLVDSILDIELEITKDREENPDNPRFKLIPPVLTILAIEEPENHIAPHHIGKLIKRFKQLGNNDNSQVILTSHSPAIVKRIDPEDLKYLRIENNDRVLQTIVSDIQLPPAIDESYKYIKGAIQAYPELYFAKLIVLGEGDSEELLLPKFFDLLGKEVDSSQISIVPLGGRHVNYFWKLLNALRIPHITLLDFDNERYGGGWGRIKYISEYLYELNTEFREWFRTQGLDFSEIGEREFESIDAPRLNNWFNKLEEFNVYFSSPLDIDFLMLQHYKDNYLNTLSSIEGPVVSYNDSDGSSKKVKLSDLDCLDRLQLEGFNKRKEEAIRATLKDKSGSGDSFTEEEKKLMIWYQYFFLGRGKPTTHMQFLSSISDNELKRFLPPVFEKMVKRAEELLGVIEHDEE

SEQ ID NO: 64573 - protein, 604 aa, Streptococcus sp. I-G2
MMKNEEWHPKVDINLEKAALGAAKDVTNCLVIAGPGAGKTELLAQKLDYLFSTNKCISPKKILALSFKTDAASNLKERVKKRYGAEYASRFTSLTYSAFEKRILDQFRNVLPGEIRPSKDYLIEEMEVIKEVLYRNGLNTTGMRMNSIKEIAESIALSDNDPIIKNDLLKGTQSNKPVLFYRQITKLATQIIANNEYVCKALRMTYEFVFLDEFQDTTYDQYNLLKICFLDSTCKLTAVGDNNQAIMRWAGAKPDIFPDYIRDFNSNKYQLLMNHRSVPKLVEFQKEVHQILNSNHRSIQTNNYPEFQEGEITLFEFENESLEAELIANDIESKIQGGIRPSEICILAKQKVDDYSSKLITTLNSKGIKARIENEYQELLKDPTCNLLLDLISCSQGKRDPLIWENISNFYGNINGIDEFTDDLILAKSYKEIDNIVRDITYLISNFIPNEESMLKLIDCIIEKIDEKRIISNFSTYNGKSDLDIIVKNFSKLLYIEYSQTQGEWLDTVSSFKGENSIPIMTIHKSKGLEYEVVYFLGLEDSAFWSFNDQPEEDKSAFFVALSRAKSHLIFTYCKLRNNSPQNNRNINEIYSLLTQSNLVDVIN

SEQ ID NO: 64574 - protein, 571 aa, Lactococcus lactis subsp. lactis KLDS 4.0325
MKFQSLQVKNFRSFEDISIDLSNKNVFFGLNDVGKTNLLTALRFVFDRDTRRNDFMDSDYFEKKTEIPIEILVTVDISDNNEDSSKLRARLRGAILSGQDLIYIRLIAKYDNSEMVGVAELFWGGDKENLQEIKPRGTRFDIDDVFNVFYIDSYVDMDVLFKRNIKKFIQSDTEDDKAINDSINSIVDELNEKISSLSGVSDFESKITPTYQKFNDENISISIKSEIAVKGLYSNIVPYMKKKDDDNIYPTAGEGRKKLVVYSLFTLLAEQEADKKINLFLVEEPENNLHKSLQIELSQILFGNSESYPYLFVSTHSPYILYEMNKVTLVRIFAERRVTSKSAFYNVPSDFQDNKKMLNRLLAEAIFANRVLLVEGPSEQLLFDKVLSVIKPYYEVNGMYILSVNGIGFKSYRPILKKLGIHCIIKTDNDIQWRANSGHHALGFSRVNNLVNGTLAVNWRTTPLPTSKEEFINNSIGYRKELYNLEQNLPVLNSIREDFHVYLSKVDLENDLDQVLHENLVTYLGDNPVKYLQAAKNNHMVELIEKLNDEDCREVYEHYNFACLKDLVEWN

SEQ ID NO: 64575 - protein, 501 aa, Lactococcus lactis subsp. lactis KLDS 4.0325
MELTDTQKKIVDTAGNLIVRASAGTGKTHTMVAKIAKEIDENRDHRVIAAITFTIKAAREIKERLSVDTTGHFIGTNNSFAIEEVIKPFMKDAYGVQFDCEMTTDYSLKFDNYEEGLNFISENCTLGSYEDNNKNFIFELALKILRKSEVARLYLQAKYFKIYVDEYQDCDTAMNEFFMYLTDSLTIDLFIVGDDKQSLYTWRGANPEAFKSIIGKRNFEKFFMVDNFRSNKQIQNYSNLLFEETSSLYDQQTSIENIILLNCTEQDWIEKIKCFWDADKSSALLRFSNSNAKSAADILCAHDMDFKFIPKAPIEDISNDAGWLYYAIAQYLLVDTYSVFDFIYDIPSGTEEDSKIKSKLERYLQGLKTNVVDENQFKEKVSELATFLGYGAQPKDLSALYETISTDRYIETFKSDNIKHRAMTFHSSKGLQFDQVILFVEDYNLRDEVSFYNHYVATTRAKSKLIFISIKENYGTRLFYQNIAKRLEASGLTLDKLVTIY

SEQ ID NO: 64576 - protein, 594 aa, Pseudomonas aeruginosa CF77
MRISRVRLVNFANFSDVDVETGDSIVIVGENKVGKSNFIRALQLILDPALSERDRQLGLEHFWDGLGADKLGEAIEVSVDLTDFTDDPRLMAHLNDCVIEAGPPMVARLTYRFQPKAGLAEEPDSLRDYEYVIFGGNDPEMRIGGALRRMLPLDVQVALRDAEKDLASWRHSPLRPLIEDLAASLDEDAREEIQQQVDEAQQELAGHNEVIEAAERISERLVALAGAQHAVPLGLGLAPTRVDALLRSLRLLIDNGARGIGDASLGTANLIFLALKSLELDRLVSDGERDHTFFVVEEPEAHLHPHVQRLVYRYFLGTGAQGEEDVPPLTTILTTHSPHIASVAPIRSIVLLRHDASEGKTVAVSTANAPFTQRDEEDLQRYIDVTRGEIFFSRGVILVEGDAERFLIPAFAEALGIPLDMLGITVCSVGGTNFTPYVKLLGPHGLNIPHVILTDRDPVDGKPPRVRRRLANVLDVVEPGDDHGEWDVDDVLERAVELGYFVNENTLEPELFAGGLAESMQQVIERELPLKRASLDDLQSWVDDPDELDEDRLLAMIERIGKGRFAQALAVSVSDDTCPDYIRSALEYIRDAVV

SEQ ID NO: 64577 - protein, 606 aa, Pseudomonas aeruginosa CF77
MPSSSVSSAYLAQAADLAGNPGQQAAYDSQGHCVVLAGPGSGKTKTLVLKLARILAEDVRAPRGAACITYSQECARELTRRLEGLGLREAPNLFIGTVHGFCLRHLLMPYGRLAKLPIPFPLAVATQRVSDRLLRQSGDALFGPNHPYKAIDLGRHRRSVLDRNSVMWRSEEELAAWAIAYEAALRNEGLIDYDDMVVFGQRLIVEHDWVLPLVQAKFPVLAVDEYQDLGVALHRIVKRLAFDGGVRLFAVGDADQSIYGFTGADGGLLTELAARDDIERVQLQLNYRSGTRIVNASELALGEARGYRANDPTRQASIAFVLRPGGLADQAAHAIAQIIPAALAAKPGRTLGDIAILYKDYRAGDVVAEVATASGLDYIRVDNAAPYRKVGLTSWVEDCAAWCAGGWRIGRPQLRGLIERYLAFRRAHLDESQAKREGQVLTALLWSLRQDVQPAREFVAALRTGILDDLLDAESALADQKEQLDRMTAALAEGGALASLDIVSLGGRDGSPAHLNLLTLHSAKGCEYDVVIMVGLDLGNLPWRNESPEKLRESRRLFYVGLTRARDEVHMLYSGFVDGRFGPMRLGRSPFLDELENRMRTAGLQQ

SEQ ID NO: 64578 - protein, 652 aa, Pseudomonas aeruginosa C48
MHIERLGLENFRCFGPQQTHVVLGPSLVAFVGDNGTGKTAVMQALQRMFGVTSEQRRLRKQDFHIPFNEAERPLARTLVIEAIVAFPELDADADNPAVPAFFKNMAAEENGNLKVRLRLQATWTDDGTLDGAIEESYCTVQTFGDFEESDLQRLRGPDRSRIQLIYIPATRDGASQVTSFIRGRLWRAISWSPEVKDSLTDAGTAVNQAFSAEAAVGSIGSAVTRRWRQLHSAGTDTTPFFRPVDTRWQEFIRRVEVVFHPAEDGQDRALEDLSDGQRSLFHMAMASATLDIEAQLAADNAPAGFAGAGVALPALTIVALEEPENNLAPFYLSRIIKQVEEVAEGSNAQAIVSSHSPSILARVEPSDVRHFRLDLGNRCTEVRQISLPTGDEEASKFVREAVRAYPEMYFARYVILGEGATEEVVLPLLAKAMDFPIDRSFVAVVPLGGRHVNHLWRLLGSLQVPFATLLDLDWGRSGGGFGRIRTACEQLLNIGYSPQQVFAEILREGGAEQNLAEISATDASDIGALRRWTRWLEQFQVFFSDPLDLDYAMLKAYPRAYRVLEPGMRGPAGAGEPREAVLGAEGSPAFYDAAEDDDLRWYRYLFLGRGKPSTHVRILSRLTSEDLVAAVPEPLQRLLVRVRTALVQAEQQ

SEQ ID NO: 64579 - protein, 631 aa, Pseudomonas aeruginosa C48
MSWRPVTPEEWLPRGILNLEPNAWIALRRTQSTSVVAGPGAGKSEFLAQRAVYLLETGQCKAPQQILAISFKTDAAANLAARVRKRCPPELAGRFTSLTFDAFTKSLVDRFQAAIPEHWRPTRPYEIGFPSRRMVQEELNRIRLMARPEWQARIAQFTAERFEAEVIGGSRLAVDVPQQPTTAEQLAIYQWLRQQLHGANVSRLSFVTLNRLAELIIRANPKIARALRMTYPYVFVDEFQDTSFAQYDFLLSTFAQTGAVVTAVGDHKQRIMGWAGARQDAFEQFEADFEAERVSLLFNFRSSPELVRVQHFVAQALDPLSPHIQSQAVGQLDRDVVQVWRSRSTVVEGQRLAQWISADMAARQKQPRDYVLLVRQRPDQFEEELQPIFTAAGLSIRNESKTIGRTNVQDLMVDEAAAIALAALRLASGQRSAEAWSTLSSAVYAIRGVDEDDEVQRYRVDQDIQSFLVALGQIVRARIPTAEFAAEIAQRIFAFLDVAAMTATYAAYTRNDLLEVMAEAFSLHLQQSASETTTWATCIDRFLGTHDISMMTVHKSKGLEYDTVFFVGLDDQSWWSHTPRNPEGIATFFVALSRAKQRAIFLFCQGRGRRDRVSELYQLLTDAGVEEIEVR

SEQ ID NO: 64580 - protein, 778 aa, Pseudomonas aeruginosa C23
MHLKKLAVRNFRRLRNVVIDLASDISIFVGANNSGKTSVGHALQLFTGSGRFNIHDFSAELWADIVAFGEGDGEASLPTMEIDVWFEIGPDDVHRVIDLLPSLAWEGKLVGMRVAYAPTNPAATHARYVEVRQRVLDAVAKGEDGAPAFDPSPRNLREFLRDRLHDEYELRYFVLDPARFDAKMVAEAGYDPATLTGRDRSGREILNGLLHIDFLNAQRHLSDGPGGSRAEDLSRVLSRFYGRNLEQKGEDIEALRALAASEVSLNEHLERVFEPTLKSLSKLGYPGLSNPRMMIRSALDPAQIMSGRDGAIVHYALGADDGKPDPPTLPDRYNGLGFKNLIFMVVELLDLHAQWLAIEENRPPVHLIFIEEPEAHLHAQLQQAFIRKVMDILALKGEDRTHYTSQVVVTTHSTHILYERGFRPIRYFRRSRAQNVSTSDVLNLSVFYDSTDPDIRSFLERYLKLAHCDLFFADGTVLVEGNVERLLLPQMIANAAPRLQSTYLTVLEIGGAFGYRFKTLIEFLGLTTLIITDLDSVFGPLGQDGEGAAPAGQPEAAEPAAENAQAAGADAEDIDDDEEDLPVAAEKPGKACIAGHPGAATSNQTLLQWLPKCDTVAALWEATAEQKIQARTDDNDALVRVAYQCRTDVTWGGETLALAGRTLEEAFALENLEWCQDKNRKPLQLRIAKADEKNLTTLAERIHKRVQAKSFSKTDFALALLAEDPSSWSVPTYIAEGLSWLETEIAPPEPDEDQPHEEQPHEDAPQGAPVAAGDEVAA

SEQ ID NO: 64581 - protein, 625 aa, Pseudomonas aeruginosa C23
MTSRIGSPDTQADLDVRACLDRMPPRSFVMVAGAGSGKTTSLIKAIAHLAETRGPALRRAGQQIACITYTEVAVGEISADVGASPLFHISTIHSFLWSVIRPFHSDIAAWVATRIDEKIAERRAHYDKPRTQAKTKARLEQEIADLEADLAAISEVEKFVYGTGSSYAEGILGHDDILKLTPACVAAHPLLRQLVAKRFPYIFVDESQDTNPEVVEALRHIAGEHPGLCVGFFGDPMQKIYMSGAGTVPLNDGWAEITKPENFRCPTSVLGVINAIRAPGDGLEQVRGRTITVDGIEQPVAGTSNLFILPADAERSARLAAIRQWLAAETGDGLWLSDVREGDVRLLVLVHRMAANRLGFPNLYAALNDRAPMSLSEGLSDGTAWPLRPLVQHILPLVVAAQAGDRFTVISTLRSECPRLEPARLRGQATAPVLTALQQALDGLVGLLAAGSQATIRDVLTHVRDNELLRLDDRFAMHLVAEPVDDGSSGFENVQAYLACGVDELWAYRRYFTEESPFATHHGVKGAQFERVLVVIDDEEAGFRQYSYGKYLGYVPLSDKDEANLAAGEESVLDRTRRLFYVCCSRATKDLAVVAFVPDVAAARTAIVAQNLFPEAVIRGAEHLG

SEQ ID NO: 64582 - protein, 778 aa, Pseudomonas aeruginosa C20; identical to SEQ ID NO: 64580

SEQ ID NO: 64583 - protein, 625 aa, Pseudomonas aeruginosa C20; identical to SEQ ID NO: 64581

SEQ ID NO: 64584 - protein, 568 aa, Pseudomonas aeruginosa BL24
MEIEKISIVGFRNYLNATINFNKSTLIIGANDSGKTNLVHAMRLLLDKSLPESELEPSETDFHFEPGGKQSETISIDIHFKEVKEDAVLSTLKGSVGEDEKCVLRYSAKRGDLSYSLYCGPDSDELDEIAGRFYLKYLNLRYVKSQRDLEKFISTEKRQLLKISQENRTKKEAEEDKAKLQTIEKRLTTINKHVRELHYVKGATDAVNNELSKLSHNLSAYSVHLDSGAIETQQFIDNLKLGASAAGSRVSLGGDGRNNQILLSLWKAKSEREFDPESEVVFYCIEEPEAHLHPHQQRKLADYLISELPGQTFITSHSPQITARFSPESIVHVKSKSGKSYAASNGCSKCINTAWDKLGYRMSILPAEAFFAKSVFLVEGPSEQLFYTELAKALEIDLDYYNISILSVDGVQFKVYASILNAMEIPWTIRTDNDISDITKNKKPYKNLAGINRCLTLAGLKKIDHAPATTTHADLMKNGHWSGCSRKVNKKGIFLSKIDLEHDLSEEMPDELLNYSARPNLPLAIAYLQDKKAIRMREFLSKYSERLVNIGHGEIARALLHCLEQAKE

SEQ ID NO: 64585 - protein, 546 aa, Pseudomonas aeruginosa BL24
MIKLTKQQITAIDHSGNLIITACPGSGKTTVISEKIRNELEDLKRHQGVIAITFTRKASKELARRCNRGGKETKSSFFGTIDAFCLSEIIFPFSKFIFGSSPDNLVPKFKNELSEEEISIIIETANQLGELGAENIDDYMPALKELYDLGCIYFPSIPFLASHIVKNSKSCRNYLKARYTTAYIDEYQDSSSAQHDLFLLLLDIGIRGVCVGDIQQSIYGWRKSSPEFLKQLINLPTFNHLTVSTNHRCHPSISNYANRLFDEDFEVEQGEELRVYQCEVEGAELDVALKLNNIIPSIIKKYPVKNLSDVAVLVRYNKGLERIREKLAIPCKIYTEDDLSGIESKTSQLWVMLLEFKFDKSMLVDDIVNLYNPAGDIRRDRLKALRDAVKSVRTVALEDLADTLLAASQLLLDIPATKFEVNALRKIINDPELLNQYLPATDDQVQCMTLHKSKGLEFDIVIHLDLVEWVFPKRVPGANYNDRVYPDLEQDLNLHYVGITRAKNACVLIHTTQRINSLGAVKRADPSAFLSLPGLDELYKIVDRKW

SEQ ID NO: 64586 - protein, 634 aa, Pseudomonas aeruginosa BL17; identical to SEQ ID NO: 63582

SEQ ID NO: 64587 - protein, 516 aa, Pseudomonas aeruginosa BL17
MLAQRADFLLRTGACRYPKRILAISFKVDASSNLKERVKRRCGSELASRFDSYTFHAFAKRIIDRFRPVLTGEYALDAGYKIADRKPGPSRSLIEFADLVPLAIQILQKSEMARNAIRQTYSDVFLDEFQDCTNLQYELLKLAFQDTSIRLTAVGDTKQKIMGWAGALDGIFQTFSADFAATPLNMYRNFRSKPRLLRLQNEIIRVLDPASVMPDEQLVGDEGEVFAWRFEDSRKEAEYLADLIDGWIKTEQLPPAEIAILISKQLDLYADHLMVALEARGIPFRNEQQMQDITVEPAARLIVDYLSCLYGQREPKAWIRLMNQLVPFADEDIQSNARKDLDRLIKQQRKEAAIADLVAEPSSGWWEFVRVFLKQISLETLVALSPDYESHERLKEVVRNTRTRIEELLKLEPDLPKALERFSDDQAVRILTIHKSKGLEFDSVIIMAVENEIFFGNQAENRCAYFVGVSRAKRRLVLTHADQRERPAGYTKRWDTHRSAQTEYFGYAIPFLSQQQ

SEQ ID NO: 64588 - protein, 634 aa, Pseudomonas aeruginosa BL14; identical to SEQ ID NO: 63582

SEQ ID NO: 64589 - protein, 516 aa, Pseudomonas aeruginosa BL14; identical to SEQ ID NO: 64587

SEQ ID NO: 64590 - protein, 769 aa, Pseudomonas aeruginosa BL13
MPEAVVATPVAGSITLRLLELCQFRRLGKVQLDIDKKTTILVGANNSGKTSVLAALRHFLSDGSRFGAFDISLSQWPKLRALGKAWELLKENPSTVIGSEEQWIEQLGVIHSAMPTLDLWFDAEAGMFHYVAPFLSKFSWKGGAVGVRLRLEPAASVDELKQLAWAYHTARLPVKDMGADSLAWPIDLLDFWLREPQRLGQVRAYKLDADKNPLDGLETYAAQTLPADASPIERKNLQKLIHVDFVAAQRGLGGEEADSRSASGPHRVGMFSNQLLKFARQHLNIATTGHGHRADLIKAVAEAQQELDKKIHEAIAPSVEEVRELGYPGLHDPQEIRFRTRIQTADLLDHGTAVQYSMQKDSLEELLPEYSIGLGYQNLQSLSYQLVSFKAARLKPEKGAPVPVHLVLVEEPEAHLHVQVQRIFPDKAHKLISPNEKEASGLKSQLIISTHSSHLAHAESFDRLRYVRRIAKSAENPMPTTEVVNLGKIFGDDQKTRQFAERYFRVQHTDLLFANAAIFVEGVAERMLVPLFIERDFEVLNSRYLSFLDIGGSHAHRLKPLVEKLRIPTVIITDVDPVEEKAGKPTKDGEPTTTLVAVANTGQAGLQCGNPTLRGWHPKLQQLEDFKNPVEVQLVWSEVSECLVRFAWQLPVAEAGDHWPSTFEDSLILKNIPWFKGLMDEKVDGYGNKIKPPKGALGSVARRVADHENISDLVASLHKLMHGSFNKGDFAASIFEMIAAAEPIACPKYIADALEWLQKQLDPNPELLP

SEQ ID NO: 64591 - protein, 648 aa, Pseudomonas aeruginosa BL13; identical to SEQ ID NO: 63109

SEQ ID NO: 64592 - protein, 634 aa, Pseudomonas aeruginosa BL08; identical to SEQ ID NO: 63582

SEQ ID NO: 64593 - protein, 516 aa, Pseudomonas aeruginosa BL08; identical to SEQ ID NO: 64587

SEQ ID NO: 64594 - protein, 798 aa, Pseudomonas aeruginosa BL05
MKLQAYRLQNYRRLRDVVIELDDEISIFVGANNSGKTSAVQGLYSMLRGEAKKFELFDFSAALWAEIDAVGRTPPGDEDAPKQLPSILLDLWFRVGEDDLATAMSLLPSTEWDGKCVGIRVAFEPRDAHALVRKFHELHEKANNAATALMARRSAAAEAGAENGAAVVADPGEYKPWPESLTKYLSKELSKEYTFRYYVLDERAFVGYQAKEVDYEPLPLGNEPGGAAILKSLVRVDFLRAQRHLDDPDAGSSDRAESLSRRLSRFYHRNLEKRGDDHAALKALDTSEKELNFHLEEVFSDTLKRLAKLGYPGVNNPEIVIRAALDPTTVLGQDAKVHYVVPGAVTAQLPDSYNGLGFKNLVYMVVELLDLHEQWKAEEDKRAPLHLVFIEEPEAHLHAQIQQVFIRNVLRLLEDANDHATFFHTQLVVTTHSPHILYERGFSPIRYFRRVSDQLDHNTEVKNLSLFKTGAADAPAREFLQRYLKLTHCDLFFSDAVILVEGNVERLLLPAMIESAAKRLRSSALTILEVGGAFAHRFQELIAFVGLTTLVITDLDSVTVKTDAAEQDAGGGGNVDGDNEDDDLKPFELEDDDEAAPGGKKKSKKRGSTCHAHVEGAVTSNQTLISWIPKKRSVAELWEATAEQKTLSLAEGASAEVRVAYQTKVMVTVGATTSQLCGRTLEEAFGLENSDWCQAEANRAVGLKLKRAPNSPEELAEKLHARVIGKNFDKTRFALEVLASGPLNCWKVPTYIAEGLAWLEAKVAHEIEADAAITTEVATIEPTVAGFVTVIADTGQMA

SEQ ID NO: 64595 - protein, 643 aa, Pseudomonas aeruginosa BL05
MSRRIDSPDTDADREIHACIAATPPQPFVVRAGAGSGKTTSLIKALDWVISEHGVCMRAKKQKVACITYTDLAAKEILADVNDDPLVHVSTIHSFYWSITKTFQADIKVWLQNDIRRRISELEEEFKNYSSRVWQTTRDRNKADQERYVRNLEVIAGVKTFNYGVGSDYANGILGHEDILQLADFLLQNRPLFRRVVALNFPFVFIDESQDTFPSVVKSFKEVEAQMRRKFCLGFFGDPMQAIFMRGAGDIPLEDHWRAITKPENFRCAKQILDVANAVRAQGDGMEQVRGLHERVDGDLKPVEGSARMFVLPNTLNRIEALARVRAWSAATNNDEGWTTPDIALKILVIVHRMAANRLGFGGIYSALNDKTSEGMKQGMQDGTGWPVRPFLSFALPIVAAVKAGNEFAAMNLLRKFSPRLAPRALTGRRAATVLRELHAAISRLVAMLDEAGTTIGDIALHLCDTGLFEFDDRYARVLGFVRDVADAAQEPEAADAVPAEGLSSDAAMAEFFKCSAQELWPYERYVSEGSPYATQHGVKGAQFERVMVVMDEEESDYRTYNYERVFASAEARAADRARALGGDENTWSRTLRLLYVCCTRAQRGLVLTFFVADPAATLENVVASGILPRSAVFTQEVLVGWP

SEQ ID NO: 64596 - protein, 595 aa, Pseudomonas aeruginosa BL04
MRVSRVRLINFANFSDVDVETGESIVIVGENKVGKSNFIRGLQLILDPGLSERDRQLGLEHFWDGLGEDKVGATIEVSVDLTDFTNDPRLMAHLNDCVIDPGPPMVARLTYRFQPKAGLGRAPESLKDYEYVIFGGNDPEMRIGGALRRMLPIDVQVALRDAEKDLASWRNSPLRPLIEDLAASLDDDAREEIQDQVDQAQRELAGHEEVVATAERISERLIAIAGGQHAVPVSLGLAPTRVDALLRSLRLLIDNGVRGVGDASLGTANLIFLALKSLELDRLVSDGERDHTFFVVEEPEAHLHPHVQRLIYRYFLGTGAEDGEEQPPLTTILTTHSPHIASVAPIRSIVLLRHDTAEGKTVAVSTANAPFTQRDEEDLQRYIDVTRGEIFFSRGVILVEGDAERFIVPAFAEVLDIPLDMLGITVCSVGGTNFTPYVKLLGPEGLNIPHVILTDRDPTNGNHPLVRRRLINVLDVIEGGVDHENLDADEVIELAEQYGYFVNENTLEPELFAGGLAQDMQEVIREELPRLRRETLNALQQWVDDPDQVDEDWLLRLIERIGKGRFAQALAPSVSQDVCPAYIRSALEHIRDAVA

SEQ ID NO: 64597 - protein, 604 aa, Pseudomonas aeruginosa BL04
MPSRNVGTAYLAQAAELAGNPGQLAAYNSQGHCVVLAGPGSGKTKTLVLKLARILAEDVEAPRGVACITYSQECARELARRIESLGLQQAPNLFIGTVHGFCLRHLLMPYGRLAGLPISFPLSVATQRVSDRLLKQTGDALFGQNHPYKVIDLGRHRRSVLNRNSVAWRSEEELAAWAEAYEAALRDEGLIDYDDMVVFGQRLIAEHDWVLPLVQAKFPVLAVDEYQDLGVALHRIVKRLAFDGGVRLFAVGDADQSIYGFTGADGALLMELAARRDIEPVQLQLNYRSGAGIVTASEMALGEARGYQASDPARQTTIEFVLRPGGMADQAAHAVAQIIPAALASKPGRTLGDIAILYKDYRAGDIVAEAVATGGLDYIRVDTAAPYRKVALTSWVEDCAAWCAGGWRVGRPQLRGLLDRYRAFHRASLDDSQAKREEQELTALLWELRADQQPAREFVASLRNGVVDHLLAAELALADQKEQLDRMTAALAEGGALASLDITSLGGRDGSPDHLNLLTLHSAKGCEYDVVIMVGLDLGNLPWRNETPEKLRESRRLFYVGLTRARDEVHMLYSGFVDGRYGPMRFGRSPFLDELEARMRAAGI

SEQ ID NO: 64598 - protein, 726 aa, Pseudomonas aeruginosa BL04
MEGFGVPRQQNEESMHVSKLSLVNYRNFANTKLLFQKGINTIIGENGSGKTNLFRAIRLLLDDNMIRSAYRLDSTDFHRGLERWQGHWIIISLEFEEISADEAVQALFLHGTAGIDDEAIGKATYSLIFRPKKEIRLRLSQLDDGDHAGLAAILNAVTLDDYETIFTGRSDADFNDEAFYKEVVGDFENARFNEEIEFPAIGAKIPSVLSVSREISFTFVQALRDVVSEFHNNRTNPLLSLLKGKSGDIDPVAFQAITDGVKALNDSIEALPDVQVVRADIRDTIKDAAGEAYSPSSLSIKSDLPDEADKLFQSLKLFVGESGEGHEGPIHELSLGGANLIFLTLKLLEFKYQKAKQSIANFLLIEEPEAHIHTHIQKTLFDKLQYDDTQIIYSTHSTHISEVSNVQNVNILGKERGRCEAYQPATGLTPEEVGNIQRYLDAVRSNLLFAKSVVLVEGDAEEILIPILIKKVLGVSLDELGISLVNIRSTGFQNVAVLFHDDRIRKRCSIVTDLDKSIIDTTPVAGDSERLLRRKKKYQASQDKGIARKALLDESFKDNPWVSPFFAPHTFEVDFVAAGNARKVVGILPDVYTDAPTIVTAKAELESADIARFGQRALTMADNYGKGWFAILLGKKIDPETAIPEYILDAIAFAHPIVTKEVWFNVLSYRVSYIDENEIFTAPAVFTEFREKLLAFRKGEIDFVSIRNEMLATFPDDRINDVLKVF

SEQ ID NO: 64599 - protein, 599 aa, Pseudomonas aeruginosa BL04
MFMWSKGDLNPEQEAAILQPGSAFLIACPGSGKTRTLTYKIAYELSRLESNKQFVVAITYTHRAADEIHERIESLGVDTSRLWIGTIHSFCLEWILKPYGIYHEALGRGFRVIDQHEREKILEALCKPYQKPKITFWDCEFYFTEAGYVLSCPQAWKHNGLHEILGRYFEVLRENRQIDFELILFYAYQLISRRPAISTLLGQLFSFLLVDEYQDTKRIQYSIITAILKAGQGATKAFIVGDPNQAIYQSLGGYPIAFGDFKAMAGIDIEERELSRNYRSSERIIDYFGNFNVHATRIEAASVDKTYQSLVSFDETVSKTDLEAELIRLIRFNIESIGIAPHEVCVLAPQWTHLASMTRRLVASMPEYSFDGPGMVPFARDTENFWYRLSKIALTQASPAMYVRRLRWAGDILNDLEAAGASVSKFTRKSLLRECNAIKIDETDGLTYLRTFFEMLFANLAIDFRLFSLLQEHHTAFFGSSQARIDRLKSEGSEFIGDIETFRKVFQSRTGITISTIHGVKGAEFDAVIAYALLEDMVPHFNDPNGQESAMKLLYVIGSRARKNLHLISERGRIRQYTGEEYQATRQLVSCKFSYDQAK

SEQ ID NO: 64600 - protein, 778 aa, Pseudomonas aeruginosa BL02; identical to SEQ ID NO: 64580

SEQ ID NO: 64601 - protein, 625 aa, Pseudomonas aeruginosa BL02; identical to SEQ ID NO: 64581

SEQ ID NO: 64602 - protein, 807 aa, Pseudomonas aeruginosa BWHPSA027; identical to SEQ ID NO: 62542

SEQ ID NO: 64603 - protein, 643 aa, Pseudomonas aeruginosa BWHPSA027; identical to SEQ ID NO: 62543

SEQ ID NO: 64604 - protein, 712 aa, Pseudomonas aeruginosa BWHPSA025
MYISKLSLINYRNFSNTKLLFNKGTNTIIGENGSGKTNLFRAIRLLLDDNMLRSAYRLDKTDFHRGLGRWQGHWIIISLEFEEISADEAVQALFRHGAGLIDEEATGKATYNLVFRPKKEIRLRLSQLAEGDHAGLDAILNPVTIEDYETIFTGRSEADFNDEAFYKEVVGDFENAKFNEETEFRCIGAKIPSVLSVSKEISFTFVQALRDVVAEFHNNRTNPLLTLLKGKSGDIDPVLFAAITDRVKNLNDSIEALPDVQYVRTDIRGTIKDAAGEAYSPSSLSIKSDLPDEADKLFQSLKLFIGESGEDHEGPIHDLSLGGANLIFLTLKLLEFKYRKARQSIANFLLIEEPEAHIHTHIQKTLFDRLNYDDTQIIYSTHSTHISEVSNVQNVNILGRDEGRCEAYQPATGLGTEEIGNIQRYLDAVRSNLLFAKSVILVEGDAEEILIPILVKNVLGVSLDELGISLINIRSTGFQNVAVLFHDDRIRKRCSIVTDLDKSIIDTAPEAGDSDAVLRRKNKYQASQEKGLVRKAQLEALCNENPWISPFFAPHTFEVDFVTAGNAHKVIAVLPDVYKDAPTIARAKGNLESADITQYGQRILTMADSQGKGWFAILLGKKVDPQTAIPRYILDAIAFAHPVVKREVWFNVLSYRLRHIEKEGLFTAPEVFAEFRAKLQAFKDGGIDFVDIKNEMFVQFTDDRINDVLEVF

SEQ ID NO: 64605 - protein, 598 aa, Pseudomonas aeruginosa BWHPSA025
MFTWDEGDLNPEQEAAIREPGSVFLIACPGSGKTRTLTYKIAHELSKLESSKKFIVAITYTHRAADEIHERIESLGVDTSQLWIGTIHSFCLEWILKPYGIYHEALDRGFRVIDLHEREKVLDNLCKPYQKPRITFWDCEFYFTEAGYVISCPQDWKHAGLNEILGQYFDYLRETRQIDFELILYYSYQLIATHPSISTILGQLFSFVMVDEYQDTKRIQYSIIASILKAGQGTKAFIVGDPNQAIYESLGGYPIAFDEFQSMADIELKKLDLSKNYRSSERIITYFGNYNVYNTRIEAASNDKAYPSLISFNDSVTKDGLEAELIRLIRFNVETIGIAPHEVCILAPQWMHLASMTRRLVASMPEYAFDGPGMVPFARDPDNFWYKLSRIALTQASPGMYVRRLRWAGEVLHDLEGAGASVSLLTRKSLLRECNAITVDETDGLSYLQAFFDALFSSLAIDFRAFVLLREHYEAFFESSQARIDKLKKEGTEMIGDIATFRKVFQSRTGITISTIHGIKGAEFDAVIAYALLENMLPNRNDPNGQDSAMKLLYVIGSRARKNLHLISERQRIDKFARAEYQATQKLVECRFGYDLIP

SEQ ID NO: 64606 - protein, 712 aa, Pseudomonas aeruginosa BWHPSA024
MHISKLTLVNYRNFKNTTLQFHKGVNTIIGENGSGKSNILRAIRLLLDDTMVRAAYRLDESDFSRSLGQWQGHWIIISMEFEEISTDESVQALFLHGTATLEDTPLRKATYNLIFRPKKEIRLKLADLDLFDADQLAEIRDTITIDDYETIFTGRSWVDFSDPDVYKAFVGDFDLCCFNSETEFPDIGSKVPGFLSVTKEVSLTFIQALRDVVAEFHNNRTNPLLTLLKSKSGEINPATMQPITELVRELNTSIEDLDDVQSVRNHIRETIKDAAGETYSPASLSIKSDLPEDADKLFQSLRLFVGESEEGYEGAIHELSLGGANLIYLTLKLLEFKYQREKLAMANFLLIEEPEAHIHTHIQKTLFDRIAYSDAQIIYTTHSTHISEVSNVSNVNILGRHGSFCEAYQPAAGLEPVQVTSIQRYLDAVRSNLLFAKSVILVEGDVEEILIPILIKQVLGLSVDELGISVINIRSTGFKNVAVLFHDLRIRKRCAIVTDLDQAFFDITPLPTDAPPTVAKKAKAAGSQRSGLERKADLDGFITGNPWLAAFYAKHTFEVEFVSAGNHEAVVQTVPKVYTDDATIKQAKAELQSGELGQMGSRTLTMAKQEGKGWFAILLAEYLTTQIQIPAYILQAIHFAHGPFSHSLIGRILQHRAECLFSSWPSFATQKKDFLLEVERFQRNEINLQALKTAALLMIPGDAINDFLAEMT

SEQ ID NO: 64607 - protein, 593 aa, Pseudomonas aeruginosa BWHPSA024
MFTWDPQDLNSEQSAAVVEPSSVFLIACPGSGKTRTLTYKIAYELSRRTDKRIVVAITYTHRAADEIQERIEDLGIDTSGLWIGTIHAFCLEWIIKPYGIYSPALAHGYRVIDTHDRELLLGRLCEPYRGVTHWDCDYYVTEAGYHLGCPDTRKHDAIHKVLAEYFKELTASRQIDFEQILWHAHTLMRDQVHIAVLLSRVFSHVLVDEYQDTKKIQYSLVTSILRAGRGQTKAFIVGDPNQAIYGSLGGYAMPVADFRAQAGIPIKEMALSRNYRSSERIISYFSNFNVHATSIKSAGKHAAFPSLVTYNQEVAHSDVHDELVRLIQLSLAAGNSPENICVLGPWWILLASTTRKLVTMLPDQQFDGPGLVPFSNDPDNFWFKVSKILLTESSPNLLARRMRWANDVIKDLDDFGVDTTRLTPRMLLRECNALEIDESDGLRYLNQAFTDLFERLNIPQESFLPLPSLREAFFRSSAARIERLQSAGASYINQVSFFKKVFRERTGITVSTIHGVKGAEFDVVIAFGLLEGMVPHFNEANGHVAASKLLYVLSSRARKHLHLISETGRPRGRYGVYSPTESLAACHFIYDSN

SEQ ID NO: 64608 - protein, 778 aa, Pseudomonas aeruginosa BWHPSA023; identical to SEQ ID NO: 64580

SEQ ID NO: 64609 - protein, 625 aa, Pseudomonas aeruginosa BWHPSA023; identical to SEQ ID NO: 64581

SEQ ID NO: 64610 - protein, 626 aa, Pseudomonas aeruginosa BWHPSA018
MYLAELTIKNFRKLREATLKFQPGLNVLVGPNNVGKSAVVDALRTLLAGHDEPYPRLDVSDRHRPAEGDPAGDITFHFVFRDLSHDDEADFIAALKPAADKTMEAHIHIHYTDADPTGRFRVKRWCGDHQDVALTSDMMENLRGVYLQPLRDAAQGLRPSRNSQLARLLHLLTDEAGRDAINEALKELDEKLQQTEAIQNTHTAISSRHGLMMGDQLAQTLAVGLSATDFQRLSARLSLTAQSMEIEQNGLGFNNLIFMAVVLSELAKNPDAAYRSLIVEEPEAHLHPQLQRVLLRYLAGVPTSEGEKAVQLFVTSHSPNFASNSKLESLVCLVENDAGVETFFPRDIKFGKGKREKLERYLDVTRAELFFARRVIFVEGAAELMLVDALAKLMGLDLREFGVSLISVEGLNFDSFLPLFGENGLRIPVAVVTDADPFEEEEAQDPTERPLDVGDIEDILAEAAYLEETDAPDAEDPLAEPAKKKKKLKRKEVYPSLGDEVRLSSNTLKMKELEDAFVKVFHGLKTLEYDLALLEANRDPMLKALADPHPIISAALRKIVEVQPDNTAKAKTLFCGMFERKASSGNLQKGRFAQALAEQIASTPTCEVPDYLRKAIEHVCQGVIKP

SEQ ID NO: 64611 - protein, 572 aa, Pseudomonas aeruginosa BWHPSA018
MKLSDEQKDIINAPLEPIAVTACAGSGKTATAIRRLIAVRQKMENSRGRVVLLSFSNVAVNTFNKGYAQLASNLPDDANRKRVEVDTLDGFFTQHVLRPHAYRTMSSGQAAYLVSGTEPFLANFKYWPEEGRPTSIKDVKVGLEHGNFYFFTGTHDDLVRLDTAKASDTIKRLGRIGAYTHELGRYWVYRTLIGQPAVLRALAVRYPQILVDEAQDLGTVHQAILELLIKAGVQVSLIGDVNQGIYGFAGADGSFLSTYYNRAGVNNYKLTRNYRSLPPIISIANSLCGREDEADREPENGGAYFVGYNDSELPKLFESFKAQIDDLGMQYQDAVILSRGSDRAVVLSGKAAPPGQGTVALFTEAALLRDQQGRYQECFKLVCRAVVGLMEQPPHGLSTHLQGSPQDVSLLGLRRLLWSFIRNAEAGLPSSTLLAKTEWHPKLLTNIKKLLATTEGLYGLKAADKLGNKLAKTGLLDLPLTGAVEEKDRSPGIRVETIHQVKGESIGAVLYVAKKPNVDALLAGTLTEEGRIGYVAVTRARNLFWLAVPHTCLKALRPNLIAAGFEEFPARR

SEQ ID NO: 64612 - protein, 568 aa, Pseudomonas aeruginosa BWHPSA017; identical to SEQ ID NO: 64584

SEQ ID NO: 64613 - protein, 546 aa, Pseudomonas aeruginosa BWHPSA017; identical to SEQ ID NO: 64585

SEQ ID NO: 64614 - protein, 647 aa, Pseudomonas aeruginosa BWHPSA009
MKIQRITAQNFRMLKNSKLDLQSSLSLLIGRNNSGKTSLLILFEKFYSNNCNFTFDDFPLDHRNELLNITESTDENSLAIRMLLEIEYSETDDLNHLSHFILDLDDTSNSIKILFECTIDKKTLLKDLEESSAEKSRYIRKYIGDYLRTHIYALDNEESIFDSREKLVPRELKKVKELINFEIIHAKRDVASSEGGKKILSKLTTQYFNKKNSEPSLFDPINDLIIDMDESLEQAYMTFFEKFLESSKNFLTIDNIKVISNLESNEILENSSQVVYGANQSFLPETFNGLGHMNILYLLLTIEIKKESFIKNHRQINLLFIEEPEAHTHPQMQYIFSNKIKSLLAEIENLQTVITTHSSHIVSQCDFKDIRYFKCANSQVEIINFHSELKLKHSNDLDSFNFIEQYLTLGSCELFFASKVIFIEGISERILWPYFVDAFDAKNKGTANYTPISSQNITILEAGANAKAFQPFLELLEIKTLIITDIDTTRYEKTNDEKKGVYVACPVLHGTHTSNATIKYYLSAPEHKEEDKFKEWFEKFINNEIKEKNSFIKVCYQKSEEGYHGRSFEDAFYNLNKETIKKYIENLSGTQNIDKIETYSDPYETIEKIVSKKSTFASSLLYLALTNHEINWKTPQYIKDGLEWISQ

SEQ ID NO: 64615 - protein, 660 aa, Pseudomonas aeruginosa BWHPSA009
MTPYDEIQVAIESKTNFVLQGGAGSGKTETLKVTLEYISTHAPTKRVACITHTNLAAEEIASRVTGEHYIGTIHSFLASLIKDYKKNIKEIIDILFILKKTYEYKKTEGEAAHKSYKKAYEKYQTRLYSLKKEKIDKCIDKRQFDKDPDNYTHELNAKIDDLNLYIRKRIESTPTQAINYNESPFDSLDDLSYGHDGLIQLSAELIKRHRKLRRILSDRYDYIFIDEYQDTSPIIIDSLLTKFGERSPVFGLFGDSMQGIYEDGIGDVNEYIKKAILRKIKKPDNYRCSEQVIRFINRFRTDDLQQELALKKVEGNLESVENRQGLTKLFYIVIDNKPHSRSSAEEKSSYINTIHSLIETAKGEMVGPFRILMLTNKAIAEKAGFGKLYEIFSNRFGRNLKDQLEKTLNTLQFNEIFNLIKNKEDNKTWATIENIKKSGYRLDSAASKKTLSASIKKLTDPMLSANEAISNLLSLRILSEAPSRARFITNSNIFLESLNKNSKYQDFKLLYTKGHNTFAKIQKENFDIDEYEFNELEKDLTKEIFIQSLLADSLKLSEIVNYFRYLNEESEYITIHKTKGTGIKNTIVVFEEFFWQDYKFNEIFTEKHFPEISPTSKKILYVATSRTISNLYCIRAISSSEKEDIGKFFDVSQEITIDQI

SEQ ID NO: 64616 - protein, 634 aa, Pseudomonas aeruginosa BWHPSA006; identical to SEQ ID NO: 63582

SEQ ID NO: 64617 - protein, 516 aa, Pseudomonas aeruginosa BWHPSA006; identical to SEQ ID NO: 64587

SEQ ID NO: 64618 - protein, 712 aa, Pseudomonas aeruginosa BWHPSA005; identical to SEQ ID NO: 64606

SEQ ID NO: 64619 - protein, 593 aa, Pseudomonas aeruginosa BWHPSA005; identical to SEQ ID NO: 64607

SEQ ID NO: 64620 - protein, 568 aa, Pseudomonas aeruginosa BWHPSA003; identical to SEQ ID NO: 64584

SEQ ID NO: 64621 - protein, 546 aa, Pseudomonas aeruginosa BWHPSA003; identical to SEQ ID NO: 64585

SEQ ID NO: 64622 - protein, 612 aa, Pseudomonas aeruginosa 6077
MRVARIEIENFRGIKQAKLLFPKHGVLIGDNNTGKTTILEALDLVLGPDRLNRQPAIDEHDFFGGIYAQMPDAPPENGGADGAAPPEPGEEVAEDSAPDSAPKIVIEATIADLTDEQKGKFGDYIEFWDSAVDKFYEAPNPAGVDAASITEALRVTFHGWYDKEEDDFEGATYFTRSLTEGDKPDPFSRKHKQLCGFLYLRSIRTGSRALSLERGSLLDIILRLKEVRPQMWEATLTTLSNIVVASDPALGISPVLESINTALKKYVPKEWGVEPHLKVSNLTREHLRKVITAFIATGDGMHAAPFYRQGTGTINMLVLAMLSQIAESKQNVIFAMEEPETAIPPYAQKRIIHEVRKLASQALFTSHSPYVLEEFETDETVVLARDASGRMGQRAIALPDNVKPKRYRQEFRTRFCEGLLARRVLLAEGPTEYSAFPVVCRRLAETNPKSYLSLEALGICTVDADGEKNVPGMAQLYKALGKRTFAICDKQEEANKALIEAQVELLLMHDEKGFEDLVLKGTTEEALKRFAKQLDWPTHLAQKYPDPEAQAEAALRDYFFWSKGNWGTADFLAQCSEEEIPEWLRDAALKLKAACTPAHAEADAEAGADGTD

SEQ ID NO: 64623 - protein, 604 aa, Pseudomonas aeruginosa 6077
MELTEGQLNVMESDGHLLVTGGPGSGKTTISIIKASQIAEQHVRPGQKILFLSFARATVSRVVEAIEYEQKIPAATKNFIDVDTYHAFFWRTLKTHGYLIGLPRRLGILTPPNEAIALSGVRSGFPARNLTDEQKEAKKAAEAAERIRLATNEGRICFDLFAPYVGDILHGSERIRRLIATMYPVIILDEFQDTNGAQWRVVQALGKSCRLIALADPEQRIYDWIGADPARLDHFRDAFAPTAVDLSTDNHRSAGTEIAIFGNDLLTGEFRQQEYKGVSFDVFDPFSGPAMTKLVTTIYAARQRLMTQGIDNWSLAILVPTKKLTRLVSDALRHPPAGMTEVFHTATIEMEAAILGAEVIGLLMQPSGDSRHFAQFIDLLCNYFQGKDGSEPTQGALKEAASIRGAYEELLASRANGKAIRRNSILVNVLTVYDQVRALVLTGDPDKDWRAVRRVLEDGACKRLKEIAEEVRNIRLLDRGTQLRQQLSQDWRDNGYRNALAIIRQAFVQEHFSTSAKPESGVVVMNMHKAKGKQFDEVIIFEGWPKRAKGKIVANTDRIVRFNSRDQINDQARQNFRVSVTRGRRQTTILTPKGDPCVLLVGEA

SEQ ID NO: 64624 - protein, 634 aa, Pseudomonas aeruginosa 6077; identical to SEQ ID NO: 63582

SEQ ID NO: 64625 - protein, 516 aa, Pseudomonas aeruginosa 6077; identical to SEQ ID NO: 64587

SEQ ID NO: 64626 - protein, 634 aa, Pseudomonas aeruginosa U2504; identical to SEQ ID NO: 63582

SEQ ID NO: 64627 - protein, 516 aa, Pseudomonas aeruginosa U2504; identical to SEQ ID NO: 64587

SEQ ID NO: 64628 - protein, 634 aa, Pseudomonas aeruginosa JJ692; identical to SEQ ID NO: 63582

SEQ ID NO: 64629 - protein, 516 aa, Pseudomonas aeruginosa JJ692; identical to SEQ ID NO: 64587

SEQ ID NO: 64630 - protein, 594 aa, Pseudomonas aeruginosa CF18; identical to SEQ ID NO: 62698

SEQ ID NO: 64631 - protein, 604 aa, Pseudomonas aeruginosa CF18
MPSRNVGTAYLAQAAELAGNPGQLAAYNSQGHCVVLAGPGSGKTKTLVLKLARILAEDVEAPRGVACITYSQECARELARRIENLGLQQAPNLFIGTVHGFCLRHLLMPYGRLAGLPISFPLSVATQRVSDRLLKQTGDALFGQNHPYKVIDLGRHRRSVLNRNSVAWRSEEELAAWAEAYEAALRDEGLIDYDDMVVFGQRLIAEHDWVLPLVQAKFPVLAVDEYQDLGVALHRIVKRLAFDGGVRLFAVGDADQSIYGFTGADGALLMELAARRDIEPVQLQLNYRSGAGIVTASEMALGEARGYQASDPARQTTIEFVLRPGGMADQAAHAVAQIIPAALASKPGRTLGDIAILYKDYRAGDIVAEAVATGGLDHIRVDTAAPYRKVALTSWVEDCAAWCAGGWRVGRPQLRGLLDRYRAFHRASLDDSQAKREEQELTALLWELRADQQPAREFVASLRNGVVDHLLAAELALADQKEQLDRMTAALAEGGALASLDITSLGGRDGSPDHLNLLTLHSAKGCEYDVVIMVGLDLGNLPWRNETPEKLRESRRLFYVGLTRARDEVHMLYSGFVDGRYGPMRFGRSPFLDELEARMRAAGI

SEQ ID NO: 64632 - protein, 647 aa, Pseudomonas aeruginosa 62; identical to SEQ ID NO: 64614

SEQ ID NO: 64633 - protein, 660 aa, Pseudomonas aeruginosa 62; identical to SEQ ID NO: 64615

SEQ ID NO: 64634 - protein, 704 aa, Pseudomonas aeruginosa PAO1-VE2; identical to SEQ ID NO: 63366

SEQ ID NO: 64635 - protein, 142 aa, Pseudomonas aeruginosa PAO1-VE2; identical to SEQ ID NO: 63365

SEQ ID NO: 64636 - protein, 704 aa, Pseudomonas aeruginosa PAO1-VE13; identical to SEQ ID NO: 63366

SEQ ID NO: 64637 - protein, 142 aa, Pseudomonas aeruginosa PAO1-VE13; identical to SEQ ID NO: 63365

SEQ ID NO: 64638 - protein, 694 aa, Klebsiella pneumoniae 909957
MRIEKVKVEGFRLLQDVEIMLEDSSTVVVGRNNSGKTSLTDIFDRFIGQSGARFRLEDFSAASRTKFFEAKNLRESGAKPEDVLAAFPMIALTLTFAYDAAAPNLGPLAPFVIDLDVTCTKALVRVEYKPILETLPILFDIAAPAEGVDKNAHFLRSLRDTIPKAYSINVSAIDPTDQTNRRVFEGVSALSALVQCNFVRAQRTLDHASQGDADVIGKLLSTLFKTASAPTAAAADQELAAKLKTSVEEIERGVQGDFDAMLKKLLPTMEVLGFPSLNDAELRPETSLNVEALLSDHTRVVYAGADGVHLPEGYNGLGTRNLIYMLLQLESYHKIYRAKPTRPVTHLIFIEEPEAHLHPQMQEVFINQLNIAIKKLSATYPHEPTWKVQFLITTHSPHVANAASFEAVRYFLNEAPKTPNARRTKVKDFKKGMANISADDQDFLHQYMTLTKCDLYFADKAIMVEGTTERLLMPRLCCLVDKSLDDKHKLARQYVTCVEVGGAYSHIFYPLLDILELKTLVVTDLDSTKPIEKENKKGKVITTWEKCPVAEGQRTSNAAIKDWFRPPNTKDADGWQISPGELLVKSAKEKISGCRRIAYQIPEVPEAASCARSYEDALVLANPDRFEWPKEQDEATEAWDIAKGLAKADTALRFAIREKEWKVPRYIEEGLVWLSEPPPPPEQALEVKNALVVA

SEQ ID NO: 64639 - protein, 577 aa, Klebsiella pneumoniae 909957
MTGQVKNPALEAAQQAQTKINEALDAGRSFRLEAGAGAGKTYSLVTAIKRLIAERGPALVQSRQKVACITFTEVARNEIAQEIEEHPAILVDTIHGFSWAFLRQFQKALRDSLAEMEERKEKIEKGGGVDIKPVVYDFGFFGVDADKITLSHDDIPELMAKLLYQEKFRRILSQQFPVIFIDEYQDTHRQFMESITDNFLRSATGPLVGLFGDHWQTIYRSEYELAQYPIEEIAKGSNFRSVPAIVDVLNNLRPELQQSVHDPEAKGEARFFHTNSYRGDRTSDRHSKGDLPPDLARKSREALTQRLQAEGWEMSKTKVLMLTHNVLAAEQGYPNIAEIFSGRTDLFAKKEDPTIKFFAEVVEPMCAAYASSRYGEMFKLLGSGPAIVKHEDKANWRRDMDALQKLRAEGTIGQVVDFLRSTKRPSPPDRVLRREDELKALDGTPIPKESSSLQRYSKLRDVPYWEVIEVVKFIEKQTSFATQHSVKGAEFENVLVVLGGGWNHYNWPQLLELINTKALNAKNTKGFYRARNLFYVSISRPMTRLAVLATQTLPAPALQAVNHLFGAGNVEELKVMT

SEQ ID NO: 64640 - protein, 729 aa, Staphylococcus aureus subsp. aureus Z172; identical to SEQ ID NO: 62500

SEQ ID NO: 64641 - protein, 597 aa, Staphylococcus aureus subsp. aureus Z172; identical to SEQ ID NO: 62501

SEQ ID NO: 64642 - protein, 702 aa, Acinetobacter gyllenbergii NIPH 230; identical to SEQ ID NO: 64042

SEQ ID NO: 64643 - protein, 534 aa, Acinetobacter gyllenbergii NIPH 230
MSEILNNPAIIAAQVAEAKINAAIKEGRSFRLEAGAGAGKTFSLVHALKSIIKERGTSLMQAGKKVACITYTEVARNEIAQEIEDHPAILVDTIHGFSWAFMRQFQKAIREILIEDHLRKEKVEQGGGIGSKSVEYELGFFGVNDQKITLSHDDIPMMMAKLLSKEKFRQIFSNQFPVVFIDEYQDTNRQFMEAITEYFLKPKVGPLFGLFGDHWQTIYGNEYGLAEYPIEEIAKGSNFRSVPAIVNILNNLRPDLPQAVSLPDAKGEARFFHTNSYRGTRTNERHSKEDLPIDIARSTRASLIQRLKNEGWDIEKTKILMLSHNVLASEQGYPQLIKVFEGRNDQFAKKEDPVIKFFAEIVEPMSANYGLSNYGEMFKIFGSKPAITKHEDKSCWRRDMDQLLKLRQEGTIGQVIDHLKHTKRPSPPDRVLRRDDELISFRNSPDTEMSSKLLRYNKLREIPYKEVIEVTKFIEKQTPFATQHSVKGAEFENVLVILGGGWNNYKWPQLFELLETKKLTTANFDGFGTVLNFV

SEQ ID NO: 64644 - protein, 770 aa, Acinetobacter gyllenbergii NIPH 230
MHLHSYRLKNFRRLKDTHIELADDISIFVGSNNSGKTSATQAIQSFIMGGKDRFSLYDFSSSCWRLFDEAGGVNLSEPVTGGFSLPSIELDLWFEVAASDLYLVIPLLPSTAWEGTKVGIRVSLAARNPVNLIQNYQEVKTKGTQQVAELPPGSQYAPWPRSLTDYLQRELRSEYELRYFILDRTQFDESFQEIGDYIPEELGGEPGGGTILKSLIHIDSLGAQRHLADPNPEAGGRSEDLSKRLSRFYKRNLNQRQEDHTALKALFESEQALNIHLDGVFKPMLDRLAKLGYPGINNPRLKIMSALDPAHVMSQDARVHYQIGDGEEATTLPDSYNGLGFKNLIYMVVEILDAQARWVMMDNRPPLHLIFVEEPEAHLHAQLQQAFIRNVLELLHIEDDDDSIFGSQMVITTHSPHILYERGFKPIRYFRRKKIGNEQMTEVINLSAFYQTQPDDRDFLERYLKLTHCDLFFSDAAILVEGNVERLLLPIMIQKTAKTLRSACLCILEVGGAFGHRFQSLIEFLGLTTLIVTDIDSVALVVPESVTEDDDEEVEEFEVPVDGIVGVTVKAQNNGQNPVGGREGTHSQRKYGKACLPSELGAATSNQTLIKWLPGKLTIDDLHNASEQEKIHELEDGAKVRVAYQTERAVTWNGTTENLCGRTLEEDFGLENAEWSQATARKPLGLIVQGGAVDPKELARGLHKKVSRKSFDKTKFALALLTENEAQWNVPKYIQDGLVWLRDEVRIELETVLPEIVHNAEAVVIGEQHE

SEQ ID NO: 64645 - protein, 643 aa, Acinetobacter gyllenbergii NIPH 230
MSSRASKPDTQADLDLRTCLSEIPPRSFIMKAGAGSGKTTSLIKGLSSAIQIHGERLRKSRQRIACITYTEIAAGEIWRDVSNDPMVHVSTIHSFMWLLAKPFQKDIRIWVSGRIAEKIEALEHKQATYGPRVQQRTKDKDTRDLERLHRQSGRISAVKGFRYGTGSDYIKGILGHDDILRLVPYLIAERPLFRTLLAHQFPFVFVDESQDTTAEVIEALKIVEREPGISICLGFFGDPMQRIYATGSGLVEAAQNWADIPKPENFRCSAKVLNLANAIRRDGDDLVQVSGERLGPEGIVSIPEGSAHLFILPADDRRDANLVRVRDWMAAQTDDIHWRLNEHDQVKLLVIVHQMAAKRLGFGELFTALNSKAPTAFKDGFLDGSAWPLTPFVKFLIPIAVAHRQDQQLEVMRLIRQYSPLLEKDTLVGVNVAERLKILGELVVSIAEGIAGNSNVTIGELLKQVYATGLLILDHRLASYLDPEAPLPASPVEEVGDDNEQEDDDSEKEIASMDAFLACPAKQLLPYQTYISERSPFWTQQGIKGAEFDRVLVVLDDAESTHFQFSYEKYLGLKELSDTDRRNIEAGEETTVDRTRRLFYVSCTRALKDLAVVLYTTDPRQAEAHIRTLQLFEDDAIHTDLIF

SEQ ID NO: 64646 - protein, 690 aa, Escherichia coli 908519; identical to SEQ ID NO: 62940

SEQ ID NO: 64647 - protein, 577 aa, Escherichia coli 908519
MSEIHSPAEAASQRALESMYACLSEGRSFRLEAGAGAGKTYSLIKALRFLIERNKDLFEKRSQQIACITFTNVAKDEIVARTDRSPIVFCDTNHAFCWSLISSFQKPLRELIETMPTWAEKLEEVGGSLGNRSIEYNLGHRSIRDHRITLHHDDVLSLTISLMEHEKFRRVIAERFPIILVDEYQDTDKNWIEAIKRHFLGQARAPLFGFFGDHWQKIYGGGCGKLEHQDVVEIGKEANFRSDKIIVDALNRMRPELPQCVKDPEATGLVRVFHTNNWQGVRQKGVHWSGDLPLCEGQATLERVKTTLEQDGWVFSPNHTKILMLTHRLLANQQGYSNIVAAFKYNESFTKKEHEHIAFFVDKLEPACDAFTARKYGEMFNALSGITPLLRRHSDKVSWHNVMTQLIALRETGTIGDVIEFIRAQRKPRLPDKVEKFEQELLHFDRTADVEMPRRLKELEKLKNIPYSEVRSLRRYLDGYSPFETKHGVKGAEFENVLVVVGRGWNQYNFGEMLEFAGAQTIPVDKQDSFERNRNLFYVACSRPQKRLAILFNQALSPAALTTLGNWFGAETIIPAP

SEQ ID NO: 64648 - protein, 710 aa, Klebsiella pneumoniae BIDMC 25
MFIKTLSVRNFRNFKAASLSFKKECVNTIVGENSSGKTNVFEAMRLILDDTLPYYKRYLVENDFHRGLGTAFGHWVIISLEFDEIGGDEESELLCQLNTTVNGGGTGRITYIYRPQLYIREQLFNLNDIEDVDARRSAYNILKEQYSIDKTTYESLVLCQGTADFSDDGLYSHVVGDFNDYLFPDPKLERIDLIGNRQRGYNIQDNISCTYARALRDVVSELKNNRFNPFQKLLEYVSKGIDNDDALSENIKNVNNRISSIEEVKRLSEGILLSITNAVGTTYSPVLNVTSELPCELKELVKVLQLKAGDSLCEGYVSELSEMSLGGANLIYLALKLYEYEEGISKNLLANFLIIEEPEAHIHTHIQKSLFSNLKNNKTQVFISTHSTHISSVSNISTTNVLVKNGLETISCSPSNGLEKERINRIERFLDAIRTDILFAKNVILIEGDAEEILIPHLVKNSFGITLDELGISLISVRGTGFELLSSLFHSDRIKKKCAILTDDDINLYGDNKPDYLSQDDYNKAVKSAESGVARKVILDEIVRNNVFIRAYFSKYTFEIDLVLSGAVRYFDAIAAESFEKRAYYTPYQEAFQSSDRQKIGCYALKLANKHKKGWFAMMLVDKLDADFPISKALCQSLGFTGDFNKFTLAKMVRYRSEVIKNRDGSDLLNNILGQDDLSFIIDNIDAALDIFKTHYPNDPLTSLLEVHHG

SEQ ID NO: 64649 - protein, 558 aa, Klebsiella pneumoniae BIDMC 25
MDNQKRQLINIKDNLLVSACPGAGKTKLLIGMLEDNLYRNEGFRWHIVLTHTNAAADEISSRIDNLSIEVDRVWCGTIHSFLLEWVVKKYAGAISRLKDGFSLLSEYKQRKIIQSIESDKKLGVRIRYNCDEQGNAFVEPYCHSLDDKHKELLVIQEYNTFKQNNRLIDFDDIIKLGVEFLENNQNICEHLSKLIGNIYLDESQDTSLIQLKALSYITRYNRASVFIVGDNDQAIYQDLGVSIKDKYIIKSVLQLSELKHETLSGCYRSSELLVKYYKKYSSSRNDVTSLREFEGKPPIIKDISQDELPQRVFNLINQYQTKYNSVSGIAIIGPDKYYLMALINTLYDLSENFVYDFQSTNPLYCARNTVFYELISLVLLDVNVINYQRRSSLARKIVDSVPELSHLTPLQLKRDLKEFQSVKNNFILWLRELYDFLEMKYQKSIKLETDYKICNAAASVAKIRAGMGAISKMINKDKNVVSVSTIHGSKGEEYDYVISIGYHDQVVPHQSSFEKGNEYARDIANRLMYVAFSRAKDYMNIFIDDRRKVSPFFIREPD

SEQ ID NO: 64650 - protein, 653 aa, Klebsiella pneumoniae BIDMC 22
MKIEKIKLQNFRCFGHEVVELNFEEELTILVGGNGSGKTAVLQAVSRLFGTSSAQRSVQRRDFHIPLGRQELQSGDSLFVEAVLAFPELEEQDATPLDAVPEFFNQMAASGEGEPLKARIRLQATWTDDGTPEGAIEEDIRWIRALDDNFEWDDCSRIQAVERSSIQFIYLPANRDATTQVTALLKGRLWQAAKWSTAFRDASYVNAGQIQSSFEEEEPSKFLLERLSKRWQQVHEADTDSKPRLRLIENRFEELVRKAEFTFTPDEEGQERHLSELSDGQRSLFHIALTAATLETEREAFSLPADDSSFEQDKLRRIHLTILAIEEPENSLSTFFLSRIIKQAREIGALPSAQVLLSSHSPAILSRIEPEEVRYFRMDRSARRSSIRELTLPEDDVEASVYVRLAVKAYPELYFARFVILGEGDSERVVIPKIAEEMGVSLDPSFVPVVPLGGRFVAHFWRLLNDLEIPHATLLDLDLGRRHGGVNTMRSCLQNLADIGSNFGSANGANVAQLTDQQLYNEGLQGQWLQAFRREGVFFSYPIDLDFAMLHAFPTAYQVANPGGNGPQSSAVAIQAKKVSTLKTGGNPALYTAHYDDAFKWYPYLFLSRSKPETHLAAFSRIAEGGVAASAPVELRALIEYVTDKLNLSGESE

SEQ ID NO: 64651 - protein, 621 aa, Klebsiella pneumoniae BIDMC 22
MTRVSRDDWVPQGVGGLEGRAWEALRETDSSILVTAGAGAGKTEFLAQKASYLLQTGICPAPKRILAISFKKDAAQNLAERVAKRCPRDQARRFDSITFDAFTKGLLDRFRPALPEPFNAPGTYQIVNPFRRDYDDFIERHGYHGVSAQQLERRLLLTDLPIDLSNGSEVHRALADYWHEQFFGGDEISLSFPMINRLVKLLLQENSYIRRALQATYPIVFLDEYQDTTYAQYDMLLTAFDGSDAVFTAVGDDKQRIMGWAGAMNDAFDQFENDFAARRITLLSNWRSHVDLVRIQHEIARRIDDSVEEVQAQGTREIEGEVSAIWQFRSADDENNYLAEWVSGEVQSERVAPHDVAILIRMRADQVEGEIAPSFAARGLRIRNAARSVGEIQIQDLLGEELTCIFVPLLRLGATERSPENWEQTQQNYLFLEAADPDNDLTQERLLVKLEAFVRKLRTELAQRQPSPDSAEEIADMVLEFVGTPRLRQSFPAYQRARDFERVWSGFVTLLKECAEHSSSWTEALDEFEGIGQVALMTVHKSKGLEFHTMIFYGLDNQTWWSLTPQRGEELNTFFVAFTRAKQRAFFSQCVERGHAIGWIQQLLAPAGVETIDGTTILGTT

SEQ ID NO: 64652 - protein, 594 aa, Enterobacter cloacae UCICRE 5; identical to SEQ ID NO: 64492

SEQ ID NO: 64653 - protein, 605 aa, Enterobacter cloacae UCICRE 5; identical to SEQ ID NO: 64493

SEQ ID NO: 64654 - protein, 710 aa, Klebsiella pneumoniae UCICRE 4
MFIKTLSVRNFRNFKATSLSFKKECVNTIVGENSSGKTNVFEAMRLILDDTLPYYKRYLVENDFHRGLGTAFGHWVIISLEFDEIGGDEESELLCQLNTTVNGGGTGRITYIYRPQFYIREQLFNLNDIEDVDERIRAYNILKEQYSIDKTTYESLVLCQGTADFSDDGLYSHVVGDFNDFLFPDPKLERIDLIGNRQRGYNIQDNISCTYARALRDVVSELKNNRFNPFQKLLEYVSKGIDNDDALSENIKNVNDRISSIEEVKRLSEGILLSITNAVGTTYSPVLNVTSELPCELKELVKVLQLKAGDSLCEGYVSELSEMSLGGANLIYLALKLYEYEEGISKNLLANFLIIEEPEAHIHTHIQKSLFSNLKNNKTQVFISTHSTHISSVSNISTTNVLVKNGLETISCSPSNGLEKEKINRIERFLDAIRTDILFAKNVILIEGDAEEILIPHLVKNSFGITLDELGISLISVRGTGFELLSSLFHSDRIKKKCAILTDDDINLYGDNKPDYLSQDDYNKAVNSAESGVARKVILDEIVRNNAFIRAYFSKYTFEIDLVLSGAVRYFDAIAAESFEKKAYYTPYQEAFQSSDRQKIGCYALKLANKHKKGWFAMMLVDKLDADFPIPKALCQSLGFTGDFNKFTLAKMVRYRSEVIKNKDGSDLLNNILGQDDLAFIIDNIDAALDIFKAHYPNDPLTSLLEVHHG

SEQ ID NO: 64655 - protein, 558 aa, Klebsiella pneumoniae UCICRE 4
MDDQKRQLINIKDNLLVSACPGAGKTKLLIGMLEDNLYRNEGFRWHIVLTHTNAAADEISGRIDNLSIEVDRVWCGTIHSFLLEWVVKKYAGAISRLKDGFSLLSEYKQRKIIQSIESEKKLGVRIRYNCDEQGNAFVEPYCHSLDDKHKELLVIQEYNAFKENNRLIDFDDIIKLSVEFLENNQNICEHLSKLIGNIYLDESQDTSLIQLKALSYITRYNRVSVFIVGDNDQAIYQDLGVSIKDKDIIKSELQLSELKHETLSGCYRSSELLVKYYKKYSASRNDVTSLREFEGKSPIIKDISQDELPQRVFNLINQYQAKYNSVSGIAIIGPDKYYLMALINALYDLSENFVYDFQSTNPLYCARNTVFYELISLVVLDVNVINYQRRSSLARKIVDSVPELSHLTPLQLKRDLKEFQSVKNNFILWLRELYDFLEIKYQKSIKLETDYKICNAAASVAKIRAGMGAISKMINKDKNVVSVSTIHGSKGEEYDYVISIGYHDQVVPHQSSFEKGNEYARDIANRLMYVAFSRAKDYMNIFIDDRRKVSPFFIREPD

SEQ ID NO: 64656 - protein, 299 aa, Enterobacter cloacae UCICRE 3
MYLSKLGIRNFRNFEAADIPLAGNVVLLGENRVGKSNLLFAIRLVIDPTLPDSARQLKLSDFWDGCDLESNPQIEVHLEFADFDSDPSLSALLTDFRIAEDPAVARLSYIFRKKEEVDGAPRSGEDCEFIVFGGGQESRAIPGRVRRRISIDMLDALRDAEAQLASWRNSPLRPLLENAFSSLSRADLDRVATELQAATETMEKFPSIKDLEDSLRGGILDLAGTAHDLDVRLRFAPADPLRLMRSISMFIDDGKRGIIEASLGSANVALISLKLAEFAWRREKNERNFSLLCIEERLC

SEQ ID NO: 64657 - protein, 593 aa, Enterobacter cloacae UCICRE 3
MSDRRALSEALNELLPNREQYAAATYPGHCVVIAGPGSGKTKTLTTAMARALIEEVADPRGVACITYNNECVSELEGRLACFNVSGDERNFIGTVHSFALNQVLIPYSRCIPGLLPDDFRVATRDESRAAVEVAYQARFGSVGDPHARWKFAEEKRRRDVNRLLPAWRNNNPELADFIEGYEAELRRLGLIDFDDMPLIAFRIISEHEWVRNAIRSRYPVLFVDEYQDLGHALHELVLLLCFNGGIRLFAVGDADQSIYGFNGANPGLLDSLVSRADVRPFRLRFNYRSGAKIIRASLGALGEDRDYVGPDGNPEGELGFHGINGDYDAQAHFIAHDLIPSLFERGFHPERIGVLYRAAWLGDKVADEFKARNIAIIRADSNALIKRNSRLARFIEACSQWVTGGWKEASPLFNLLLGQALFLVYGRRASRAEEQLLTVQLITFLRNGIDKAESAHEWLRRLNDELITGWMAISQNTQQEWDVISELLKRTDPLRGLDVALDIFAGKVEGTGRITLSTLHSAKGREFDVAIMFGVNKYDFPSKRDLTSDNALREARRLFYVGVTRPRKELHMVYEKGKHSPWIAELYYRSQQT

SEQ ID NO: 64658 - protein, 712 aa, Klebsiella pneumoniae UCICRE 2
MYISKLTLVNYKNFKNTSLRFHKGVNTIIGENGSGKSNILRAIRLLLDDNMVRSAYRLEEGDFSRSLDQWQGHWIIISMEFDEITTDESVQALFLHGTAPLDDGPIHKATYNLIFRPKKDIRLKLAALELFDFKELSEIRDAITIDDYETLFTGRSSADFGNPAVYRSIVGDFDICDFSSETEFPEIGAKVPGFLSVTKEVSLTFIQALRDVVSEFHNNRTNPLLTLLKSKSGDINPLTMEPISEMVRGLNASIEGLEDVQSVRNHIRETIKDAAGETYSPASLSIKSDLPEEADKLFQSLRLFVGESEEGFEGAIHELSLGGANLIYLTLKLLEFKYQREKLAMANFLLIEEPEAHIHTHIQKTLFDRIAYSDAQIIYTTHSTHISEVSNVSNVNILGRHGAFCEAYQPARGLDPTQINSIQRYLDAVRSNLLFAKSVILVEGDVEEILIPILIKLVLGVSVDELGISVINIRSTGFKNVAVLFHDLRIKKRCAIITDLDKAFFNITVQATDNAIVAKIKAKAAGSQKAGLERQADLTEFTAENPWIETFYAKHTFEVDFVAAGNQEAIVQTIPKVYKDQGTREEAKQQLKSGDLQQMGSRTLTMARQEGKGWFALLLAEYLTPQVQIPEYIIQAIHFAHGKFPRSLIVRILQYRAEYRYGADVANLPAKQLFLQEINRFAQGDIGLAEFRITIGRLLPGDPIIVFLGKLQ

SEQ ID NO: 64659 - protein, 594 aa, Klebsiella pneumoniae UCICRE 2
MRFVLDPSDLNPEQAAAVTEPSSIFLIACPGSGKTRTLTYKIAYELSRRTDKRMVVAITYTHRAADEIQERIEDLGVDTSGLWIGTIHAFCLEWILKPYGIYSPELARGYRVIDPYDRERLLERLCAQYKGITHWDCDYYVTETGYQLGCVDTRKHPIIQNVLKEYFKELSSSRQIDFELILWYAYCLMRDRPPIAVLLSRVFSHILVDEYQDTKQIQYSILTSILRAGRGETKILIVGDPNQAIYGSLGGYAMPLDEFRAQAGIPIKEFALSLNYRSSERIISYFSNYSVHASKITGAGKDAKFPSRITYNQKVTRSNVHDEIVRLIRKSLDNGYSPENICVLAPQWVLLASTTRKLVAMLPDQQFDGPGLIPFSNNFDNFWFKVSKVLLTDSSPALLIRRLRWANEVIKDLDSFGVDTKTLTPRILLRESNALTVNELDGLRYLDQAFTELLKRLNISPEIHPALLTHREAFFSSSAARIERLQKEGATYINQISVFKKVFRERSGITVSTIHGVKGAEFDVVIAFGLLEGMVPHFNEVNGHVAASKLLYVLSSRARKNLHLISESERQRGRYSSYSATELLAACIFNYDEE

SEQ ID NO: 64660 - protein, 566 aa, Klebsiella oxytoca MGH 42
MEISSLKLKGFRNFKDAHINFNSNTLVIGANDVGKSNMLHSLRMLLDKSLSDSEIEPNEFDFHLDNGKSCEEFEIIIHFKDINEDAVLSILKGNVSDSGESFIKYIAQKSDLSYKLFIGESLESLQEINSRYYLKFVNLKYIQSQRDLERFIRKEKRQLLKIAQQSLNSEEREEDDDLLGEISLDLQSINDKISQLIYVERATRDVNDELKKLAHHYSEYSVQLDTGAIGINDFIDNLQLGANTNGSNVMLGGDGRNNQILLALWKAKSIKEHDIENEVIFYVIEEPEAHLHPHQQRKLADYLIAELPGQTIISSHSPQIAVNFEPGSVIRLLDRAGHTVAASEGCSKHISDGWEGMSYRMSILPAESFFSNGVFLIEGPSEVLFYHSLAENLNIDLDYLNISLVSVDGISFKIYVAILDALEIPWVMRTDNDISKLKDQDKWQYSGINRCLDIAGLEKFEHSDIQIVPIDTLTNGDWKTVSEEINKCGIYLSKIDLETDLVEELSAPILNALGKKNDQSAIEYLQKKKALRMRELLKDIKKDLHKLNAGELVKPLNHLVKIIRGE

SEQ ID NO: 64661 - protein, 541 aa, Klebsiella oxytoca MGH 42
MSTFSPTPQQTLAIDYTGSMVITACPGSGKTTVIKEKIRNITDGLPEHKGVIAITFTRKASSELERRCKADGHDVKNSFFGTIDSFCLNDIIIPFLSRIWGGTPRECKVLKKLESPFNHFIEKNFSGTPSITNINEDPGYKKLYDEGILWMGSFSALALKIINESSAAKRYIKARYSHIFIDEYQDSSLSQHELFLRINELGLCSIAVGDVWQSIYEFRGGNSKLLLELVSNTECFKHFEINFNHRCHPSISNYASRLLDPSYILLPADEIRIFRRRLNGNLKDAAVTISSWISGWLSSGEWKLEQANQIAILARKEKSLTLFCSGLNLNFRLYIDTPLDKIGTDCSDLYKDLLAYKYGSISTAQEFINKVFDGIIIDDNTQFLLRKKIKTIREELKDEDLIHKFHDIADILGISSTEHTDGAVIRTISDDILVKQFKPLDDSEIQVMTLHKSKGLEFKLVLHLDLDEWSFPYREYNSEDRYTPLYPTLQQELNLHYVGITRAENCCILINSSLRENASGEFKKTDESYFFKLPHLNSLYI

SEQ ID NO: 64662 - protein, 566 aa, Enterobacter cloacae 'Hoffmann cluster IV' MGH 34
MEISSLKLKGFRNFKDAYIKFNSNTLIIGANDVGKSNMLHSLRMLLDKSVSESEIEPNELDFHLEKGKSCEEFEIVIHFKDINEDAVLSILKGNVSDSGESFIKYVAQKSDLSYKLFIGDSLESLQEINSRYYLKFVNLKYIQSQRDLERFIRKEKRQLLKIAQQSLNSDEREEDDDLLGEISSDLHSINDKISQLIYVERATKEVNDELKKLAHHYSEYSVQLDTGAIGINDFIDNLQLGANTNGSNVMLGGDGRNNQILLALWKAKSIKEHDIGNEVIFYVIEEPEVHLHPHQQRKLADYLIAELPGQTIISSHSPQIAVNFEPDSIIRLLDREGHTVAASEGCSKGISDGWEDMSYRMSILPAESFFTNGVFLIEGPSEILFYHSLAKSLNIDLDYLNISLISVDGISFKIYAAILDALEIPWVMRTDNDISKLKGQEKWNFAGINRCLDIVGIEKFEHSDKKITSLDTLTNGDWQTVSEEINKSGVYLSKIDLETDLVEELSASILDALDKKDNQSAIEYLQKKKAIRMRMLLKKIKKDLHTLNSGDLAKPLDHLVKIVKGE

SEQ ID NO: 64663 - protein, 406 aa, Enterobacter cloacae 'Hoffmann cluster IV' MGH 34
MSVFSPTTQQILAIDYPKSMVITACPGSGKTTVIKEKIRNITACLPAHKGVIAITFTRKASSELERRCKAEGHDTKHSFFGTIDSFCLKEIIIPFLPRIWGGKPTECKVLKRLESPYKHYLKEEFIGTPSVVNVNEDSGYKKLYDEGMLWMSSFAALALKILNESPAATRYIKARYSHIFIDEYQDSSLSQHQLFLKINELGLCSIAVGDVWQSIYEFRGGNAELLLDLVRDKQVFAHFEINLNHRCHPSIINYASRLLDSNFVLLPSESINVYRKRLSGNLKDVSMTISSWISKWLNERRWGLEQANQVAIFARKEQSLLLLCSGLTSNFRVYIDTPLDKLGTECSDLYKDLLAYRYKAIGTAQELINKVFDGLIINDNHQFLLRKKIKTLRGKLTNEELINKFH

SEQ ID NO: 64664 - protein, 712 aa, Enterobacter cloacae 'Hoffmann cluster IV' MGH 34; identical to SEQ ID NO: 63712

SEQ ID NO: 64665 - protein, 599 aa, Enterobacter cloacae 'Hoffmann cluster IV' MGH 34; identical to SEQ ID NO: 63713

SEQ ID NO: 64666 - protein, 712 aa, Enterobacter sp. MGH 23
MHISKLTLVNYRNFKNTSLQFHKGVNTVIGENGSGKSNILRAIRLLLDDTMVRAAYRLDESDFSRSLGQWQGHWIIISMEFEEITADESVQALFLHGTASLDAGPIHKATYNLIFRPKKDIRLKLAALDIFDDEQLTEILEAITIDDYETIFTGRSWADFSNPSVYKKIVGDFDNCIFSSETEFPEIGAKVPGFLSVTKEVSLTFIQALRDVVSEFHNNRTNPLLTLLKSKSGEINPATMEPITEMVHELNASIEGLKDVQSVRNHIRETIKDAAGETYSPASLSIKSDLPEEADKLFQSLRLFVGESEEGYEGAIHELSLGGANLIYLTLKLLEFKYQREKLTMANFLLIEEPEAHIHTHIQKTLFDRIAYSDAQIIYTTHSTHISEVSNVKNINILGRHGAFCEAYQPARGLVPSQINSIQRYLDAVRSNLLFAKSVILVEGDVEEILIPILIKLVLGVSVDELGISVINIRSTGFKNVAVLFHNIRIKKRCAIITDLDQAFFDVTPLPTDTKGVAKAKAKAAGSQKAGLERQADLTEFTGDNPWLVTFYAKHTFEVDFVAAGNHEAVVQTITAVYKDEETRKEAKQQLQSGDLSQMGTRTLTMAKQEGKGWFALMLAEYLTPQVQIPAYIMQAIHFAHGTFPLPLLARILQHRAECRYGSDILNSQAKQAFLLVIERFVQRNIGLAELRREIGLMIPGDPINVFLAEMQ

SEQ ID NO: 64667 - protein, 593 aa, Enterobacter sp. MGH 23; identical to SEQ ID NO: 63819

SEQ ID NO: 64668 - protein, 712 aa, Klebsiella pneumoniae MGH 21; identical to SEQ ID NO: 64658

SEQ ID NO: 64669 - protein, 594 aa, Klebsiella pneumoniae MGH 21; identical to SEQ ID NO: 64659

SEQ ID NO: 64670 - protein, 684 aa, Lactobacillus helveticus CIRM-BIA 101
MFISSVEITNFRTFKEKQIIRFTEGINILVGPNNIGKTTIISAIRLIFDKNKFGLDINDFSKTETKEELKNCSPKITVSVNLQKSNKEGSDSDDLLAIRNWLTDIDNPYKAKITMQFQLPTKYEKAYLDAVKDLDDIGSVWLELEDEFLPKYQRKYFVGESAQPLMDNSLSRFNCQYLPAIRDAEKRMNSGNKYLLNKLLNFFIDYDLKSNEELKKSDIEKKMQKRHKDFHDLAVKLLNNLSPRFKEGKKEMLKYSSQTGATFDGEEPEFNSALNDHDILKEFSLVVKNGESNVPINLNGLGYNNLIYISLVLAELQQSRDNSYFGDNSSVFPFLLIEEPEAHLHPDMQYDFLKFLQNNIKDGTTSETAKQVIITTHSPNITAAASLDDLIVLSKYKSGVKIGYPGETFIDNPKDKKFVERFLDVTRSNLFFTNQLIFIEGLAEQMLIPQFMKADTSNIQNRHISIINLSGRYFIPFLRMFDTNKNPNTAIYKQIACLTDLDPVQGKQNKSCPPIFQAEPDNKNPNIESIKALKSANIKVFSQDEDSDYKSNEGWTFEYQLYMDNPDLMPLIFHDSMRYCDAWENLKQMSIENLSIEKISNTFQNERSKQIDGILKENHNTNDLSEITDSKLIKLYLGTMFLYSIKDKGLYAQELSEEISSGKSITVPKYIKKCFKWIADKNGL

SEQ ID NO: 64671 - protein, 408 aa, Lactobacillus helveticus CIRM-BIA 101; identical to SEQ ID NO: 62889

SEQ ID NO: 64672 - protein, 641 aa, Salmonella enterica; identical to SEQ ID NO: 62984
  subsp. enterica serovar Typhimurium str. DT104

SEQ ID NO: 64673 - protein, 546 aa, Salmonella enterica
  subsp. enterica serovar Typhimurium str. DT104
MPSDGLTLEPNALLAAKEQARCLALTAGPGAGKTEMLAQRADFLLRTGTCRYPKRILAISFKVDASKNLKERIQRRCGQELASRFDSYTFHAFAKRIIDRFRVVLTGNDALDTDYSIGERKVTRRQITFHDLVPLAIQILKASVVARNAIRQTYSDVFLDEFQDCTDQQYELVKVAFQSTSIRLTAVGDTKQKIMGWAGALDGIFQTFAKDFSAVPLNMYRNFRSKPRLLRMQNEIIRVLDPASVMPDHQLAGEEGEVFAWQFENAQGEAEYLADLIAGWIRNEKVPLSEIAVLVSKQLDLYANHLMTALEVRGIPYRNEQEMQDITVEPAARLVVDYLSCLYGQREPKAWVRLMNQLIPFADDEVQSSARQSFQRFFKEQRKIITMTELLDEPFSGWWDSVCSFLKKIGMETLVALSPDYESHARLGEVVRDTKARIEELLELTPDLPQALTRFSDDQAVRILTIHKSKGLEFDSTIIMAVENEIFFGDQDANRCAFFVGVSRAKRRLVVTYAKERDKPDNYSGIWRTNRSAQLEYFGYTSPFVK

SEQ ID NO: 64674 - protein, 789 aa, Burkholderia pseudomallei NCTC 13179
MDIPDVSAHSATTDPAPSSAPSAPAAPPAETVALAGDSPIRLACVEVCNFRRLAKTRLELDDATTILVGANNSGKTSLLTVLRNFLSDSPGFRAFDISLSQWAKLRQLSELWEALDEDPTTESKDAEKWEEQYRQLLGCMPFIDLWFDAKEGAYNYVAPFITSLKWRGGAVGVRVRLEPVADADELRKLAWRYREARSPVRKLPKDGHAWPMDLLDYWLRYSADLRRIAVYRLDPAKGPLATKPCSELQELPPGSQPVELQLLRKLVRVDFVPAQRGLGAEDDETRSEAASTRPGLFSSQLLKFARQHLNVAPSGHGNREDLVAAIARAQAELDDSIYKALQPAMEDVEVLGYPGLHDPQQLHFRTRIQTADLLAHSTAVQYRLDETTADESLPEHSIGLGYQNLQSLSFMLVSFRAARLNPPQGSPAAVHLVMVEEPEAHLHVQVQRNFSSNAHELIRPKELVHSNLRSQLLISTHSSHLAHGDSFTRLRYVKRIASTGAGVRPSSEVVNLGDAFGDDIQTRTFAERYFQVQHTDLLFADAAIFVEGTAERMLVPLFIERDFPKLAKKYVSFLDIGGSHAHRLRPLVERLGIPTAVITDLDPVVPTTNKGGRVVRAAVHIAGQADLECGNDTLTSWHPKLADFHAYGKPTPAHLEWVSDAGVKVRFAWQLPIAAASDQWPSSFEDALVLTNIDWFKALDEEKDSVSGKKKDHRGTLGKVIGLVLDHSDHTELLKELHAMLHGNFSKGDFAATLFERLNAGQALACPTYIADALAWLSGQLDVIAGDTA

SEQ ID NO: 64675 - protein, 651 aa, Burkholderia pseudomallei NCTC 13179
MSAAPESLGNDRDAHVVEEICGYITASPPRSFFLFAGAGSGKTRTLVEVLRRITGVVKHDAGDRYAARLRSRGQSVRVITYTNNATAVVNGRLGENYLTAVSTIHAFCWELIKGFDEDIRDALLARNAESLATAKAKALSKAKGESDRDREKYAEIEAKAEEIRKIDAFIYHPDSNTYGQGALSHTDVLHVTAWLIRERPTLQRILEDRHPLILIDESQDTMKSVLDALFELSMSRPGHITLGLLGDHRQRIYPDGHDDLPSHVPEDWARPALQMNHRSQQRIVDLINKIWDADIEGRTQPKTGVPQHSRTEKNGGTVRLFVGDTKTSTAEKIRRESDCALAMAAETSCAAWQDGTRGYKTLALEHKLAAKRGDFFDAYSAMDLLDKDAAMPKSNGERTGPAMVRPLLGPMLELAQCLQADGSLDEFAAVDVLRRHGTLANLPEASADRQAALDKLHAAVLKFAGVISMPEATVRDVLAPVLEGGIFDADLRLVQAYGDTSPPPPEPKPRSKEAKEDRRRRGWCALFSTPWQQIARYRAYLSGDAELATHQVVKGSEFKHVMVVMDDEEAGGSLFSYDKLFGAEELSSNDRENVDEGNETIIDRTLRLLYVTCSRAEESLALVLWAKNPAAALDAIKRSEWFAANEVSALE

SEQ ID NO: 64676 - protein, 603 aa, uncultured Thiohalocapsa sp. PB-PSB1
MASVNPTRVDSGLRLVEARIRNFRSLRAVDIRFDKLTVLIGENNSGKTSLLEALYAAIGAGRRVLTSDDLFLGIGEAKVPRERTIVIDLLFRPADPSGILDEFPEGSYWLELWGTGISQDADDNDFMAIRTKMAWNTGKAEYETKRQFLAEWSSAADLDSANTVPGAVATAQLEPIALYLLDAKRDIQDELQSRSSFWHKLISDPGLPEKTVTKIERILSKLNASIVDGSPVLSHVQTHLDDLYKTVSSGRGAVSVTPLARHLRDLSRGMDIGFSTKGAQTFPLVRHGMGTRSLAAVLTFRAYSQWRQMRDSGGTMHSLLALEEPEAHLHPQAQRALFAQIEAIPGQRFISTHSPYIAAQAEIGQFRHFRKEGAETTVSQMSLSGLSPEDLRKIDRMVLNTRGELLFARALVFFEGETEEQALPFFAKAYWGEHVHTLGISMIGVGGQAYLPFVRLAESFDIPWFIFSDGEPQTIASLRTTLGNLGRPSDLSNSANENVLVIPGGEDFEAYLSQPVYEAVLVEMIIKENSRSPQHEAVLRRQWANESDKRAKIKQELSASKTRYALPLALAITSMTDPTSRFPTLIRELFETMSLRLGLTQAT

SEQ ID NO: 64677 - protein, 615 aa, uncultured Thiohalocapsa sp. PB-PSB1
MNLSKDQARVVQHGEGALLVVAGPGSGKTRVLTERVRRLVCESDGHFRVLALTFTNKAANEMRERLEEIPDIHQRAFIGTLHSFCMEVLTSRGQQVGIDGAPNLFEQFQDRKQVLRQAMLADPELRHILLSKGSVRDQDKALWQLLDAISDAKGQLLLPDAVEDPRFGRLYLAYDQGMRASRAIDYDDLLLLTYRLFLERPKIAGFYRRLYRYICIDEAQDLNEAQYRLLQALCGSSYRNLMMVGDPKQAIFQWNGAHPKYLDLFERDFEAQRIALNQNFRSSAAVVEIAVRLSPDYEVEGEYPIAGEVTLLRGRDEEDEARQVIAYLRDLQASGHADIEGEITLDRCAILGRNRYVFNCLEPALSREGWTYYKHLSTQQESESDLLEDFEICLRLLANPGDRLHLEQLLNRWRIDCSESVRPEPLDCSALMQQLERFASGNPRRVILEAVQRLDLNASEFRLGPALDHLAAYADDVLKDDDRAMVLQDISQWRKDWDRFVRRASGLQRSLRTFLGQIALGATQQPREDGLALLTVHSAKGLEFDVVVIMGMMEGVFPDYRAAGSALHEERRNLFVAATRSKRLLCFSYTEQRMMPWGSSKAQIPSRFLQQLGLT

SEQ ID NO: 64678 - protein, 692 aa, Elizabethkingia anophelis NUHP1
MKITQLSVTNFRLLDDVSINIEDDITLIVGKNNTGKTSLFEIINLFFESNNKISFHDFSQNSYETFDSCYKKFSNELLVEADEIKKDEIEKEIIAKIPRIILRIEIEYDKIEDSLINISDFISDLDDLKTEASIVFKYEPKDTINLFKTFHNRDLKTVGLIEWLNENINSYYSTRVFGGDNLIEDNVLSKVSKVLCFETIQASRKLDDTKMDKNRSLAVGFSEYYRNIHSDKDGEVEDLKTALKDVSTELDERYGKVLERILIKLKSFGIDKEINIPEIVLKSKFDPENIIKNNIKYFYKNGDIELPESYNGLGYSNLIFLVLKIVSFIENFKKNKAKHQMEILTILLEEPEAHLHPQMQQVFVEQVRETIEKAKVEDNIRVQLIISTHSSHMIAEAGLNVKRSFERIRYFSKIKSDKKYIIEIKDFNDFKHKETDKDTFRFLKQYLNLNRCDLFFADKVIMVEGITEKLLMPLFIKKVATKLENEYVSIIEVGGSYTHKFKEFFKFLNTKVLIITDIDSVCAEHGKSCHVLKPDSNTSNSTLSDWLPKKTKISDLLALTSEEKLDDSKIIRVAFQIAEDDNAFVARSLENSIINCNQTFFKSKYSSGGTELDVHKSFSYQKLKNLEDLIYLETDRNQSEVDMSSKQKTDFTFDLMTFDEKETALEWKVPKYIREGLEWLEKNEEVESSKVD

SEQ ID NO: 64679 - protein, 611 aa, Elizabethkingia anophelis NUHP1
MSAFEEIKARIEDKSSFVVEAGAGSGKTYVLIQTLNHLIETQGENLSLNNQTIICITYTNVAKNEIIKRIEFNDLVGVYTIHEFLWQSIKQFQKQLKVELCNLNEIRYKKEIDKNGASKNYIENLKERIDNVNEIFYNDSAFRDFEIGELHHDDVIELAKMLFENYPLLTSVIAQKYPYIFIDEYQDTSEDTVQALVDYLLKRNERKVILGFYGDSHQKIYDTGIGSLEKYYSKEVKTLTLIKKEENYRSSKAIVGVLNSFRTNIEQKPQNKINGSVIFLYWKDHPEKEEKQKVTDFENSLKDYKNNFYDEVVNILKKKDWVFDKAGFDKILVLANSRIAERAGFSKIFKLFSGRFGQSVKERFLDRNHILVRLFTGYVDKKSSQERTVGLEHLLLYWSVNNHNEVIRFIKKNGTLLNDFEHPKKKIIAEILDELSANRSTMTIGEVLNIILDKGIIFSDSLNKYIERINQDVEKLDKESKERVEKDKRFYESFLALSYDEILKFWKHVQNETVFSTKHGTKGDEYRNVLTVIDDTEWKGEYNFNNFFNNSEDKPERELRTRNLFYVECSRAKENLVVLMLSKIDERALKNINKWFGNKNVIDVKEFISGS

SEQ ID NO: 64680 - protein, 689 aa, Pseudomonas aeruginosa DHS01
MKLRHAKIKNFRLLADVQLALEDLTTVVVGRNNSGKTSLSEIIRRLLAEGSAAFQLEDFSSACYDRFCTALEAHNNGQDDDVVRALIPFIELRLTFEYDPAQPQLGPLSPFVIDLDPDCNEVLAVVRYELKDGQLAQFFSGQPDTPLTDETRIAFFRSLRERIPTSFAVRVWAEDPNDAENNRQLQPSALKALIKTGFINAQRGLDDITSRESDVLAKTVELLFATASSSSADEADKQIAQALKEAVQDIQSQIDSSFGGQLNNLIPALKNFGYPGLGNQELHTETLLDVRKLLSNFTKVRYAGYSGVTLPESYNGLGARNLIFILLQLAGFYKSFLAEPNSPGVHLVFIEEPEAHLHPQMQEVFIRQLAKTAQLLVEGTESKTAWPVQFVVSTHSSHIANEAGFESIRYFLSGEVQGAAAGVRQTRVKDLREGLDGVSEPDKKFLHQYMTLTRCDLFFSDKAILVEGLSERLLLPAIIEKLETAEPDRPKLSSQYVTTMEVGGAYAHLFFGLLRFLELPTLILTDLDSVEKPGGSACEVHKGTYSSNACLKAWFSDDNPFTLNGLLTKDESEKAKHGNCIAYQCAEKENGPCGRTFEDAFILANRALFGLNGATREELEAGARSQASKIKKSEFALKYAIEEKAWTTPKYILDGIRRLAAGIEPAIPDPALALAAEAMIANEEDAADA

SEQ ID NO: 64681 - protein, 579 aa, Pseudomonas aeruginosa DHS01; identical to SEQ ID NO: 62643

SEQ ID NO: 64682 - protein, 623 aa, Pseudomonas aeruginosa PA1
MHLVRVRVRNFRGIAYGEVHLNGHTAFIGDNNAGKSTLLEAVDLVLGPERLSRRPVIDEHDFYAGTYVDPAKNEVVPIQVEVIVGGLSDEQLRHFRDHIEWWDTQTKSLLVGAPPEGTDAPHVGAAIRVFFNGWYDVDEDDFAGDTYYATPEMPDGSYPRFSAPDKRKCGFLYLRTLRTGARALSLERGSLLDVILRLKETRLTMWEDLLDQLRALPVGETEDIGELLVAVQDAVRHYVPSDWAEQPHMRVSDLTRDMLRRTLTVFMGTGAKRPDGSVYSAPYQHQGTGTINTLVLALLSIIAELKQSVIFAMEEPEIALPPHTQKRIINSLRQKSAQAIFTSHSPYVLEEFEPAQVVVLKRTAGVMTGVPATYPPAVKPKAYRTEFKARFCEALLARYVLVLEGRTEFDALPAAARRLAELDPTRFKSLENLGVAIVDARGETNVAPLGAFFRSLGKVVFAVFDKQTPEALATITASVDHAYESATKGFENLVLYGASEVALRSYAAVVVVGGDWPQHLAAYTPTPATPLANLQVALSHYFGWAKGGGDAGDLLASCPTANDMPEYVRTTLAAIKNVIEPPQPPPLPHQLAGVPPLPEAAAKPPPLAAAYGKFHPSPPQPLA

SEQ ID NO: 64683 - protein, 551 aa, Pseudomonas aeruginosa PA1
MALGGPGAGKTHVALVKARDEIRSGVLKPGQKILFLSFARPTVARIIEKASELISREDLKQLEVSTYHGFAWSILRSHAYLLNGRPSLQLLPPPEAAAHLADIDKAQHENEKRRLFEHEGRLHFDLFASLVSELLSRSDRLSAIFSDAYPIIILDEFQDTNCDEWALIQQLGKRSRLIALADPEQRIYEFRGADPRRVGDFLELFGAVHFDFAGENHRSSGTDITTYGNDLLTGANKGKVYQQVKITRYGFMYGKSLHFTAKAAVLSALDRLKAIPDKSIAILVPSKRLMLELSDYLSSAADGLPELHHDVAMDAEPPALAAGVIATLLEGGTAGDLASRMLGALHSHIRGRRGGKPTPQSELDLAGALSGFLSSGKIRGAKRQLIVSEVQRIAELRQQLQLTGDPAEDWLQLRGLLQSSAAVALKQVATDARYLRLLHRGSVLRANLGALWRAQGEYKGAEEAVRSALMQEHFAAAQKDWRGIHLMTIHKSKGKEFDEVIIYDGLFQRIAKAPQDPKICAQDLLVLRVGVTRAIRRTTILTPKRDTCPFL

SEQ ID NO: 64684 - protein, 623 aa, Pseudomonas aeruginosa PA1R; identical to SEQ ID NO: 64682

SEQ ID NO: 64685 - protein, 570 aa, Pseudomonas aeruginosa PA1R
MTEVWSDQKRGFLACAGHTLALGGPGAGKTHVALVKARDEIRSGVLKPGQKILFLSFARPTVARIIEKASELISREDLKQLEVSTYHGFAWSILRSHAYLLNGRPSLQLLPPPEAAAHLADIDKAQHENEKRRLFEHEGRLHFDLFASLVSELLSRSDRLSAIFSDAYPIIILDEFQDTNCDEWALIQQLGKRSRLIALADPEQRIYEFRGADPRRVGDFLELFGAVHFDFAGENHRSSGTDITTYGNDLLTGANKGKVYQQVKITRYGFMYGKSLHFTAKAAVLSALDRLKAIPDKSIAILVPSKRLMLELSDYLSSAADGLPELHHDVAMDAEPPALAAGVIATLLEGGTAGDLASRMLGALHSHIRGRRGGKPTPQSELDLAGALSGFLSSGKIRGAKRQLIVSEVQRIAELRQQLQLTGDPAEDWLQLRGLLQSSAAVALKQVATDARYLRLLHRGSVLRANLGALWRAQGEYKGAEEAVRSALMQEHFAAAQKDWRGIHLMTIHKSKGKEFDEVIIYDGLFQRIAKAPQDPKICAQDLLVLRVGVTRAIRRTTILTPKRDTCPFL

SEQ ID NO: 64686 - protein, 564 aa, Vibrio halioticoli NBRC 102217
MEISSLHLKGFRNFNDALINFNSSTLIIGSNDIGKSNMLHSLRILLDKSLSEADIEPSELDFHIGLDGTSQYVEITITFKDVKEDAVLSILKGNVNDNGETIFRYTANKSDLSYKLWVGQSLEDLQEVTSRFYLKYINLKYIQSQRDLNRVIAKEKKQLLRIAQQVLNENDSQEDETLLTEISTDLAKLNRKVAKLNYVKSATDDINSELKKLAYHNSNYSVQLDTGAIEVNDFIDKLQLGASTGGESVMLGGDGRNNQILLALWKAKSIIEQDIDHEVVFYVVEEPEAHLHPHQQRKLATYLIEELPGQTIISSHSPQIATNFTPDSIVRLLSFKNSTLAASNGCSQCIAESWKSMSYRMSILPAEAFFSNGVFLVEGPSEMLFYHELAKQIGINLDFKNLSILSVDGISFSVYVQILNALNIPWVMRTDNDINKIKGKSQWQFAGANRCLSAANLSKLKHSDIKLSPTDAFNNGTWRIVSDAVNCKGIYLSKVDLETDLVTELPESIVKALGKSDTNGAIKYLQGKKALRMHPLLKKIDNDLASITSGDLARPLHKLVEMVR

SEQ ID NO: 64687 - protein, 540 aa, Vibrio halioticoli NBRC 102217
MKQFKLTAQQQEAIDYNGSMIITACPGSGKTTVVTEKIRQSTLNLPSYKGVIAITYTRKASAELKRKCTSNAHDTKASFFGTIDSFCFKEIILPFLPRIWGSPALELRATKKLISPYNEYLNQEYKSPTTADIVNDPGFKALYDDGILWMNSFAALALFVLKNSLAARRYVSARYSSVYIDEYQDSSFAQHQLFVELFQLGLTATAVGDSWQSIYEFRGGDSKLLLALTTDPRFKHFVIDKNHRCHPSIVNYAERLIDSNAQLLKHAPDDIRVHRSYLQGNLTSIGNGISTYINTLLKDGNIKQASDVGVLARKEQSLQMIANGMTVKYRLYNDNPIDKHASTECADFYTDLLSYRYGAISTMQDIIDTYFESIDQKKLSINNLRTMIQKLKDDQTVEELIDKFNQLATLIGIKDTRSTDTALISKVHDESFLKQFKLKDENEVQVMTLHKSKGLEFKYVFHLDLEEWSFPHLTPGKSWGEQTFTNLEQDTNLHYVGITRAEEHCFLVRAEYRQNAKGKDSYSNPSYFWTLPQLEGLYSE

SEQ ID NO: 64688 - protein, 708 aa, Enterobacter cloacae S611
MYLKSIEINNFRKFGSKDNLIGFVKANSGDNKISPVASSTTLIVGKNNAGKTTITKALEFIVDEGDRLIGSYFNFDYLNSLLSKYIGGDYKETPELSFILDVILDNGNEDLATNFGSFITINDSKDDKKPQSAKVKIIYEVKDKDLFETSIKNGIDFLSLKKKDKVSKFKFLVDVISDTQFRRVVKGLNGRGEKNIRLKDIIDLKVISVSNNIHDKRLLAKSFNKIIRYMYEANDRSLKSINSLVEKNNNRLTGRIRRTHQKGIQSVLENIISENALAFSLRADLTFDKLMTDLVTYEYIDGEHFVPEGQFGLGYTNLINILSEIIDFSYKCKFMKKQSKVQVLCIEEPELFMHPQMQVNFIRHIEEALSAILKLSSRDVANLKSQIVITTHSSHILNSVIQESCSLDEVNYTYPENGQSKNIIIKDANISNGKTDEEYFQFIKKHIKHQVPELFFSDAIILVEGITEERVVSFFIEKDIILRRKKISVFRIDGAHGSVYIKLLNTLRIPSLIITDIDFQRSKESLYKKIKTIDDEVIKIPLYPQIEVIDENTLTTNKTLTFIHGNSKVNTFPKYFSQENVRVSYQIEPVEFYSEGTLVNKFYATSFEEALILENYNNLLFKELLITVIPSVMDELLEGENADVNILAKNSYRLQKNLSESKSKFSNSIIYSLVNSAEDSGEKIKIPKYIKEGIDWLSSYKFSDEVEL

SEQ ID NO: 64689 - protein, 685 aa, Enterobacter cloacae S611
MIFEESQDALIEETRVFDTLVGYVNDRKPFYFLSGAGSGKTHALINLIKRIMHDNKSQLFTTGQKILCITYTNNAKDEIISRLGENELVYVSTIHNFLWDMIQHHMDALLEIHVSHLNDLIKQNEIELFFAENDKPAYKVYRGLNQDEIDAISNFILNDDEFYYGLKEINAGPFWLILNDKLGEELGQKLNTNKNHLLKIFSCIRKIYNYKACLINIIEGVKGYDSIEYNIRNAECLYKNRIGHDTLLLYSYKLMESYPYFANIVIDKFPYTFIDEYQDTHNNVVAFFKLTIERLKFTNSQYLLGLFGDPSQEIYSSGVKTYVLTFDEVQKNINRRSHNQIIDCINNIRGGHQPIKQISIFRNKNLGSVRCYIYPLSECNKSNIEFIIDSYQKKWEVSMSNQMACLVSKNEMLAEVCGFSNLYSKVKELLIAENKINYNKVNDEFVVNSIEKLGPLASLLYYYCNPSYLLRMKGDAPIIDLFPKIYLQECTVKDVRVAVRKLNAMSYDSLGQYFSELHGLLNSIKNKKVKSLINSLLPFSFENDEVWKDQIVRHCGFRKVKFDDPVFQSFLEVNFNEVTHWMKYINSNKTDSPINVMTCHSSKGLEYENVIVFLNDKMNKRQTYFSSLLNSDLNGVLPPDLEEVRRLLYVSTSRAIKNLRVVLFSDNEIEKDNIQKIFSDCVFYN

SEQ ID NO: 64690 - protein, 659 aa, Enterobacter cloacae S611
MKITQMEIKGFKSFDNVGQTININSFTSLIGGNGTGKTAVLLALTRMFGVKSSDRIIQVDDFYVPPGDEIDTQDERELSVRVKFEFADLEDGEDNTVADFFKHLVSSEAAEIPYCTAKLKAKWTKTNLAEGDIESDLVWEIGEYEKNITAYERSKIHVHYVPAYRDPAQQLKQTAGTIMHRLINAVEWSDQMASTVDEVAVSIGNQFQEEVGVQTITSSLGRNWKTLFTGGYFEKLQIKPVVNGIEDVLKHIDTVFLPSPDTQPLPTERLSDGMKSLFYLSLVKSAFDIEDEIINSDGKQLSISVEALDPPNLTIILIEEPENHLSPQYLGRIVKLCEEISENDRAQVVLTTHAPSLLNRVEPENIRYFRLHDNKNTIVKEILLPREDKDDAENVDTFTYVKEAVKAYPEIYFAKVVILGEGDSEEIVIPKIAQVNGIELDTSLITFAPLGGRYVNHFWKLLNELSIPHVTLLDYDFRRGGGGWGRIKYAVKQLISIGVDKNILLKMSDGVLSDEDLEVMHSWDEDRDEEIAWIESLKEYGVYFSFPYDLDWIMLNEFFEDYKKFVPENGGPRLPKDDDPEYNKKVKAAIASVLKKEEKNIDISKFDDFEKYFWYRYLFLGRGKPLSHNYVLSKMEDDKLRDNSPEVLNELIETVRGLL

SEQ ID NO: 64691 - protein, 615 aa, Enterobacter cloacae S611
MPIIKDDDWVLKDIQEVEDEAMKVIRNSTGHNLVLAGPGAGKTELLAQKACFLIETGKCRDKRIIALSFKKDAAQNLQDRVDSRLDLKYRQKFESTTFDAFCKSIVDRFKSTLPVAYRPSDDYEIYFPENKKFVEEVKRDAVGFEGLTAEELKKLKHNNFENNYIVRPYKKGEEHSVDARIKRFVWFRLLEGKSKVSFKMINFLANYIIRNNKFLSNAINSTYEYAFIDEFQDTTYQQYEIFKSIFLDKKIKITAVGDTKQRIMGWAGALHSAFEIFKNDFAIEHHNELLSNRRSLKNLISYQRMMEAFMNHADNKPEMELIENEGSAKLIQFDESNIEGAYIALCIQKWIEKGVDEREICILFRNPSKHYTDKIISSLQDLDIKCRIENTYQELLNEAIVQLILKMLMFTCDKKSIEGWNSTMELLCNIRGVNKSRDITRLEKELSRFIKSNKDINGNVVDYIYGLISIFGIDEIKSYFPQYINGNGLDYTINSLSQHLETLGIKDNKLAAIDMLLGNKTIPLMTIHKSKGLEFKKVIVVGLEPGAYFGDEEEQIENQKTVFVAFSRAIEEVILTRCAKRANWWDEVCSQNFSEIPLITDMLTYCGLEAEIYKD

SEQ ID NO: 64692 - protein, 669 aa, Sporolactobacillus laevolacticus DSM 442
MYLKRIKINNFRKFGLGNNEVELVDAQSYLKRKEAKDVNIASTTTLIVGKNNVGKTTIIQAMNKLIHGENINSNDFNFFYLKKLFSEYKIDNYKNIPIIEFIVTIGLDKGRDDYVTNIIPFMLLKDIDATEMNIIVRYELTDTELFISAVKKIITKKYNESVKFSRILDVIDDSHYTVNYYDKNMKKVEKFHLKDLIDLAMVKANNVTGDKCLSDAFNKIIQYRYEELFKDEKEALEDKLAKINNSLTKDIERKHTKPINSSLKRVVSGDILHVLLSADLTFQKLIRNMVKYEYIEKGNHIPENQFGLGYTNLMMIIADLIDYMEKYPDSAFNSRINLICIEEPETYMHPQMQELFIKYINDAIATLLSFRNKNINSQLIITTHSSHILNSKVHIGESFNNINYVTAKDNFTKVIPLNDILISPSGTTNDKDFKFIKKHIKFNFSDLFFADAAILVEGISEYNLLPFYLNQDRNLKHKYITILNINGAHGLVYTNLIKALKIPTLIITDLDIKRDDAEKENFKQISSLKGRTTTNQTIKAFNSGMDNIEDLANYLQDENIYVLFQRKTGYYFPTSFEEAFIAKNFDNAILNEVLKRIKPGIYNEILGNSVNYQYNKKYSYKWQSKLSNDKSRFSNEILYEMMTQEDNIPTLPNYIEKGLKFLSLELGSR

SEQ ID NO: 64693 - protein, 683 aa, Sporolactobacillus laevolacticus DSM 442
MLSQISRENQQIEKATIDKIFRNIDDKKCTIFNAGAGAGKTYALILSLKYAVNTYGKMLKEHNRQIICITYTNVATEEIKKRLGNTSIVRISTIHERIWNFIHGYQKELVELHLENLIKQVDELVEQTTNQKEFELYRQLSNDDKSNFFNIMFENKDTYYKSYNLGAKDFKQALSSILGVYASLLKNVAHFKKIVNTLFRIGNYKKCIQNIHESKPGYNEVLYNVLSNRDQLHRMKISHDTLLEYGYQMIKKYDLLKRFLVDKYPFMFIDEYQDTKEIVISVMDMLQQFSVDIKHPIFVGYFGDSVQNIYEDGVGTNIGNFHSGLEVVNKEFNRRSAQEIVYVANKIRNDEIVQSSIFEDCQGGSVEFYVGDERDATDFIEKNTLNATKENPVHCFMLTNKSVAQFSGFENLYLLFSSTQYYKTYYQQLNTELLSDDPSKLGEIPLLIFRIVKFINKVRNEETSITDVLTYSIYANNNLSQVKVLVDLLKRIEGTTLLNNIQSICGFYQSEDNLSYKKVIDSLFDIDESSIVDIKRYMIQKLYPNMTEEIEDDARKNVENILNLEMNEYTRWYDYLTGNHLGNVVYHTYHRTKGLEFDNVIIVLGNSFGKERNYFNLFFKNYKDSGHLIDEDLKKYEQARNLLYVSVTRAVKNLKILYIDDVSGFSDVVESIFGEIQVYSRDN

SEQ ID NO: 64694 - protein, 789 aa, Burkholderia cenocepacia KC-01
MFPHEISASSPAVNSAADSPQIAPAAPSAEAAAPRSTSPIRLACVEVCNFRRLSKTRLELDQATTILVGANNSGKTSLLTVLRNFLSESPGFRAFDISLSQWAKLRELSQLWEALDEDPTTDSKDAEKWDEQFRQLLACMPFIDLWFDAKEGAYNHVAPFITSLKWSGGAVGVRVRLEPVADANELRKLAWRYREARAHVRKLPKDGHAWPMDLLDYWLRHSADLRRIAAYRLDPAKGLPPAKKHCDPQELPLGSQPVELQFLRKLIRVDFVPAQRGLGAEEDEARSESANARPGLFSSQLLKFARQHLNVAPSGHGHREDLVTAIAKAQAELDESIYKALQPAMEDVEVLGYPGLHDPQQFHFRTRIQTADLLAHSTAVQYSLDKTAVDESLPEHSIGLGYQNLQSLSFMLVSFRAARLNPPQGTPAAVHLVMVEEPEAHLHVQVQRNFSSNAHELIRPKEPVHSNLRSQMLISTHSSHLAHGDSFTRLRYVKRVASTGVAVKPSTEVVNLGDAFGDDNETRIFAERYFQVQHTDLLFADAAIFVEGTAERMLVPLFIERDFPKLAKKYVSFLDVGGSHAHRLRPLVERLGIPTAVITDLDPVVPTKNKKGRIVRAAVHIADQADLECGNDTLTSWHPQLPDFPAYGKPTPAQLEWTSDSGVKVRFAWQLPVAVASDQWPSSFEDALVLSNIDWFKALDEEKNPVSGKKKDHRGALGKVIGLVLDYPDHAELLRELHAMLRGNFSKGDFAATLFERLNAGEPLACPAYIADALAWLSCQLNVAAGETP

SEQ ID NO: 64695 - protein, 651 aa, Burkholderia cenocepacia KC-01
MSAALDSLGNDRDAHVVEDICGYITATPPRCFFLFAGAGSGKTRTLVEVLRRITGVVKHETGGGYAERLRSRGQSVRVITYTKNATAVVNGRLGENYLTAVSTIHSFCWELIQDFNEDIRDALLARNAKRLAAAKAYAMGKVKGESDKDREKYAEIEAEAEEIRKIDAFIYHPDRNTYGLGALSHAEVLEVTAWLIRERPTLQRILEDRHPLILIDESQDTMKGVLDALFELSKNRSGHITLGLVGDHRQRIYPDGHDDLPSHVPVDWARPALQMNHRSQERIVKLINKIWDADIDGRTQPKNGVAQHARTEKNGGFVRIFVGDTNTSTAEKIQKETECALAMARGTAIAAWQDGARGYKTLALEHKLAAKRGNFFEAYSAMDLLDKDSAMPKSNGERTGPAMVRPLLGPMLELAECRQPDGSLNEFAATDILRLHGALARVPQASAERQAALENIHAAVMRFIDATSKPGATVREVLVPVLEGGLFEADFRLIQAFGDTSPPPPEPKARGKEAKEDRRKRGWHALFNTPWREIARYRAYLGGEAELATHQVVKGSEFKHVMVVMDDDEAGGTQFSYDKLFGAEDLSPTDRKNVDDGNETIIDRTLRLLYVTCSRAEESLALVLWAKNPNAVLNSIKRSEWFSVDEVTVLK

SEQ ID NO: 64696 - protein, 630 aa, Flavobacterium cauense R2A-7
MYLASIHIENYKGIKKLNVNFQKDINVIIGENGSCKTALIDAIRLLYNLGNQQKEIYVTADDFYLGESVITISYEFKDLSIEQKGAFYEYLVLGDTEENDYAKVTITYKRENQKILFSYYTGEVEGQKADSLTFQFFIHYYLGALRDSTKDLIMNRSSILGTLINRQVENNSSQENYEKLIKKANDGLLKLDEVTNSRKSINDNLIKIYKHSVENQIGLRIEEAKAEHIVNIIKPYLPHDTKNLSGAGFHLKQNSLGFNNLIYIATVLGDINQQLEDDKTSHYALLIEEPEAHLHPQLQLNLFYFLKQTNTVENSQLFITTHSPTLTSKVPLDNLIHLSKDNEAINLIKCFEDREEVTIQDDEETYLDDISNRKKQLERYIDVTKSQLFFSKGVLFVEGISEELLVTVFAQILGKSLEDFKVELLNADGTSFYPFIYLFNSTEKSKTLPIPLSILTDDDRFTESKNTEYSFINIKDNLAKAGELYDKIKKASQATRIKNISSVIKSVPKKISLNVSYKTFEFDIVKSNISKSKKQIIENLLWIYISQEKSISKKYEKLKNHLESFEGDEITEEQLKQLQILIWKALPSKAEFAQDFSIYLLANIEIAKTNFVVPKYIEKAITHLTNYKIK

SEQ ID NO: 64697 - protein, 500 aa, Flavobacterium cauense R2A-7
MTIDSFVNSFITLPFAHKLKDIGKRYKIIDDISYLDKIFQSDWQLMKTYKSYLFSYKPSKIDYTINSGYSWDGHDKSDDLDFVKYAKEIKTRQINMGLLKTSDSAFLAYLILKKYPRIAKYIASKFPYLIIDEAQDTSEIQHSILELLYNQGLKNIDLVGDPYQCLYQWRDASPELFLQKFDDCENWKGLYLTENRRSTKKIIEVFSMLRRTTDKEIIPILDSEADLPLHVIKYDKTDYSEAISKYEKLCLDNNLSSNIILVRGNALKNSLLGKESDYFPWDKSSIAYKLIQSRIHLQSNEIKEAVKKIRRLIIELLIPGISFSDLKEKENELKNDKDSNSIIFKIVRDIPSFDLSLKEWTVKTQQYLKSELQLENMPDFKIRKKNVTKKGKITFDKTTLENSVNHYFKKAITENNFPITTIHQVKGMTFDSVFMILNDKNHKENITLNDFVLKEEMPTEKQRLIYVAISRPRNLLCIGVPKTMTDEKLKEFLNCEMLIL

SEQ ID NO: 64698 - protein, 577 aa, Flavobacterium limnosediminis JC2902
MEIHFKKGMNILIGENDSGKSAILDAIKLVLKTHAYEWIKIEENDFYNEGDDIASITRIEIEFSGINDLEASNFTEWCGWQDEEVENESGIKELKPRPKLILIYQAELREGKIIPTDVRAGMDGYGYLLTAEAKEYLKCTYLKALRDADNELTAKKNSRLSQILKQHDLFKKKSKDVKLEFEKIFIEASDRISDEFKKPGSEYYLKIKKTIDQYIQSFINESSESKIDLGGSEISSILEKISLGILDHKNLGLGTMNRLFMAAELLHLKKENWNGLKLCMIEELEAHLHPQAQLKIVNRLKEEKDIQYILTTHSPNITSQADLKNIIICRNKQLYTLSEGNTKLEPKNYKYLERFLDVTKSNLFFSKGNFVVEGWSEEILLPELAKKLGYDLTKSEFSIINVASTAYLHFAKIFLRNDGAKMGIPISIITDLDNRPDIDGNFKDISEEDDKVKTKQSNLNKLKAELEKTDVILEIAKEWTLEWCLYKSCLSELFKNAIKETHPQVFKTFDEKYFIKSLSKQNGGTKIDKVALANELAILISEDTTIQKKELEEDKFLEYLIKAIKHVCDYGNKSEPY

SEQ ID NO: 64699 - protein, 676 aa, Flavobacterium limnosediminis JC2902
MVLAHTNHAVEEIEKQLKPICPQLFEYPNFVGTIQLFSNRFIANQACFELYGSYIRKNDDEISENELISEFYKINFKSKLNGFIFNQLFSQYAKLSKRDLERDLNFDSKTSLELIKELKENKTLNKSGVLNYHITKEILVNDENSLLLYIKNIHDNAIQNVKNEKQKFCLRYKIDFINKKFVSFSGDLNFESESGSELLSYFEQSFKRGVLRYSDSISLSKYYITHHKELLKILQNRFKYVFIDEMQDLDQDQIDLIENIFFEEKSSNKIQRIGDKNQSIYSSAKSVSNDILWKTRNEIDPIKFPKNLSLNNSHRLTPIVAKLVDGFVLKRDVDYKVVGTSTNNNIAPHLIIYKDEKDGKELKNKFIELIKEHELDKGTKNLEKGYHIIGWTTEKEENSNKWYLKKIFPEYSKESRQKKEDFDSLRKYFFLFDREKKTLEAIRKSLLNGILRILRIEQIYSEPEKKKHFRKSLLIRIIKEKGEKHYTDFNQRIYQWCFSIVTKENYEEVFRDYFSFIENELVNYIPNFKITKSIEFVVKDFNFNSIIDSKITKDVVNHNDLDIKISSIHAVKGQTHCATMYVETEYFNFETYKLDVEIKKATKKTEAVLGNNPLYFQEQNFSELNKTRSNETLKMMYVGFSRPTHLLCFAVLEENVKKDIQKYKDAGWIVIDDLVK

SEQ ID NO: 64700 - protein, 485 aa, Bacillus sp. 17376
AYKDSVTGEKQYHFEAGISPKDLEEIKGRYYLKTLNLKYLASTRDLNSFIKRERKNLLVDIKKNRTPEETVYDEKYLDKIDKSLDIINKRVSNLNYVKKAMGNINDELKGLSFHHLSQKIEFDVGAWDSSHFVDNLNLVSKVRDKNLSISGDGRSNQLFIALWANRNEVNKDHLLEVTFYCIEEPEAHLHPHQQRKLAGYLSNNINSQVILTTHSPQIAEEFPPDSIIRLYNKDLKTKAALDGCHSLINDSFVKFGHRMSIIPAEAFFSNVVLLVEGQSELLFYKALAESIEIDLDRMNISILMVDGVGFDYYIDVLSNLEIDFVVRTDNDFFKLPKKDKYWFAGIKRCIKIYKTFYEEEEGMEDLLTQENALTDVPLDVTQDIKELTVKLRQELEQLSMFLAEKDLEHDLRDSPVSGQLEKYFGLLFEENADPEIIKEMQKKKATFMFNFINDPNTDLSVLKNHTLAKPLLKCVELVEAQSGTD

SEQ ID NO: 64701 - protein, 264 aa, Bacillus sp. 17376
MYEKKVIGTQKEIALWLDQYAPKILKKLGIVDNNRAAILVRGKVTGNIIDENLKIKHKFFNNTPLDNDSNLWSQLFKELLLILFDKNINKFDMVQKYLDLNLDKRNAKYILEQLQELSTNLESNPYDISNYEQELIKLAKVIIPNGEKEKSKMLLNDVLNNNEHINSYLPAKKDEIQIMTLHKSKGLEFDIVFHLDLYNYILPNPQNDQTQDINLHYVGITRAKKGLFLIWSTERFNASGERKMGVQSDFLAKGHLRRLRMWLP

SEQ ID NO: 64702 - protein, 594 aa, Pseudomonas mosselii SJ10; identical to SEQ ID NO: 62698

SEQ ID NO: 64703 - protein, 445 aa, Pseudomonas mosselii SJ10
MLNRNSVAWRSEEELAAWAEAYEAALRDEGLIDYDDMVVFGQRLIAEHDWVLPLVQAKFPVLAVDEYQDLGVALHRIVKRLAFDGGVRLFAVGDADQSIYGFTGADGALLMELAARRDIEPVQLQLNYRSGAGIVTASEMALGEARGYQASDPARQTTIEFVLRPGGMADQAAHAVAQIIPAALASKPGRTLGDIAILYKDYRAGDIVAEAVATGGLDHIRVDTAAPYRKVALTSWVEDCAAWCAGGWRVGRPQLRGLLDRYRAFHRASLDDSQAKREEQELTALLWELRADQQPAREFVASLRNGVVDHLLAAELALADQKEQLDRMTAALAEGGALASLDITSLGGRDGSPDHLNLLTLHSAKGCEYDVVIMVGLDLGNLPWRNETPEKLRESRRLFYVGLTRARDEVHMLYSGFVDGRYGPMRFGRSPFLDELEARMRAAGI

SEQ ID NO: 64704 - protein, 584 aa, Paenibacillus sp. MAEPY2
MKLSKVKVLNFRNLKCIDISLNRITILIGENNSGKSNLLKAITLPFLNDEVGNLSKKLGWHDINNSAKEMYFNFLKTNKERITNQEINIEEFIKIVPIVTVDVSFSPDGSDEYYIHKWITAMDEEVPQYSIQYKYAVQDHQKLLELVTNILMTNSSIDNIKMNLLPIEFYKYTIQVPLTEDPVSFSDLINFKYNSLAAERDDFSIKNNQLGSRALVNLLQNKLSDEQKVAVEKSYEDFFSDLKHISKLEGVFNWQEDSALENAKDFFKEITLLPNMPSMGSLLNNLRLGFGEEYLNTQGLGYRNLIYLLVMINSLKVHTDSALNILTIEEPEAHLCVSNEHLLASFFNSILNSSSNLQLFLSTHSTEFVNKLELQNVVVLANGSAFSLKDTITSQELNYLAKKPNLDFLKFLFSRNCILVEGPTEEMLIKAYLSSNANSLYDIEVIALHKGFTKMLDIWLKINQYTTSRIGIIRDYDDQPNAQINHERYNEYSNIYVTTTTEYTLEPEFVKTSTNFKKMNEYFTQNHGWEKCTSPEELSERWRSAKASTMLRFCRDFGKNELTNIVLPKHIANVLEFLKSGEKK

SEQ ID NO: 64705 - protein, 457 aa, Paenibacillus sp. MAEPY2
MNIIVAGAGAGKTTSMASHILNRLEKVEDGKILYVITYTNSAKNKIRELIIENKGIIPKQLRIETIHAFLLHEVIYPFHHLLFEGHFNSVSYINLPTNRAFSAGKLKELKQNNYIHVEKVTETAKWILCKKTGDNRLIKEKREKIINTISRYLDCVYIDEAQDMDEHMTQIVKLLDNKGLYIFLIGDPKQDLRGRNFFSNLVIQHQEAVVYEPTNHRSPLSHVNFSNHYIPFEQKQIPLSKIEGEIKFVLEKEIESSEDFFNNQNWDRIYIYQKNNRFNTHEKDKASNHNLIFELEKLISRTTDNEKERKLIQYELLKDIFSRLKDSNNNEILLLIEKVLNLKLNSQDKAKIHDSLKIANEKSHSPGILVNSIDSIKGLEGEKCLFIVTTEIAEYLLGIKKDQNKMMNYLYVALTRSKRELVLFITLEVHLKYTIQNWEAFLSSKKISKYISVPLAP

SEQ ID NO: 64706 - protein, 680 aa, Paenibacillus sp. MAEPY2
MNITELRIKNFRCFGDQETSINIVRLTTIIGSNSSGKTALIQALLKLFGLNSKDRVINKSDFHVPPNKKPDEVTEEQLLRIEAKIEFSELQIEGEGVKTVPSFFKQMMTGKPHEVPYLRIRLEAKWTQSVTPDGEIDPKLYYVVVPYGDEEKEDSLKPMSSNERALIQMIYVPAVREPSNQLKLASGTILWRLVKSIAWPEDTNKEIQKNILPLEQYLSSVDGLQEIRNEVKSAWNKYHRDPRYTDANILFNETSLESMLKNINVQFSPTEDITNYTIDKLGDGLRSLFYLSLVSTLLGIEQKIIKDETGKFLPQKIPAALTILAVEEPENHISPHLLGRVTKNLRDISETSNAQVLLTSHSPSIVKRINPEEIRHVKVSHTGEHVGTTSVSEIKLPSDSDLAIKYVKEAVKAYPELYFAQLVILGEGDSEELIIPRLMQVGNIALDDETISVVPLGGRFVNHFWRLLKQLDVPFVTLLDLDRERGTGGWSRIKYAFKQLIEIDVDVRELLTIGGTTHPKNILEEMHKRTLDDPSGPNSIAEMKMWIKKLESYNFFFSGPLDIDLLMLESFTDVYKSIPENGPEIPDKMRYPQEYNTVILNGVNATLKKDKNETKFGNTYSKEQKELMVWYNSLFLGRSKPSTHLEALAKIEPNDFMDKCPASLMNALNAVRTILDKSKK

SEQ ID NO: 64707 - protein, 631 aa, Paenibacillus sp. MAEPY2
MALVKPGEWIPTEGIVLERAADKVVRSGENVMVVAGPGAGKTELLAQRASYLLQTGICKPPQKILAISFKVDAAANLAERVRKRCGNELCQRFESRTYDSFAKQVLDHFRNSMDEMYRPIQDYEIVTDKNELKKLVAPHFTEKYPVYALKYDTLMEYLGNERLPLNVTYNVTDLYSLFSNDLWGIMPKGSQEFTASLTFPMITRLVEYLISTNTMIKNALKVTYSHLFLDEFQDTTNTQYDMLKQIFQYSKTVITAVGDDKQRIMGWAGALPNAFQEFKKDFSSKDERLIKNHRSAPLLIDIQNYLARDLDSSSLTVESPNLIKDEKSSLGVCQIWKFKTHLLEAEHLSKKIKEWLEDTIISPRDICIIVKQQEDIYAEQIILDLKTQGIIARVEKEFQDLLSEECVTLLIHVLTLVIKDRAPDSWQSIFDILIFMNPEIAENPEVFYQYDSELIDFITRLKTELPGLKNGRELEAYLKNIFGFLGEDKYCTIFPKYKGGKYLHKKIKEFSKKLASSYRSLKSWELALNDVLGINSIPIMTIHKSKGLEYHTVIFVGLEDSAFWNFVNNSEEDKRAFFVAFSRAKQRVLFTFSEERKIKQYNEIINRRQFSSNISILYTNLLQAGVETVEL

SEQ ID NO: 64708 - protein, 680 aa, Paenibacillus sp. MAEPY1; identical to SEQ ID NO: 64706

SEQ ID NO: 64709 - protein, 631 aa, Paenibacillus sp. MAEPY1; identical to SEQ ID NO: 64707

SEQ ID NO: 64710 - protein, 582 aa, Enterococcus faecium UC8733
MNCIKIKGFRSFEDATITVAKKSLIIGANDVGKTNLIYALRLLFDKKISESDLELFDSDYCIHSSSNQISIEVHFENVIEDCLVSTFKGLIKEDKMIIRFYKEKGKPYIIYCGFNDETMTAFENRFYIRHLFMECVDTNRDLNKFIKKEKSTLLVNAKKSREEEQIQKDDALEKRLQKRLTRINNSIEKLSYIEKALDVVNDELKEMSIHHSKGNLEFTVPETDMSKVLSDVSLSFREEGQKIGVGGDGKNNQIFLATWISKQALNDNTDEYVCFYAIEEPESHLHPHQQRKLSSYIMSKFTSQIFITSHSPFIGTDFVPENIIKLKKNDGKTIAASNGASERISSGIDEFNYRLDLITSDLFFVDGMILVEGPSEKIFYQALCSDLDIDLDFYNFSIISTAGVGFTPFIKMCQLLEIPFTLRTDNDIFNKTRDKQDYQYCSGVNRLHKLFRDSVIDDERIISDFTESDFEWIVKSPEETKIIPQEKIQKINELKDIFESKGLFIADTDLEEDLVYQLSLSEGWDNGYQNTLIKKLKKRKATNMYDFVRSETSFISLKDKDIFNPISYLFKEVYGLDWEKQK

SEQ ID NO: 64711 - protein, 521 aa, Enterococcus faecium UC8733
MKKPTTEQIRVINSDNNCVVTACPGSGKTFTIVEKIKRHSKDLKNYEGLVAISYTNKAADEIKSRLKGENTKKFFIGTIDSFCLKEIIFPFSKYVIEKNIEDFELVGSSNNENKDDEYYTKHLEAGQIYLNDIADLSYFILRQVPECVNYLRAKYKMIFVDEYQDCKKNQHLLWKFLSHQGIKLVAVGDIDQSIYSSFTDANPEFLRELMSDSSFTSFELTVNHRSHQTIVDYAMRFKNANHVPRMNEDSRITKVNIKGNEKNIVESLENNISDIKNKYNIEEMSNMAIFCRSNDMVSRVSQFLKIPNKDYSLVAFKKEDDFSRFCMHLLIRFFQYKKKETTKKDCVEELVNTHRNQELYKETRRKVDLLFSKKPEDLISEIDLICSLYLETKNRPVTEQNKNELIHILKEKTLLDTFKPAEKNEIQVMTYHKSKGLEFDVVFLMDCYRYIIPNEYNKKYTNLEADENLHYVGLTRGKEAVYILLGTERFRSKTSDYISASESIFLSRNGLVNLRNYDNWT

SEQ ID NO: 64712 - protein, 663 aa, Vibrio parahaemolyticus 10296; identical to SEQ ID NO: 63134

SEQ ID NO: 64713 - protein, 583 aa, Vibrio parahaemolyticus 10296; identical to SEQ ID NO: 63135

SEQ ID NO: 64714 - protein, 663 aa, Vibrio parahaemolyticus 12310; identical to SEQ ID NO: 63134

SEQ ID NO: 64715 - protein, 583 aa, Vibrio parahaemolyticus 12310; identical to SEQ ID NO: 63135

SEQ ID NO: 64716 - protein, 616 aa, Mesorhizobium sp. L103C119B0
MTVYGAESGIAIVAARVRDFRSLANVELEFSDFTVLIGANNAGKTSFLDALFAAIGVGRKSLDADDVRLALGESTAPKTRSVLVDVMLRPVGADGKIVDAYPAGSFWTNLWGATGIATDDAFNEFTGIRTTLKWSDIRGEYILERRFLREWKPFDDWAAAATQDRPVTAAQLEPLALHYVDAKRDLDEDLRKPGSFWRRLTEDLGLSVAEVEEMEKTLSGINEQIVGKSAILKHLKQNLAGLQTIVAADSGTVDVTPVARKLRDLSKGVDVSFQTAGAQPFPLARHGMGTRSLAALLVFRAYVSWRYKQATDGGDSVHSVLALEEPESHLHPQAQRSLFAHIKQVTGQRIVSTHSPYFAGQAPLEDLRLFFKANGDSSVTKLDTSSLHKDDIRKLQDTVIETRGDILFSRGVVLFEGQTEEQGLPVYAGKYWGRSVHELGFCFVRVNGTDYFPFIWLAKALRIPWYIFSDGEPKPVAHLNAMLRKAGEAESENCPNVVVIPGDMGLEKYLLSEGYQAEIEQAIDEIEGKSKHLDDYMKSMQGQKKKGGTTRDYTAADGRELATLDYLEGNKTSAARPVALIISNHKDPQRRFPRKIEELFEAISKAHGLSKAKDQA

SEQ ID NO: 64717 - protein, 614 aa, Mesorhizobium sp. L103C119B0
MTDAFGSRLSPQQLSVTNYLEGPLLVIAGPGSGKTRVLTERIRHLLTSVPGHFRVLALTFTHKAADEMKERLADLGDARDRAFIGTLHGFCLEVLTERGKFVGIDGAPNIFEQTRDRQEVLQRAVEEDPFLSEQLANSGDLKERHRRVVQWLSSISYVKSHPISHALVEDEETRRVMEAYEAGMRASNAYDFDDLLLLTYKLFVDNPKIGDIYRRLYKFICVDEAQDMNEAQFAVIMALCSDSNRNVMMVGDPRQSIYGFNTSSPEYMERFGIEFDAKRVELTANYRSSRAVVDFTQTLDSNYMVDQQLPIQGLVKVLRGADEKDEARQIVDRLEQLFQQGHPDVEGGVQPGKCAVLGRTRYSLLAVEGEMTERGIPFYKRFSASHENESEVVEDFLVALRVLANPKDRLHLSALAKRWRVAEQPVSHDFLASLEVMSGAARSSRAEAVRKAIVAASRNPTKLDLMLALTELRKHADEQAVADRLAIYEDVEVLRQEWDQFLRRVTGARTATAFMSSKALGSTQKPSREGVALLTVHSSKGLEFDVVFLAGMAEGIFPDYRATGAKERAEESRNAFVAATRARRLLYLSYPATREMPWGGVRTLAPSTFLNGAL

SEQ ID NO: 64718 - protein, 655 aa, Mesorhizobium sp. LNJC372A00
MKIEQLTIHNFRCFGPEGVTLTFEEAVTAFVGNNGSGKTAIFAAIQKTFGTSSAQRTIRKSDFHVPKDGEKLESETVMVIDCLLGFPELEEDDVDTDAIPEVFNQMATSGEEEPLKVRMRLEAKWIDDGTPEGTIEEAFRWVRATDDDFEWDECQAVQAVERNYIQLIYVPANRNAADQVTNLLKGRLWRAAKWSQQMIDQAETSAGALQNEFDTEEVTEFILERIETRWSEVYTGDTDTTPKLRLIEARLEELVRRAEFVFFPDEAGRERRLEDLSDGQRSLFHIALTAATLEIERDALQGAAADSVFDQEKLRRTYLTILAIEEPENSLSPFFLSRIMRQARDIGGATEAQVILSSHSASILGRVEPEEVRYARLDAETRVSSVKILTLPEEGTEARRYVRLAVRAYPELYFARFVVLAEGESEAIVLPAIAEASDFPLDRSFVPIVPLAGRFVAHFWRLLSDIEIPYATLLDLDAGRQHGGAKTVQYVVEQLAVIDNDLSTNKLVVDEEIDPDAIDEIDDQELLDQDQDHPWLMALRLEGVFFSSPLDIDFAMQQMFPGAYRKPRPGGRGPKTGAIALADKKKVTLKTEGNPDLYDHGWDAGFIWYPYLFLSESKPEAHLRALSEIEPGDLASSAPAELKSLVAYVKRRVSK

SEQ ID NO: 64719 - protein, 617 aa, Mesorhizobium sp. LNJC372A00
MSLVRPEDWVPQGIEELEDRAWEALRETGNSVCVTAGAGAGKTEFLAQKASYLLQTGLCPAPKRILAISFKRDAAETLSARVRKRCPEGQARRFVSLTFDAFAKGLVDQFRMAVPAQYRPPADYEIGFPTNDALNDFLQRAGLHNINAQQLSRIIADVRIGDPNQVVAADRQAAFDGYWNDQLHGRPTAYLTFAMINRLAEYLVRANRRIHAAIRMTYPIIFLDEFQDTQGAQFELLTSAFDKDHNTFTAVGDDKQRIMGWAGAMPNGFEVFTQQFDARLISLLLNWRSHTDLVAIQHIVAQSIDPNVEHAVARGEKAVDGDVCAIWDFGSEEGEIEGLAGWISEQVDDGIPAHELAVLVRNHPERLEKALGPALAELGVPLRNVARNVGSIAIQDLLAEELSEILLPLLRLGAEKRNPEAWASAQEQLRRLEAISLDDELGLQRSAARTETLVKSIRGYIASHNPEAGSAAGAVAILIEEIGETVIRRATPSYTRNADFARVVEGFERLLSECLDDAETWSDALDRFEGQNQVPLMTIHKSKGMEFHTIIFFGLDSNSWWSLTPNRPEEMKSFFVALTRAKQRAFFTNCSDRGGRIAWLENLLGEHVPRIASEDIG

SEQ ID NO: 64720 - protein, 655 aa, Mesorhizobium sp. LNJC374B00; identical to SEQ ID NO: 64718

SEQ ID NO: 64721 - protein, 617 aa, Mesorhizobium sp. LNJC374B00; identical to SEQ ID NO: 64719

SEQ ID NO: 64722 - protein, 598 aa, Mesorhizobium sp. LNHC252B00
  MOD_RES (408)..(408): Any amino acid
MYLSKLSIRNFRNFQSIDVALAGNVVLLGENRVGKSNLLFAIQLILDPTLPDSARQLKLTDYWDGGPTDYSAPIEVHLEISDFASDMSLTALLTDFRAPHDPSIARLSYIFRKKSDVAGPPQSGADCEFLVFGGGDETRSLPSKMRRRIAIDLLDALRDAEGQLSSWRASPLRHLLEEAVSAISRADLGTVATELDKASKTLEAFPTIKTLEDELRAGIARLSGKAHDIDARLRFAPADPLRLFRAIAMFIDDGKRGIAEASLGSANVALLALKLAEFAWRRKKNERNFSLLCIEEPEAHLHPHLQRSVFAKLLGNAEASQAMIVTSHSPTLAAVAPLQSIVQLKRRGGATQAFSLANLPVTPDELDDLENYLDASRAELLFARGVIFVEGDAEEALMPIFAASLGHXGHSLDDLGITVCNVAGTNFRPYVKLAEALSLPYCVVTDWDPLDGTKPPLGKKRTFDLWQDMLAVRGKPLLTTADLARWEASDYAAFSADAAKSGIFLNERTFEVSVANTQALLDPLLDILSEQNFGSVRTKRIADWRGGTRVDAEQLLAMVASVGKGRLGARLAKKTIGLNPPAYIENAINNVVALVANA

SEQ ID NO: 64723 - protein, 591 aa, Mesorhizobium sp. LNHC252B00
MLSDRPLVQALADLKANPEQAAAVVEGGHCVVLAGPGSGKTKTLTIAMSRAVIQDVPDPRGVACITYNNDCAIELETRLARLGIVPGDRAFIGTVHSFALSQVIGPYARCVPIGLPADFKVASKSQIRAAVEAAYSKSINGLGNPHDRWKFASEKRVRDVDRTRPEWRGRNPELAGFVEAYEMELRRQGLIDFDDMPLIAYRMIKANGWIRDAIRARFPVLFVDEYQDLGHALHELVLLLCFEGGIRLFAVGDTDQSIYGFAGANPELLESLTRRSDVRTIRLRFNYRSGAKIIRASLGALGEERDYHGIDGAPDGDLSFWPVPYGHENQAEAVANTIIPKLLEQGFELGQIAVLYRAAWLGDKVAAALKEAGVPFFRTDTNALVKRSSRLARFIEECARWITGGWRDAKPPYARLLSQATTLVYGRHASEREEEELSAQLMEFLSTSFGSSETTHVWLQRVARELITPWRMIARTPEQEWDVCDEMISNTDPARDLDIPLAHLAGRSEGSGRVNLSSLHSAKGREFNAVIMYGVNASDMPSTRDKSTPAGLREARRLFYVGVTRSKKHLSLVYQEHHHSPWVFELYQRSR

SEQ ID NO: 64724 - protein, 689 aa, Mesorhizobium sp. LNJC384A00
MRIQKVAIKNFRLLSDVSLILEASETVIVGRNNSGKTSLSEVMRRLLDDGPVNFQLEDFSSASYRGFCAAVHAYLSGQQEDEVRALLPAIELRLHCTYDPNAPELGPLAPFVVDLDPAVSEALIVLRYELKDGGMGALFDGLPDGSLDDASRKAFLIGLREKVPSNFGLRIRAEDPNDPTNFRQLQPSALRNLVRTGFINAQRGLDDVTSRETDVLAKILEGLFVTASSPSADATDRVIAEALATVVQGIQTQIDANFGNQLQNLMPTLTSFGYPGLGGQELQTETILDIRKLLSNFTRVRYAGYGGVTLPESYNGLGVRNLIFILLRIVEFHKAFKAEPKTPGVHLVFIEEPEAHLHPQMQEVFIKQLGKIAAQLAGAGEDAVLWPVQFVVSTHSSHIANAAGFESIRYFLGAEVPGADAGIRQTKIKDLRLGLAGTPAPDRQFLHKYLTLTRCDLFFADKAILVEGLSERLMLPVIIGKMEALEPAIKLSSQYLTIMEVGGAYAHLFFNLLDFLELHYLIITDLDSVVAPGGVACVVHLGTASSNACLKAWFSADDPHTLAGVMAKSNDDKTDDRGRIAYQVPEVAGGPCGRTFEDAFLLANQGLFGLAAGMPQQQETAARDLATVQKKSEFALKYAIEITGWVTPKYLADGIRWLAVDYVPPIDPALAIVAAAAAAAPASGGDAVA

SEQ ID NO: 64725 - protein, 577 aa, Mesorhizobium sp. LNJC384A00
MPNLESPAEAASRIALEEVFACIQASRSFRLEAGAGAGKTYSLVKALKYLTERHERDFSRRGQHIACITFTNVAKAEIEARTDRHPIIYCNTNHAFCWLLIGGFQKQLKALVQQMPVWQEKLLEAGGIGNRGVEYSLGHRAVREHMLSLHHDDVIPLTISLMENQKFRKIMAERFPIILIDEYQDTDKAWVEALRLRFLGQPGSPLFGFFGDHWQKIYGNGCGELNDDAVTPIGKKANFRSVSAIVECLNRMRPELPQFVKDPAEPGRVRVFHTNGWVGQRQEGQHWGGDLPSDVAHQALEATKAGMVVDGWDLAPSQTKILMLTHRVLASEQGYSNLAQAFQYNDSYLKKENRLIAFLADVLEPAADAYDGKRYGAMFDALGGTVPVLKRQADKAGWTASFDTLMTLRDNGSVGEVVDHLIVSQRPGLPDRVEEWQHALAAFDVDGGVEMPRPLAELQKLRPVAYAEVKALRRYLDGHSPFETKHGVKGAEFENVLVVLGRGWNQYNFGEMLELAGAAAITAAKQATFERNRNLFYVACSRPKRRLTLLFTQELSNAALAKLQEWFGSGSIEALVF

SEQ ID NO: 64726 - protein, 577 aa, Mesorhizobium sp. LSJC285A00
MYLAALSINNFRRLQSATINFQPGLNVIVGPNNIGKTAVVDALRALLAGVDDPYPRFARDDLHLPKGGTSSGEITFGYVFKDLTGDDEADFLHALRPGADGALEAVLGVSYGDPDRSGRLRARKWCGEHTDVAMTPTMLDNLRSVYLQPLRDAEQGLRPSRNSLLSRLLHLLSDDAGRAEIADELAKLDAKLKNLKSITDTQDAIAGRHKTMLSEQFAQMLNVELTGNDFTKLAARISLVVDDFEIERNGLGYNNLIYMAVVLSELAMNPTAAFRSLIVEEPEAHLHPQLQAVLLRYLSNIESAAGEKPVQVFVTSHSPNFASVADLDSIACLVDTGAQVEAFHPRTVTFKKGKREKLKRYLDVTRAELFFARRIIFVEGAAELLMVSLLAARIGFDLRSHGVSLISVEGLNFDSFMPLFGKDAIKIPVAVITDADPQIAGADGKMEAHYPGPDEAIAVSANTASMQAMQDNLVRVFCGKKTFEYDFALVDKNREAMLAALEEIHPGIGKDLRAVVNGELTDHGKATALFKGMFERPTNNVQKGKFAQALAAKIVENKLDVAVPLYIEEAVKHACQK

SEQ ID NO: 64727 - protein, 574 aa, Mesorhizobium sp. LSJC285A00
MKLSEQQTDVVELPLEPIAITACAGSGKTRTAVHRLAEMRRRLDDRHGMVALLSFSNIAVDTFRRDYLALMRANDGGQQPFGIEIDTVDGFITTNVLRPHGYHVMGCGCTPYLVDGREPFLKNFTVFDGVRPNPTADLRISFENGDFSFKIGRNAPKKIPTAEAKKALGKLGAVGAYTHASARYWVLRVLKEKPYVLRALVRRYPHILVDEAQDVGPEHEAILKLMVDGGSRLSLIGDPHQGIYEFSGANGSFLSGYAKQLGVTERNLSINYRSVPAIVDLANKLCGRNDKAKRIAPEILNGAFFIPFKKDEKDNALATFRYMLKEAGIADKDGVVVCRSGEWADQWSGGEDGQGQGIVKAFADAAVCRDKFRRLDQAYDHTCIGIVGLLANQHRDLISKLSRPAGSADIMKLRRAIWGYARDPAAGLPSATLLADTQWHPLLVERAKSFIAFLESDFGLSAGENLGNRLAKKALLNKPLIQMPDLAQPDSPPQFRVSTVHKVKGESLEGVMYVVSKEHAEGLLNGTGTEVGRIGYVALTRARNLFVLAVPSNALGALEPRLVKMGFMKPGKAA

SEQ ID NO: 64728 - protein, 689 aa, Pseudomonas aeruginosa DHS29; identical to SEQ ID NO: 64680

SEQ ID NO: 64729 - protein, 582 aa, Pseudomonas aeruginosa DHS29
MPLMPDPQSPAEVASQRALDAMFRSLDAGEHFRLEAGAGAGKTYSLIKALHYLIERHKSTFPRKNKQIACITFTNVARDEIAARTDRSPMVYCDTNHAFCWSLISGFQKQLRGLVEAMPAWQERIAEAGGGLGNRVIEYNFGHRSIREDRVSLHHDDVLPLTVSLMEHAKFRHIVTDRFPIILVDEYQDTDKDWVEAIQRLFLGNPPSPLFGFFGDHWQKIYGNGCGRLEHPQVKEIGKEANFRSVKAIVDCLNRMRPELQQFVEDPDAIGQVSVFHTNAWTGGRQTGAHWGGDLPSEVGHDTLEGVKASLTQEGWDFSPESTKVLMLTHRLLASEQGYASLPSVFRYNDSFAKKEHPYIAFFVDQLEPACDAFSANRFGAMFDALGGNTPLLRSQADKAAWHDAMSQLLAIRENGTVGEVIDHLLNRRKPRLPEAIEKRERELREFDRASGEEMPAALAEIEKLRAVRYAEIKTLRSYLDGHSPFETKHGVKGAEFENVLVVIGRGWNQYNFGEMLELAGSAAIPPGKQAAFERNRNLFYVACSRPKRRLALLFTQQLSPDAIATLERWFLPESIRAVAFS

SEQ ID NO: 64730 - protein, 585 aa, Enterococcus mundtii QU 25
MTKIKLIKIKGFRSFENAKINVAEKSLIIGANDVGKTNLIYALRILFDKKISENDLELFDSDYCIYSSNKEISIEVHLENVVEDCLVSIFKGLIHEDKTIIKFVKEKGKPYTIYCGFNDETMTAFDNRFYIRYLFMECVDTKRDLNKFMKKERNTLLDNAKRSRKQDEVCIDENLEDTLQTSLTEINKSIGNLKYIEKALDTVNAELKKLSIHHDKGTLHFTAPETDMSKVLSDVNLSFKEENQEIGVGGDGKNNQIFLATWISKQTLNENNDDYVCFYVIEEPEAHLHPHQQRKLSSYIMEKFTSQIFITSHSPFIGTNFIPKDIIKLIKKDGRASAASNGASEEISEGVDEFNYRLNIITSDLFFVDGIILVEGPSEKIFYQALCDQLEIDLDFYNFSIISTDGVGFAPYITMCQLLEIPYSLRTDNDIFKKTRGNQEYYFCSGLNRLHKLFRDGIIMDEKIDGEFSDSDFEWRINSPEEEKIIPEEKRKRIGVFKELLESKGLFLADKDLEEDLIKQLSIETKWDEEKQDTLITHLKKKKATNMYDFVKESIAFDSLKNKDISKPVCYLLKEVYDFDLGEIK

SEQ ID NO: 64731 - protein, 521 aa, Enterococcus mundtii QU 25
MKQPTMEQMKVIEYDGNCVITACPGSGKTFTIVEKIKCHTKNLKSYEGIVAISYTNKAADEIKNRLKGENKKNFFIGTIDRFCLSEIIFPFSKFLIKKNIDSFEIINNDNSGDKNFDYYVDYLNSGKIPLNYIADISFLILNRIPECVNYLKAKYKMIFVDEYQDCEENQHLIWKFLCQQGIKLIAVGDVDQSIYSSFTDSNPEFLRELMTDEKFKSFVLSINHRSHQSIVEYAMRFKNEKYSTMNDMDLRVSKVNINGNERQIVSSIEKNIAGIKSKYTIEAMSNIAIFCRSNAMVSRVCQFLTIPHKDYSLNAFKNENDFNRFCKLLLVRFFQFKNKEVTKKECAEELVNLYKEKELYDNIKKNIDCLFSQEPEKLYMKLEIICSLYSETKKQCITEENRSELYHVLQDINLLNTFKPAEKDEIQVMTYHKSKGLEFDVVFLMDCYKYILPKEYQDRYDNLEADENLHYVGLTRGKKAVYILIGTERYRVHRSDYISAIESIFLSRNGLAKLRRYEDWN

SEQ ID NO: 64732 - protein, 599 aa, Acinetobacter baumannii ZW85-1
MHLSNIKLWNFRKYGDVSSVFDLTKPNLDLNFTQGINVLIGENDSGKTAIIDAIKLVLRTHSFDYIKVEDKDFFGDSKRLRIELIFEDLSDQEAKNFTEWLSWKGSGTDAEPFLKLNCDITRNDKKINPFDIKAGPDSDGYLLTAEAKEYLKITYLKPLRDAENELISKRNSRLSQILLGDTAFKEKNQNHELVQMFEGLNQNLKKYFKGEEISFIDKDGNNNTEVYEDGKIIKDKIDCYIKAFYDDNVLTEFNVSTTDLKSILEKFSLFLESQSNVGLGTLNRLFMAAELLHLNKESWHGLRLGLIEELEAHLHPQAQMQVIQALQKQKQIQLILTTHSPNLASKVKLENIILCSKNYAYPLGKSYTLLDEENYIFLEKFLDTTKSNLFFAKGIIFVEGWAEEILIPSFAKAIGIDLTSKGISIVNIGGVGFQHYANIFLRRDFPHLNIPVVIITDSDIRAYKRHNFEKIHKKKFNKKTSLKLIRIKNKSKQKIKYYPAPYWTLEYCLYQSQKLSEIFKKHTKIIHSKTPWNSNFELELAKKLIKKNLDKTGIAYRIAHDLDQEIEKEPHLQTLKLHETESNDTIYYLLEAIRYVTNN

SEQ ID NO: 64733 - protein, 678 aa, Acinetobacter baumannii ZW85-1
MLPIIKITDEDISYAENILLPNGKVFDEERRDFIRNLSTIDLQAVPGSGKTTALLAKLLILETKLPLPDNSGILVLSHTNTAIDEIKEKIHQYCPKLFRYPHFIGTIQTFVHDFLTIPYYSELYKKKINRIDNEFYNEYVGKCLDSLWLPCFKFQFSSSTIRKIQYIKNSNSEIFYKYRIEIRDQPILTQELNSKKLEISKPRGRARNYSDYTPEEKEELYNWFYAFKKSLLKDGYLNFDDAYFFANLSLSQRPNLIKILQKRFQYVFIDEMQDMDNHQYELIEKIFYNNSNSLSIIQRIGDKNQSIYNTVKIDSIWQDRDIVLRLTHSQRLSKPIANIIKNFALYPEYCNDIEGLNECLLKPHIILFSNNSIQNIVPYFSQLILEYKDSGALITQDKKDLKIKVISWNTEWKNDTESRNDPNKVRLEDYYRSYKKNEQKPKEDYKCLKSYLFFFDKRSSSLAPIRKNIIHALLKILRIENKFSEDGHPFTIQKLMSYLKARSQKNYEELNLKIYQCAIKVVRNEKNQALLDLKDYIPVFISYFDENHLISSKTIDFINNDETDIPLSMQNIYSSSNVIEENNLSIEITNVHSVKGQTHDATLYLESFFHEHESKSLAQQFLGNNIDQSAGIRTKQATKMAYVGFSRATQLLCIAIHKDRFEQYLGAIEREFWEIKEV

SEQ ID NO: 64734 - protein, 676 aa, Rhodobacter capsulatus YW2
MHIEKIKIENFRLLQDCCLDMRKKTTLLVGKNNTGKTSLAVLLEKFLERPDSFTYTDFPIPIRQKIISIDDCTNVEDFAIRLVLRIAYDETDNLAILSEFMLELDPERRHVNILFECCIDKKKLLRALPGDIKERKKFIENNLSGNFLDFKIFAFDDFGHTEETPYYLAHRDQLEEKERSDVRALLNFQVIHARRNVASSEDAGRGTKPLSAISTKFFRKRDIEAKDNEKTTGSGGDSIEKLRSMLAGIDDQLGEQYAQVFGGFLKSSRDFLGLGDLKVVSNIQSQSLIETSSQVIYGETDNFLPEHHSGLGYLNILYLLLQIELCRDDFARRNAPLNLLLIEEPEAHTHPQMQYVFADKIHGLISQTPNLQALLTTHSSHIVSKSNFEDIRYLSRLSLAEPVTIKNFHTDLSAKYEELGADGTALFQFLKQYLTINSAELFFASKAIFIEGTTERILLPLFIEMHDKENVDTTSESGLSSQNISVLEVGANARAFAPFLEFIGVRTLVITDIDTTRAVVSEKTGKTSYSACPVAESSHTSNETLKHFLSAPDPKEEKDFSEWHKRLVDGTASSGEGQFMVAYQLAQDGYHARSFEDAFISINLDKVKARKDTLAGLKNRGALDQFDGDDFYSLTTQILEKKSDFAGSILYLTLVEGESWRVPEYIMDGLKWIHRN

SEQ ID NO: 64735 - protein, 616 aa, Rhodobacter capsulatus YW2
MVSTIHSFLGEVISPFKRNIQQVFPKLFELPEFVALGDDHYNGDETLRKKEEHDRFKKAHGQLENRRRTVLGEDTAKVTGKREYDKEPDTYNAQLNRLIGEVNKEIRDKLASRQPREFFYNDTAFDNFNDPSYGHDGLIALACHMFESFPLLGRIVSDRHDCIFIDEYQDTSADVVRVLLRCLPEDAKTVIGLFGDSEQAIYSDGIGSAQSHIDAKELILVVKEDNYRCSPQVIDFSNKFRTDGLKQGVALKSLDNGTLETLESRQGSVKLVYDLAPPQIDTGDKAEDRKTNTASFRRALDALVEKTASDYPGYVQLKLTNKSIADDVGFGMLYRIFDDRYSEPRDRIRKTLDRLQFGELIDLVALYKSFPGDRRSYNRLIAKLRRRGFSVTSVADKAKLDKMLHSFESEDRAAYEAIKYAAECGLIKFSDSHKAFVDRRNELLAKLADDAVFTEFEELHRNGHRTKAQMSKEIAAMNMKHISVEILEGEYEDRLNDLKQKNFLDSLFSTELQLSEILAFYEYEDGEGDFSTMHKTKGTGIENVILVIDEYGWTTEYDFVSCFTKEIPESRREIASKKLIYVACSRTKTNLVCVRLMKSQEEADQIASFFPETVKL

SEQ ID NO: 64736 - protein, 594 aa, Rhodobacter capsulatus Y262; identical to SEQ ID NO: 62634

SEQ ID NO: 64737 - protein, 605 aa, Rhodobacter capsulatus Y262; identical to SEQ ID NO: 62635

SEQ ID NO: 64738 - protein, 522 aa, Varibaculum cambriense DORA_20
MNHSRLPDCKLDVRDNLILVGPNGIGKSSLIRCLDMLLGKSIQQLYYSISNSDFRDVNLPLCIEAQLTNLNSNERSFFPDEVDLEDESLTVRLKANLDGEDLTVSRFFPYGAANTSVGSEQRKSIGWTMISSDFSAKSLAPGRRTLVDDYLKEIDASGDQYKLEAAINALSGAINDSTAFTGALNSLASTLNQALESGVDDSKLRFVPGAAIEGNLLSDVRLEMEDKFGSMREVTEQSDGTKALISFAIFGLINSSGIIAIDEPETHLHPSAQRNLIEVLQSSGRQLIIATHSGAVASEFSPDNIAVMRESMSPAQPKVGFLKGRDEQKTLARWWISSRIELLTARHIIAVEGQSDRMVVERVAELSGYHLKRDGIEILEAGSCNEMKPVMGIFGDNGFGKQISILVDEDAENETANEQKNLTSVSMFVSRADLEDEYVSAIGADALWEALRKSTLFTPNILKNCAISDGAVKPNEDELAEFCRHKKRKISCAIVACKLLDKTSAQRVSSVVKVLQNAVQVA

SEQ ID NO: 64739 - protein, 567 aa, Varibaculum cambriense DORA_20
MQSKSHEVTAEQQKIFDYEPFGMVITAPAGCGKTEALAYRARGLLERYDFSGNGRRLLIVSFTNQARDNINERLKKYIGVKTLREHVTVCNFHGLASRIIRAHGQLIGIGSDWSLANSDWVGRELRAPGYNREDVNQARLAIRDAKLTCLTDEEVKKKLEGLPGRAGKIALSIEKKRMNEKIISYDDQIRVALWLLDDPRVTALYRNHFFAALVDEFQDLTPQQLRFVQALCGENITFAGDLAQSIYSFAGGDVTFIQREIAKSSSTQIKLLKSFRSAPEVLDTVNSLSSLTGSGHLTTACPAHWKSGGVAGSASFENENCEAEWIVDMSKSILENCPDHRIGIITRTGYRALTLKTTLTESGVNYTDWGSGIFSPEVARVLKNICSGIQAKSCSSSFEVLPYIQQQAEISPVSHTSELDDGCAWLLDQFFQRNFDLSEIHEIEKRIAARRGNETIATIGGVHCLTGHAGKGQQFDWVFVLGLEEGSIPHYRAKNQESKNEEARVLSVMISRARIGVFCTYIKEIRGHRKKPSRFIKFLKKTPGFLCGKESVEVWRRKADWSAIASM

SEQ ID NO: 64740 - protein, 691 aa, Paenibacillus sp. JCM 10914
MKLKEVSIQNYRRFLDTSLSLADDVTLLAGANNSGKTSLIELLENILNTAKTEYCVSDIPVALSKEWVDQAYSIFIKHFERNEDREKTIQAIVNDLFCLDAVPGKDKLLVSPTVVKIRVDYEVDEDIRNFADYIMDFDPDQCSIYFEYSFEVTSATFSQSLDKDFEKLRSRYEKLSEERDKITKVGFFKEKILGTYVSSIIEKCYFSDRQFQNKNEMELSHFRKLFNLYNIYAGRPLEDQNIGHSKSISKNVLDLAHQDDAWKAFLGALPDKILQPIEDLGITDIVRKVSVDGLTETISSIAQANGGNTGSIMLDLEISEETISSLINQITHAKYDLEGHYLNETSQGLGYSNMIFILLQLERYKRNIDPFLVNIFIIEEPESHMHPQMQNVFGKFLKKYYQEKKIQGIITTHSSEMVRVTEMKNLRVARPITPFISNIFDFSSFKESVSKDPILDNFYDWFYEIGFSDIVFADRVIIYEGDTERMLIRKLFTLDEFTVLNQLYIAFVQVGGAYAHNYRTLIEFMGIKTLILTDLDYAKSANIESLIRVSETTNATINNFYKVTYPEAKPTVTDLYEWKKNKENILFDGCAYLNYQGEKDGFARTLEEAMLAKYYNLTAFEEKNREDWIKLRNDDELKFTVPQEQGQYTIRDIVEHSSKGKTDFMYSVILNSLTKDMLPDYIEEGLAWLKE

SEQ ID NO: 64741 - protein, 373 aa, Paenibacillus sp. JCM 10914
MVEGITENIYLVNAPAGSGKTTTIKSMILKHLVEYPNDNILCITYTNRAAEELGKDMDSNRVHFSTIHSFLHNFLKIYFSHEQIINLYFEIYGPEIMRRISNDDGDATIIRSNERYIEKNGSLSLDVIKANLKTIHYNESQFNSLYYGGLSHDDLITFSKLVFEKFPVINRRLTKKYQLIFIDEYQDSSANVLKLFYQAVHATSTELYFLGDKMQQIYRNYDGSFEDKLLTLNKSIKLTTNYRSVPSVINILNKLYNNSLYKQAPAEKSLNTSVNHLPRIVLCDDVSEKLRIEKQNYPDALLLFLLNQKRFDSIGAGDLYRKYNNMERYSFIQQYSAVDVLINDSLDNPDILVKLLFMVNQIAEDYRAKSLGI

SEQ ID NO: 64742 - protein, 712 aa, Gluconobacter frateurii NBRC 103465
MQMFLSGGKDSFSLYDFSSHVWPVLDEIGERVGEISDNDVPSVSLDLWFEVGADDLYLVIPILPSTAWAGTLVGVRIELAPKSVPELIQRYRSAHDDGRAKAAALDNGPGDYVPWPKSLSDYLLQELKREYELRYFVLDHMQFDAAFQAVAGYEPLPLGSDPGGAAVLKSLIKVDFLNAQRHLADPSTATGGGRSEDLSKRLSRFYQRNLDQRQDDHQALKALFDSEVGLNKHLAEVFKDTLERLGRLGYPGLNNPRLEIKSALNPASIMTQDARVHYIVGGGAQPITLPDTYNGLGFKNLIYMVVEVLDLQERWKAEEEKRAPLHLIFIEEPEAHLHAQLQQVFIRNILELLDIPDEAGGSFASQAVITTHSPHILYERGFKPIRYFRRDLIGTDQITEVLNLSAFYAQETEHRDFLQRYLKLTHCDLFFSDAAVLVEGNVERLLLPSMIEKAAKSLRSSCICILEVGGAFGHKFKSLIEFLGIVTLIITDVDSVSLLPADHAGDDEDDDELEVEVEAPTAEAANEFDELLGGAAPAPAPRYGKKCLPSVSGAVSSNQTLVKWLPAKQTIAELFAAPDHEKETPQEGKTRVRVAYQTPVPVAWNGQNAELAGRTLEEAFGLENAAWCQSVDQRKLGLRLRGAVADPAALATGLHKRVSGAKFDKTKFALGVLTAPPEQWEVPAYISDGLTWLKAQVDLETEAELDGAMLGE

SEQ ID NO: 64743 - protein, 508 aa, Gluconobacter frateurii NBRC 103465
MSSRAQQPDTQADLDLRDCLQAQPPTSFNMVAGAGSGKTTSLIKGLASILAIHGERLRLRRQRVACITYTEIAAGEIWADVGNNPLIHVSTIHSFLWSIARGFQRDIAAWVANRIEERISELQQAAAGFGPRVQQKTRDKNARDIVRYQQQGEAITTVGSFTYGTGSDYAKGILGHDDIIKMSSQLMIRRPLFRTLVAQQFPFVFVDESQDTFPVIVEALMAVQKQEQARFCLGFFGDPMQRIYPTGIGTIPKPDDWRAIPKPENFRSPSAVLALANAIRRGGDDLVQVGGRKQKDGEQEVPVIGTARLFVLPADDHRDERVAQVRTWIAHANRDELWQSDANNDPVKMLVVVHRMAAKRLGFGDLYAALNDRAPEAFKNGFLDATAWPLRPLISFLLPIAEAVRDGRDFDAMRLLRTHSPLLAKDNLKGVNVAQRLNELREVSNQLAELMGPQSQATIRDVLALAKQHRLFAFDPRLAAYLEDMEADAADEDRPEDEEGEKRGRPFE

SEQ ID NO: 64744 - protein, 584 aa, Streptococcus agalactiae BV3L5
MEFKKLVIENFRNFSSIEIDLSNKNVIFGMNDSGKTNLLFAIRYLLDRSIRNKGFIKSDYHKHDISKPIKIQLEIDLSDREEDDEESLKSSHSRLLISTVAGARKNASLDTFLISLEAMYDEKELFGNPVLSWGSTLDDLVEVPQYGTRSDIDKIFQIVYVNPAIELDAFFKRNRKLLFSDDTKTDEDVALEKEIESSIIDLNTNISNLSLITSVQSQLTDAYKSYRKEDLEIKIQSEISISGYLDNLTPYINWNGDTQNYPTSGDGRKKLLSYAINHLISEKQYSSKVIIYLIEEPENSLHRSVQVSLSKQLFIQNIYEYFFLTTHSAEVLYEMNNTQLIKITNQQEATGHSSYYKVPSEFSNLKKKLNISLAQSIFYDRVLLVEGPSEYYLFSSIFEYISPDFEAEGKYLLQVNGINFKPYAKLYRELGIEFFVKTDNDLKASRGDKHEFSPIGFNRCIEILDDNIVAKLNNYRIDFSSKEERNQNIKAKKEELYTMEYSLVSQLNSKRLYISEIDLENDLAKVLSESERNEMNVSDFVNWLQSSKQYNMLEYIEGDLTPEIAHKIVKSEYFKVLAEFLDYE

SEQ ID NO: 64745 - protein, 513 aa, Streptococcus agalactiae BV3L5
MSDIATRDETIKKELLEYQGNILILANAGSGKTTFLAEKLKSDSKKLDNYQKLAAITFTRNATEEIKQKLVEIPENVVVSTIDSFLDNEIILPFLDQRYKVATSLQFSFQQEYKFNNFDIGLSQIMQNGIFATYDNPTARQGKNFKCEVALDILKNIVSASEYLKYKFNSLYIDEFQDCDQSMNDLFMYLKDELGIRLFIVGDDKQSIYQWRGASPRYIKNLWENENDLKKERFIGNFRSLPKIVDFSLALTPEVKIDSINETGSILYIETKQFALKEDVIRSLVDNGDINLDEKNYFLIGNNQHIEETVTQLGGIFPNEFDYVRKNPFIECTNGRFLQSLAQYYFLESFSEYDVLNNLFPDYNDDFRKGLLKKLKILRQNPERLLIEDIASYLGVPITQFGDKLESQILLEVLIDVENRILFDTSSLKNNLLMTTHNSKGLAADTVIIFVEYLIDRYKNTLKFEDHYVAITRAKSKIILIDNKTNYVSEINRLLCNNNGNFSFDNFIERRNL

SEQ ID NO: 64746 - protein, 712 aa, Pseudomonas sp. FH1
MHISKMTLVNYRNFSNTTLKFQRGVNTIIGENGAGKSNILRAIRLLLDDTMVRAAYRLEESDFCRSLGEWRGHWIIISVEFEEISADEAVQALFLHGTAALEGGPLAKATYNLIFRPKKEIRLKLAALDVFDDEELTRIRNAITIDDYETVFTGRSGADFSDPSVYQSIVGDFDTCIFSAETEFPEIGAKVPGFLSVTKEVSLTFIQALRDVVAEFHNNRTNPLFTLLKSKSGEIDPVSMLPITEMVRNLNASIEGLEDVQSVRNHIRETIKDAAGETYSPASLSIKSDLPDEAEKLFQSLRLFVGETDDGYEGGIHELSLGGANLIYLTLKLLEFKYQREKLAIANFLLIEEPEAHIHTHIQKTLFDRISYSDAQIIYTTHSAHISEVSNVSNVNILGRQGSYCEAYQPATGLEPSEVRSIQRYLDAVRSNLLFAKSVLLVEGDAEEILIPVLVKKLLGLSVDELGISVINIRSTGFKNVAVLFHDLRIRKRCAIVTDLDTTFFDVTPQPTDLEFLASKKRKAIGSQKAGAERKVGLDAFVAGNPWISVYYAPHTFEVDLVSAGNEEAFVRAVSKIYKAPHTINEAVEALRSGQPHLVGFRALLMAEHEGKGWFAIMLAEELDHQVAIPPYILQAIHFAHGHISPLLLTRILHYRVARQIHADPSGQPRLALLGGQVERFQRGEIDLMFLKAAVALALPGDAINSFMAGIA

SEQ ID NO: 64747 - protein, 594 aa, Pseudomonas sp. FH1
MFAWDPRELNAEQSAAVEEPSSVFLIACPGSGKTRTLTYKIAYELSRSMDKRIVVAITYTHRAADEIQERIEDLGVDTSKLWIGTIHSFCLEWIIKPYGIYLPELSRGYRVLDKHDRELMLDRLCAPYAKITHWDCDYYFSETGYHLGCKDVWKHETLHKILGEYFRELTDARQIDFELILWYAQILMRDQKQIASILASVFSYVLVDEYQDTKQIQYGLLTAILRAGAGRTKTFIVGDPNQAIYGSLGGYAIPVADFRAKAGIPIREMALTRNYRSSKRIISHFLNFNVYPTSIESAGSNASFPSKVSYNQHVTLPDLHDELVRLIQASLAAGYPPEEICVLAPWWILLASTTRQLVRMLPDQQFDGPGLVPFSNDIDNFWFKVSKIILTESSPKMLVRRMRWARDVISDLVDLGVDTSRLTQRLLLRECNAISISEMDGIAYLDQAFTALLERLGVALNSFPALVEHRDAFFRSSQSRIDRLQKDGAPYINDISFFRKVFRERTGITVSTIHGVKGAEYDVVIAFGLLEGMVPHFTEAASLDSANKLLYVVGSRARKHLHLISESGRPQGRYGNYAATEALFACAFDYDAAE

SEQ ID NO: 64748 - protein, 712 aa, Pseudomonas fluorescens FH5; identical to SEQ ID NO: 64746

SEQ ID NO: 64749 - protein, 594 aa, Pseudomonas fluorescens FH5; identical to SEQ ID NO: 64747

SEQ ID NO: 64750 - protein, 639 aa, Pseudomonas fluorescens FH5
MKLCSLRISNFQSFGPQPVPITFEDITYLLGPNGAGKTAVLQALCRLFAFEPGLRRVRPSDFHVPVGLSDAEGGTTLWLEAEFSFPETADDEDNDTVAPHFDHMRLQATGDVPRVRYRLTATVDDEGDVEETLVYVTQADADGNPIVSSIVPKHQRNQIHLHYIPARRDPSDHIAYGATALLGRLLRATQWGGDRNTVKDLTDQITSCLAGNASVTALGQSLNASWKGLHKGAFFAEPKLTFVNSDIEMLLRHMSVSFTPGHGENEVDFTRLSDGQKSMLYLSLVLAAHSINRDVRSGKNTAIDPAKLKPPAFTILAMEEPENSLSPHYLGRIVNALKGSIGVDAQALIATHAPSMLRRVDPENIRYLRLGSNRCSVVSGIALPAKEDVAHKFVREAVQAFPEIYFSRLVVLGEGDSEEIVLPRILQAKGAPVDESAVTIAPLSGRHVNHFWRLLSQLGTPYITLLDLDLARYQGGWGRLKYVNDQLSLFEPSKVLPYTFPAWDDANTRIREKNVPITGSSETVFDHLEARGVFFSAPLDLDFAMLTAFPKAFNAIPMAATPENQKAVLGKSHEGADQYTPQEQSWFDAYHHYFKLNSKPAAHLSALSSLSDPQLLAGLPPVLDRLANAVIAALEESPE

SEQ ID NO: 64751 - protein, 560 aa, Pseudomonas fluorescens FH5
MIHPDRWMHSPGLTLEANAWHAIKDTEHSLVLLAGPGAGKTEILAQRADFLLRTGSCRYPKRILAISFKSDASRNLKDRVSLRCGWEQATRFDSFTFHSFANRIVSRFRVLLTGPDTLKPDYSIGKEAIPGEQITFMQLLPMALKILRMSKIARNTIRQTYAHVFLDEFQDCTSDQYQLIKLLFEGTPALLTAVGDTKQTIMGWAGALNGIFKLYADDFAARPLRLYRNFRSKPRLLRMQNSVIRDIDPSALMPDEMIAGDDGVIRAGNFSSSAAEAVSLANVIQKWIEVENLRPAQIAVLFRGEIHLYGEELMEQLAARNIPFRNENTLQDLLKEPAARLMIDYLTCLYTRGANKAWSRLMDLFAPFDDEGNSDRTHKSFERCYKQHQKQVRAAAKTAAPFTDWWELAKAFFDTLGHAVMTTLSSDYETKRRLKEIIRDTRDHITSLLQVDPDLTRALARFSDDNAVRFLSMHKSKGLEFHSVIILGVEQQSFRGKIGEERQVFFVAVSRAKDRLIITTANQRRRPEGISAGKRWDVARQPHVAFVTYVTEHLSPKQPQ

SEQ ID NO: 64752 - protein, 650 aa, Pseudomonas sp. FGI182
MKITKISAVNFRALQNVTLDLRDSLSLLIGRNNSGKTSLLVLFEKFYEPGMSFNYHDFPLAVRKDLAAIDHKTDVLPLSISMKVEIEYIETDSLRHLSEFMLDLDSSNNNVKILFECVVNKDLLLRDIEQFDGERERFLRKNLDKYLQVNVYAYADEEDLLLENRSRLVKKEIATVRDLINFQIIHARRDVASSEGGKKMLSKLTTQYFNKANKNVTDFDPINNLLLKIDESLESSYKDFFEPFLKTSKAFLGIEDIKVVSNLESNEVLENSSQVVYGDRSEYLPETFNGLGHMNILYLLLSVEIKKESFAKTGKNINLLFIEEPEAHTHPQMQYVFANQIKSILNEIENIQAVITTHSSHIVSQCDFKDIRYLQNLDGCTKVKNFYSELKAKYGKDEDSFKFLEQYLTLNSCELFFASKVIFIEGVTERMLWPYFVELFDKSKNQSKDHISLFSQNVTILEVGANAKAFKHFLDFLEIKTLVITDIDTTKKTVDTSKVKPKTIYPSFKVLGADHTSNATLKHYYEAPDFSEEAKFSSWFEKLVEHKLKHSYPKIHIAYQKQEEGYHARSFEDAFVHLNRDVIKKKIDKINGLKNTHEFDGALDAYDLIEKVLDKKSAFASSLLYLALTDDEVTWRIPAYIVEALEWISE

SEQ ID NO: 64753 - protein, 594 aa, Pseudomonas sp. FGI182
MHAISTIHSFLNGIINSFRIDLHKVIHELFLLTEFRVGQAMEDEKEYKKREHERYKKAYGKYADKAYHILKIKEDKVLGKPMYDKDPQAANAVLNEKIKQLNISVLEHIKKTSPQKVRYNETAFDSFRDLSFGHDGLVKLSVSLMCERKKLRKILADKYDYIFVDEYQDTSPDIVKAFLDFVVKDQDIVFGFFGDSMQGIYEDGVGDLDCYVQAKAIKKINKEDNYRCSEQVVKIINNLRDDELEQNVAFKTRENGDLETLADRQGRVKLVYSVCDDKPTQHSPREDKELYLKKLNKLIEVARGIDSYKMLMLTNKAVASEAGFSQLYEIFNSRFGQATNENLEKLLAICHFAELYELYEDYENKRYAKVIRFVKKSGFVLDSVFHKDELLAAFKGVFELNSPAHLAIHEAFKLKLLKQSDSYERFMRRREEFFEGIKGNPRYAAFKDQYVSGFDSLSKLSKTGFDIDEYEFGDLERDVRRELFYNEYFGGKITLGEVFKYYDYLSEKTNFITMHKTKGSGIENVLVVADEFFWRDYKFGNVFSQGNVTSENRKIMYVACSRAIKNLTCVRIMSTEESSSIKDYFNEIEYVHLD

SEQ ID NO: 64754 - protein, 743 aa, Phaeobacter gallaeciensis DSM 26640
MTQLSCFCQLGDIRAVASISFVSTGDEFTFPNTTNDCYHLRSLQGDWMRLGSISIRNFRRLNDVSVDFESKETVFVGPNNSGKTSATAAIRSFLGNREFKIHDFSILAIASIDAYAPRNESSLPQIELDLWFHIDPDSIAFGRVFALATSLSADFSEIGMRCSFAADDAAELWKHYDAAFPTKEDGTRKRPLSFFLGMEGNLKKYFGIKVSSLEKLEEEFVATALSAQEGKKIVHSLLRVDFVDAQRNIDDENAARSNRLSDAFATYYRRNLEQAELAEEAVAIIEQNNENLTRHYDERFRPLMTMIGGLGLPSDNDRAMKVVSTLSSEVALRGNTELFYVDASTSHELPEAYNGLGFKNLVFMAIQVDHFYRQWLATEDNRPLCQMIFIEEPEVHLHAQVQQTFIRQMWDVLTADAPEGESKPQLTITTHSSHILDTVDFSKIRYFRRCHINGEQDGVTYQGTTVHSLRQFQPEPLELGGDMIEPEESLSFLKKYLRLTHCDLFFSDAAILVEGSAEKLLLPRMIDISAQNLNKKYLTILEVGGAYGMRFAGLLEFLEIPYLVITDIDSVDPARNRASCVATHPGAVSSNATLGYFFGETRVAELSGNTFDDCLQAEGMRFVAYQKPVEVNRQDNAQTFHGRTLEEAFVFENLDHFHADGLSIGIDLPDGRAELQEAVWRRIKSDTFKKTEFAMDVLAFEIPAGGDEEANAGENRDWNVPHYIDEGLKWLETRLSQNLGAGE

SEQ ID NO: 64755 - protein, 614 aa, Phaeobacter gallaeciensis DSM 26640
MTAELKPTEADKKIAECIAKDVSFSVIAGAGSGKTTSLVEALKGIQRSRGNELRKNGQRVVCITYTNRAVGVISSRLGFDDLFYVSTLHGFLWAEIARFQDAIRETLRDAIVPQHMEKAREKDNGGTSQAAQKARKDLERLTAQLAALNAHKPPICYEETVISDYSKCVLNHDDVIDVAAYLITNKPLLRKGLGFKYPYIFVDEAQDTFPQVVEALNAVCADEGLPIVGYFGDPMQQIYDKRAGGFAGPKGSEKIPKEENFRSSTSVIDLLNNFRTDLKQVPGGKNSDVKGSVLITIAQAPDPAGPRKTYTSEQLDEVTAKFEEAVEQWGWTDITPVKNLFLARQMIARRLGFVTLHKLFTGDYSSSRSQSDYEDGTHYLLKPFVDGIFSLVDASRNNYPKKLIETLRRISPAFDDTGANKSKTLKQMLEEASKHAAALAEKWEGNTVKEILEYCSANALYPISDRLAGQLARAPRQAYDSGNEDHQREKGDWLADEFFKLKADELEKYIEFLDENSPFSTQHGSKGEEYENVLVMIDDIEAAWNTYSFSKVLTPGVAGNPTDRQQELTQKLAYVCFSRAEVNLRILMFSKAAEAAKKELVERGLFQDSQVSIL

SEQ ID NO: 64756 - protein, 789 aa, Burkholderia pseudomallei NCTC 13178
MDIPEVSAHSSATDPASSSAPSAPAVPPAETVALPGDSPIRLACVEVCNFRRLAKTRLEFDDATTILVGANNSGKTSLLTVLRNFLSDSPGFRAFDISLSQWAKLRQLSELWEALDEDPTTESKDAEKWEQQYRQLLGCMPFIDLWFDAKEGAYNYVAPFITSLKWRGGAVGVRVRLEPVADSDELRKLAWRYREARSPVRTLPKDGHAWPMDLLDYWLRYSADLRRIAVYRLDPAKGPLATEQCNELQELPPDSQPVELQLLRKLVRVDFVPAQRGLGAEDDETRSESAGTRPGLFSSQLLKFARQHLNVAPSGHGNREDLVAAIARAQAELDDSIYKALQPAMEDVEVLGYPGLHDPQQLHFRTRIQTADLLAHSTAVQYRLDETAVDESLPEHSIGLGYQNLQSLSFMLVSFRAARLNPPQGSPAAVHLVMVEEPEAHLHVQVQRNFSSNAHELIRPKELVHSNLRSQLLISTHSSHLAHGDSFTRLRYVKRIASTGAGVRPSSEVVNLGDAFGDDIQTRTFAERYFQVQHTDLLFADAAIFVEGTAERMLVPLFIERDFPKLAKKYVSFLDIGGSHAHRLRPLVERLGIPTAVITDLDPVVPTTSKGGRVVRAAVHIAGQADLECGNDTLTSWHPKLADFHAYAKPTSAHLEWVSDSGVKVRFAWQLPVAAASDQWPSSFEDALVLTNIDWFKALDEEKDSVSGKKKDHRGTLGKVIGLVLDHSDHTELLKELHAMLHGNFSKGDFAATLFERLNAGQALACPTYIADALAWLSGQLEATAGETE

SEQ ID NO: 64757 - protein, 576 aa, Burkholderia pseudomallei NCTC 13178
MRVITYTNNATAVVNGRLGENYLTAVSTIHAFCWELIKGFDEDIRDALLARNAESLASAKAKALSKAKGESDRDREKYAEIEAKAEEIRKIDAFIYHPDRNTYGQGALSHTDVLHVTAWLIRERPTLQRILEDRHPLILIDESQDTMKSVLDALFELSMSRPGHITLGLLGDHRQRIYPDGHDDLPSHVPEDWARPALQMNHRSQQRIVELINKIWDADIEGRTQSKTGVPQHSRTEKNGGTVRLFVGDTKTSTAEKIRRESDCALAMAAETGCAAWQDGTRGYKTLALEHKLAAKRGDFFDAYSAMDLLDKDAAMPKSNGERTGPAMVRPLLGPMLELAECLQADGSLNEFAAVDVLRRHGTLAKLPETSAERQAALDKLHAAVVKFAGVISTPEATVRDVLGPVLEGGIFDADPRLVQAYGDTSPPPPEPKPRSKEAKEDRRRRGWCALFGAPWQQIARYRAYLSGDAELATHQVVKGSEFKHVMVVMDDEEAGGSLFSYDKLFGAEELSSNDRENVDEGNETIIDRTLRLLYVTCSRAEESLALVLWAKNPTAALDAIKRSEWFAANEVSALE

SEQ ID NO: 64758 - protein, 711 aa, Sphingomonas sanxanigenens DSM 19645 = NX02
MHISRVQLVNYRNFANATFRFNAGINTIIGENGSGKTNLFRAIRLMLDDDMLRWAHKLDDGDFHRGLGNWRGHWIIISLEFSEVSQDEAIQALFLHGTGVVENEQIGTATYNLIFRPNAAIRAKLGELEMGDQAGLEALRRTITIDDYEPVFTGKSTADFADPAVYQSLVGNFDTVEFPDELSPPEIGGRMPAVLSVSKEVCFTFVQALRDVVSEFQGQRTNPLLTLLRGKSGELDADTLDPITQRVKDLNEAIEGLPDVGEMRSHIRQTIRDAAGEAYSPARLSIRSGVPTEADKLFQSLKLFVGETDDEYEGAIHELSLGGANLIFLTLKLLEFKYQQAKRACANFLLIEEPEAHIHTHIQKTLFDKLTYPDTQVIYSTHSTQISEVSNVENVNILGRDGGRCESYQPTAGLATPAIRSIQRYLDAVRSNLLFAKSVILVEGDAEEILIPALIKEVYGVSLDELGISLVNIRSTGFENVAVLFHDQRIRKRCAIITDLDAAFFDLAPDMLDTDDETRAKERATASQNAGAARRARLTAFIDGNDWQSLHLAPHTFEVDFVAAGNVEIAVAALPTVYVDPATIATATNELRSNNAALYGTRILTMAKSAGKGWFAIQLAKLITPTARIPAYISEAVFTTHGRLSRAVATNIIEYRMLKSGLPELLGDDYFDEVRALVRQFSNKEIDTQAIIAGVGAVLPGDAVLDVLGYA

SEQ ID NO: 64759 - protein, 611 aa, Sphingomonas sanxanigenens DSM 19645 = NX02
MVFVWNKDDLNDEQVDAIRHPGSVFLSACPGSGKTRALTYKIALELSRLESEKQWVVAITYTHRAAEEIEERIERLGVDTSRLWIGTIHSFCLDWMLRPYGILHDQLKYGFRVVDQHESERRLEELGSQMRPRVAPAICGYYFTTNGVVLAAPAHSQASVHAVLEAFWEGLRDERRIDFEMILLYAWELVRDNPTISILLSSIFKFILVDEVQDTKEIQYAIVASILRAGAGRTLAFLVGDANQSIFTSLGGYAMPRGDFQQLSGVAMAHKSLSINYRSSDRIVQYYSNYHVAPAVVTAEGAFKEYPSKISFDQQIAHQGFEDEIVRLIRYNIEQLQIPPNQICIVGPWWMSLAALTRRLMAAMPDQSFDGPGMAPFARDQDNFWYKVARLALTEPSPRLFIRRLRWAGEVLADLHHAGVMLPNVTRRDILRICNTIQIASQDGLEFLRLFFEEFSSGVGFNPTAYVMLAEHHETFFARSERQIERLLASGVQGVNDIAMFRRTFASRTGITISTIHGVKGLEFDTVIAFALLQGMVPHFAEPNPEESAKKLLYVICSRPRKNLHLIAETGRVDGRGDPYVCTTVLAACRHAYDQIAADAGAGADVEPADL

SEQ ID NO: 64760 - protein, 798 aa, Enterobacter cloacae P101
MKIEYIDIQNYRKLKTCRIRLTEEETLLVGANNSGKTSAMDALIFFLDQRGRSAASLASGKSPSLRKLGAADFTLSNWHQLNQFGQAWANAEEVGEKISDWQPLCPTLDVWLKVEKNEVHRVRHLIPTLKWDGGLLGIRMIYQPKDLDALKADFIAHFKAAEQLRITAEKNAEKDPGGSVSELSDFKFSVWPGSLREYLEREVSRAFEIKSYILDPAKLVTDKGSKFVPQVLVEGQLPLDFYPFNGLFKVDIIDATRGFSDPYVTTSSQYGASNLASQINQYYNRHLNPTDLPCDEDLDALEAIAFAQHSFDGRLNKVFNKPLKEIETLGYPGFNDPHIRLSSRVNPIDNLDHEAAILFEIQKTSHSAGVPLMSLSEKYNGLGYKNLISMVFTMMSFRDQWMRVGKAGLRKPEEDVFVEPLHLILIEEPEAHLHAQVQQVFIKKAYSVLRNHDDLRTSTNFSSQLVVSTHSSYLAHEVGFEKLRYFKRKPATGPHDVPTADVIDLSCTFGSGKTCSDDVLQTAQFVARYLKTTHCDLFFANGIILVEGAAERILMPHFIRNNPNANTSLDNSYISILEVGGAHAHRLRALIDILGIPTLVITDTDAQKPPLKLPADDQKGSSGTKPKAIRPEFGKGYITGSHTIKIWLDVEGGLDTVLRMPEHEKVRGKVRIAFQYGIPIKFGKEEEVEAFPYTFEDAIALTNPGLFKKVEKPTGMMKKMQDALNLDTLEQCCEKLYLALKDDKAEMALDLLYCADPAELAAPKYIQEGLDWLKKELEVASRDLTPEVPKVTDVREGE

SEQ ID NO: 64761 - protein, 622 aa, Enterobacter cloacae P101
METPSANEPVVEQLFSYLDLDNPRSFLLFAGAGSGKTRTLVSVLEKMKKRYSSELSRSGKRIGIITFTNAACDEVQRRLFFDANFKVSTIHSFCWDLINPFTSDIKLWLKNELEKSIDQLTRDIEKSRKPDGITAQRNRRSLASKTKRLQHLDKIQKFSYSPTSNRPEKGALNHSEVINVTAYLLQNEALLREILFSRFPVLLIDESQDTNKYLIESLIMTQQEHPTKFCIGLFGDMMQQIFSGGKSDLASPLPPGWESPEITINHRSPVRIVNLINSIRQYNDAHIQEPGPDAQPGTARLFVVDMNTYKERADIERQVAEYMAEQAADTAWNNKKSVMVLTLEHHMAARRGEFENFFLPLLEVERLGDAAINGDSQEITFLSSQLWPLIDAIRSDDDFKIATIMRKYSPVFSSSRLEYAHDPLLLFREAQCQIDKIKVLLGENLAFPILEVCKLIHEGELLILPEAFLLHLALVPHKDDESTEEVDVNKEHEAWSRSLSASTRELENYISYISSTSSYDTHQGVKGLQFPRVMAILDDEEARGFMFSYDKLLGVTPHSKTDQENESAGGDSSPKRSRRLFYVICSRAQESLAVVAYTKAPDLVERTVIASGWFVKEEIMHM

SEQ ID NO: 64762 - protein, 608 aa, Barnesiella viscericola DSM 18177
MYLSELKLWNFRKFSKNDGTIEFDSPHLVVPFKKGINILIGENDSGKTAIIDAIKLVLRTHAIEWIRVEEKDFHEATDSMRIELVISDMSENEASIFTEWLSWDNKTSKPYLRLIYAANIINGQIIPGDVSAGPDANGKVLAFQAREYLKTVYLKALRDASIELTAKKSSRVSQILQGHNLFKEEPGQEHPFVTYVKSANRSINSWFNDELQALGKDGLPILGTSNKEQIKDKIDSFLHAFINSNINSSLTITEPKIRNILETISIVIEFAQNMGLGTMNRLYMATELLHLNKEWDGLKLCLIEELEAHLHPQAQMKVISALQCQKVQFIMSTHSPNIASKIKISDKENTNIILCYDSDVYPLNTDTTRLDEDDCIFLDHFLDVTKSNLFFAKGVIIVEGWAEELLIPVIANKLGYNLTNKEISIVNVGSTAYIRYANIFIRTDGKILNMPISIVTDLDVSPEKIKKEEVELDTIEYSEISHEVELEKSKKILDSLALPDESNVKILISPHWTLEWCLYLSSTLNECFKECVSKVHSKTEGFKKNKAGKYDEEKFKTTLIKKLKDRTLDKVAIAHELCQQICSLDTLAIPEDDSIYYLVEAIKHVSKV

SEQ ID NO: 64763 - protein, 593 aa, Barnesiella viscericola DSM 18177
MAENLEIGDAILVLSHTNTAVEEIRKHLSKKAAKLFEYPHNVSTIQEFVDKFLAIPYYENKYKRGIEIIDKDRYDAEIQRILSRCWDRRILYCKHQFDFTSVRFISSFGEPRIGLGIEGSDISYKIPTTWRGNEDFNKQYVCNWLLKAKNEILEKGILHYDDCYYLAEEYIKEYPEIKSVLQKRFKYILIDETQDMQLHQLNLIDKLFYSDNCILQRIGDPNQSIYNAVTDTCDWLPRNPMYINNSLRLSKEIADVVNPFTLITGDDGTGKARFVVNGKNVLDSPILPTLLLFNEETMPLLKGKFKDLIERNNLQNTINGKKYGFHIIGWNAKISEPEFNIEKLRLDNIFPNTTKVTTSKTYDTISEFLQFSENETISQCQKTVFAILCHILRLSGVVDVNGRNFTIKTLLKQYKNNELIILNQTVFKISVAIKQNDFETAYKLLKQVVDSDLKSKFELQQNAYVDNFIGNTFVKYNNEEKEEEDSIPIKIGTVHSVKGMTHCATMYVETFFHNYECKHLIKKQNRGGFQPSPFFKDIVDKKSSRAKQAMKMLYVGMSRPTHLLCYASLKMNWSSDALKKMRESGWEIIDLTI

SEQ ID NO: 64764 - protein, 691 aa, Barnesiella viscericola DSM 18177
MYLSILKLWNFRKYCAMADGKPGLEIHFQKGVNVLIGENDSGKTAIVDAIRYVLRTQSGEFIQFDDKDFYQDPAGNRKDEFKIECVFDGINEQDAGLFWEWLSWSEDKTKYLLKVWLYVKRKDNVIMPTFSAGIEGQTDRMDSEARELLKVVYFKPLRDALTDMTHGYKSRLAQILSAHELFKTEKDVQGNITKHKLETDYEKLKKEIENYFKIGGSGESITSEINSFLKDHFLLKGDPRKAEVKLTGGELTEILRLLDLIMEGNKSGLGTLNLLCIAAEMLLFNNQKKGLKLALVEELEAHLHPQYQLRLIEYISSQKKNEQFILSTHSITLASKIKLANMIVLKGNDAFPMSSEYTKMKPADYKFLERFLDATKANLFFARGLIMVEGDAENLLIPAIAQLIGKNLYQYGVSVVNVGSTAYKRYVNIFKRKDGKSFGMPIAVISDLDVRAFEYYDDNSKDRKTPKYWLRDDLRPELEKISTEVDYDAMSTVFESKSAFEEEVRKHKNANFKPIGETIDRMKDILTEDKRVALNEDILARIREEKRTRLENAINADKIKIFLPQAWTLEYEIAGSGLYKLLATAIKAAQQEKDHPELEITDKILNQLWNDVTNEFPDEGIPTKEVAYKIFEPLNDGTVSKAITAQYLAGILAGELAPVSDGTVNRDKVKSIVENDDKLKYLVEAIKYVTE

SEQ ID NO: 64765 - protein, 714 aa, Barnesiella viscericola DSM 18177
MPFATDEEIKIAHDILLKDKKPFDSDKVNIIKEDSSCYVQACPGSGKTTTLLAKLIILANKMPLPEGKGICVLTHTNVAIDEIKAKLGTKADVLFRYPNFFGTIQTFLHKYVTAAALHYFYGSQITYVDDEMSNAVFLKKYYKLPIRESKLRGLIFKRSTLKEHTINAAEIEALGGVDMLTAANVIKKKKRVDKYIFQLKGYNWSQIPREYRSSIQTKGNSIQNSLILSFRVDWNSNKIITDSDSIRVDSPSGAEYMKIKEEMFREGILSFQDAYDLAFRYIWEKELDFSRFSDKRFKYLFIDEVQDCDGLQVDLIQKIFDENKVVIQRFGDYCQAIYERDECSGPENDKLKDKQVLHMHDSIRFGEKIAKPLRSLCMVPNDKLVGNDEIPSVTPIIITYEDPLSVLPKYVELLNTTLIPEMNNRSISDIANQEKREDPLHRINVKACGWVGKKGASAQKRYIESYFPQFEKKNAGPKVEGVSFNEFILKNLHGTIKEHATSIIQGILKYLDLCEIRNGNRRYTKTSFLEFLTATNIEQKENFLKEVMNWALLIAKSNSDDDINKIRNTIHQYIIETILPLYRKEETPDALSFFNAINENLPKGQATEHRNVYHGDSGTIDIEVSTVHAVKGETHAATLYLETFYNRHHESDRLAEQFKGVAYTGTDADTLKNLRVAYVGMSRPRYMLCVAIQQDRFDKIDCDELRKIWKVEKA

SEQ ID NO: 64766 - protein, 686 aa, Bacillus wakoensis JCM 9140
MFLKELEIYNFRKFKEKENGDPGLLIKFNKNFNLIIGENDSGKTAIIDAIRLTLGTMSMDNPRISEEDFYSDQQSSVDYFRIECLFTDLSAQEAGVYLEWLSFNGCGEYELQVRLDVRKVKNGYIANRFERSIKAGPKNADLNLDGTARELLKTTYLKPLRDAESELRPGLKSRLAQILQGHSAFKVNEGELHVLEDILSGANKQIEEYFDSKTSHQEESIREELISYLNEFFPKTQDSHNPSFEVSPAKLNTILRKLALTLEENISGLGSLNLLFIAAELLLLNNRETLGPSLTLIEEIEAHLHPQAQLRLVKYLQETLLKEHSNGQFILTTHSTSLAASVSLKHLILMHNGFAYPLSEEHTKLDIDDYRFLERFLDVTKSNLFFAKGVILVEGDAENLLIPAIAEAIGRPLHKYGVSIVNLGSTAFKRYSKIFSRSQNWYDLGFPSLNLPVSLITDSDIKPFEYYSEENKDFFEYLIESQDHLLEILNECGIDDKFSYEDLNITSFQKVSDLKKALHEAFDLDEASIIDNVLEKSTKKQIKAEYITQLEEDRIKSLKEKYENDANLKVFVAQHWTLEFMLALSSLKKHLATAIHESRYKHPYNTTNKQKLDSIVGLISDKEVEQKKVGYLIFKPLNEKVVSKALVAQELASLIYNEKEALGQTISSDPFLKYIVDAIYNVTEPR

SEQ ID NO: 64767 - protein, 626 aa, Bacillus wakoensis JCM 9140
MEEQKFIEYIERQLLPKGSSFTEEQKQVIFSEGSANIIAGPGSGKTTVLIAKFAYLLQVVTTGRGICIITHTNVAVDEIRTQLKRVGINNIVYPHFIGTIHEFFNYFFSYKAYQALFTEKTPALLEEDDYTERFKIKFEHYRTDNYRGRAPISKMKSSYLVFTQDNKITLMSDCHYSNERIVLNSLVDIISNGEIRHNDTLSLAKWYIEKHIEQIRLAFSSRFAWVILDEAQDTSIIQFDLLNQIINLNEINFQRYGDPYQSLYNMYDHNSIDAWVPYEEKGMFDSIELSNSTRFGNSIAKILKTTCIEEYSSFNGNPEVNSFKPHLLIYNDKSDVIPTYLSLVNELYSRNESFKRSKRKIAVVGSEHAHLKQYKQSYDKPQNVKIRTESIIRLLYNIIVKGFYSSLKSNRLTQQISLKDLKALLSSELIELKSNIALILKEVINNNGVYSDVNTELLIAVFNEVIKHFCPTETVELNYADMVALVTKESQSTFQTYTSSESSKKELISNEELFFGTVHAVKGETHKATLLIDSSITEFKFTPDEVTYNLVDLIFEYLTGDHIDYMSTGFDRGLQQATKKALKISYVALSRPTHLVCVAVEGKILGDNLKYIVDKSSKFGWEIKII

SEQ ID NO: 64768 - protein, 682 aa, Bacillus wakoensis JCM 9140
MYISRVEIKNYKNFKANIIEFNEGLNVIIGHNNAGKSNLLRAMALIYNPSVKKNLSIDDFNKQLTLEELKKQPPRINVSITLSQEKEENLMGDDLVVVSQWLTKLEEPYEAKIHYEFCLPLKHQDEYEQKLSTATSVNDAWEIIDKNFLRFYTYKIYGGNLENQITVDSEYMKKFDFQFLDAIRDVERDMFSGRNTLLKNVLDFFMDYSIKSNQGLDDDEKEQQIKEEKKKFEDQAKVLMDSLNQRMLEGKKQILSYSKEIGASFDNAEPNFAGGITDVELYSALKLIVEHHDGIQLPITHNGLGYNNLIFMSLLLAKMQVNASETYLGSNAKVFPMLVIEEPEAHLHPSMQKQLLKFLKKNLAEKKVRQIFVTTHSTHITGALELDELICLYKGENETKVSYPGKVFGTNVESKKYVQRFLDATKSNMLFAEKLILVEGLAEQLLMSIFAEYLGKFLEDEHVAVINVGGKYFDHFLKLFNSNNSAAINRKVVCITDRDPVRKERLIEGESYTKCYPFEMNIEADKYEYKISKQDVDYSTNIKFYFQDELKGKTLEYDLVRFNPMLKMLVTDSMSNKEEIKALMKLFQEGKDIDKLYSRLSKSKENTRIIDGLKHEELSWSEDDKKIALIAARYLNSVGKGVNALELAYALQENLAKRGSEDFVEFVVPDYIQEAIDWVCEN

SEQ ID NO: 64769 - protein, 579 aa, Bacillus wakoensis JCM 9140
MITITSSDLIDIEQHFKITAGPGAGKTHWLVNHIKNTVKNSARLEKTRKIACITYTNIAVETILKRLGAGVTDRVEVSTIHSFLYKHVVKPYLHYLSDEFEINVSKVNGHDTYGPRYSIVKNWLENHKRVDELTHPNSYKQLLFGQKLDSLFIWLNNLQYMYDSDGNLKLVGNQEKVGGVRKVTDILADDLISYKKIFWSSGKVDHDDVLFFSYLLITRHPFILNVLRAKFPYFFLDEVQDTNPIQAKIIKLIAKEETIVGIIGDPAQSIFAFQGASIDEFINFKLENMVEYQILENRRSSNQIIDLLNEVRKDIAQSKYKNVDGELPILFIGDTVDAYKKVKELCGEGSSIHTLSRDNPTANAMKSLVALNGIDTKLLKKFKEADSNKDRPRIILNSIEAVEFARIGDYKNALEKMKVLFTDCPEKDRVNNSIKLLQELLTKYDSYNETSLIAFYTVIKSHIPMSTFKAGAAKDFYDGITYTQLAICINYKEDTSQHRTIHKAKGDEFENVLLIPSSLDFLLNPDLENEEDRVYYVGLSRAINRLYIVFSKLTKKNQKFIEEQYNIKVEDLTKVHHLI

SEQ ID NO: 64770 - protein, 687 aa, Bacillus akibai JCM 9157
MYISELKVTNFRGFTSEPTAIEFKEGINVIIGQNNAGKTTIIKALEILFDNRSTKKLNINDFNHDIEIEKLKSVPPKICISAKLLESDNEEPYSDELVTVANWLTNIGTPYEAIITFEFFLPENEVDKYKKLIGSMISTDINDYWKAIEQHFLKKYISRIYVGYPDLQNQVNSSELSRFDFQFLSAIRDVERDLFKGNNALLKEVIDFYMDYDIKNDRELDENEKLKKIQSKKDNFTQDSRQLLKSLKDRMSQGEEQILKYVKSTGAGIDNSKPIFEGEILDTELYSALRLIVEKETGIKLPATSNGLGYNNLIYISLLLSKMQKDSSGEYLGSNSKVFSILAIEEPEAHLHPSMQYKFLQFLKSNKESEVRQIFITSHSPNITAAVDLEDIIVLQKLNIETETEEFKDVIKAAYPYRVFETKEGNAQYEEDKKSKDYVKRFLDVTKADLFFAKNIILVEGIAEQLVVPEFARKLGLDLEDSHTTVINIGGRYFDHFLKLFDTEKSPYAINKKLACITDLDPVRKKLNEESSDDTQEEVDDDSSNWEKCQPIFLGLNNELYEYKKTSNKLVNNSESYSSNIKVFSQPIGLSSTFEYELVRTNPTNNVFVTSSISNKKELTELFEMVNRNKALEEIIKRIRKSKFKTELMDSFQSGVLEDHRDNKVALLASRYLLSVKKGEAAQEIAI

SEQ ID NO: 64771 - protein, 553 aa, Bacillus akibai JCM 9157
MDISVAIELESSISEIPVDENFKLYAGPGAGKTTFLTNHIRHILKSSRKLKKTRQIACITYTNTAVNTLVKRLEGCTDSTEVSTIHSFCYKYIVKPYMRLLNEDSIPLDKIDGHEEIKLRRSQLREFKSSSQQLHFNDDKYLVEALGKLKWVLEDGEPVLKFLRYTDGRIGEYSIKKNSYILYKQLHWSEGKLSHDDVLYFAYRIIKEKPDVLEIIRARFPYILIDEFQDTSPIQTEIIKMIGERETYVGVIGDICQSIYSFQGANVDLFREFTLDDMKVYILSGNRRSTNQIINVLNHMRERVDFKQHSPTDLEGQAPIILIGDKSRLDSFLKDKFEKVMFLSYKNINHTNVNILVEDSDGDRSWRIYYLVQSLELAKNLDMKQAIKFMRQAYRKIEEFTEKEALERLRRLFDSYDDFQNKNITHLHNEYIVGHYQVSGKITRGRVKALYDGLTYKHLVTQIKNTETGSIDFKTIHQSKGEEFDTVCITLPSENEGKELDFLINPDMNKESHRVYYVAMSRAQYKLIIKLETVSEENKSKLEKIGFEIVQVT

SEQ ID NO: 64772 - protein, 595 aa, Pseudomonas aeruginosa MH27; identical to SEQ ID NO: 62972

SEQ ID NO: 64773 - protein, 605 aa, Pseudomonas aeruginosa MH27
MTPSRSVSTAYLAQAAELAGNPGQLAAYNSQGHCVVLAGPGSGKTKTLVLKLARILAEDVEAPRGVACITYSQECARELARRIESLGLQQAPNLFIGTVHGFCLRHLLMPYGRLAGLPISFPLSVATQRVSDRLLKQTGDALFGQNHPYKVIDLGRHRRSVLNRNSVAWRSEEELAAWAETYEAALRDEGLIDYDDMVVFGQRLIAEHDWVLPLVQAKFPVLAVDEYQDLGVALHRIVKRLAFDGGVRLFAVGDADQSIYGFTGADGALLMELAARRDIEPVQLQLNYRSGAGIVTASEMALGEARGYQASDPARQTTIEFVLRPGGTADQAAHAVAQIIPAALASKPGRTLGDIAILYKDYRAGDIVAKAVATGGLDYIRVDTAAPYRKVALTSWVEDCAAWCAGGWRVGRPQLRGLLDRYRAFHRASLDDSQAKREEQELTALLWELRADQQPAREFVASLRNGVVDHLLAAELALADQKEQLDRMTAALAEGGALASLDITSLGGRDGSPDHLNLLTLHSAKGCEYDVVIMVGLDLGNLPWRNETPEKLRESRRLFYVGLTRARDEVHMLYSGFVDGRYGPMRFGRSPFLDELEARMRAAGI

SEQ ID NO: 64774 - protein, 634 aa, Pseudomonas aeruginosa MH27; identical to SEQ ID NO: 63582

SEQ ID NO: 64775 - protein, 558 aa, Pseudomonas aeruginosa MH27; identical to SEQ ID NO: 62801

SEQ ID NO: 64776 - protein, 778 aa, Pseudomonas cichorii JBC1
MHIETVWVRNFRRLKDTRIDLASDISIFVGANNSGKTSAAHALQLFTSASKDRFTLHDFSSECWDAINAFGEGADGVELPTISLDIWFCVTPADLHRVVDLLPSLDWQGSRVGIRVELAAADAGLLRSSFQEARASARHAQLQPAGEGVAQEDMEPAIAQDGYNPRPRDLCDFIADTVGDRLRRDFELRYYILDSAGFDTEFKQLDGYVPLRLVPDKGRSGRDVLGSLVKVDCLHAQRHLSDSNAGSRSEDLSRCLSRFYERNLEKRGEDYDAQRALYQSESLLNDHLERVFGPTLERLADLGYPGVNNPRLLIKTALNPATILSSHEGARVHYALGALGAAEVTATLPDRYNGLGFKNLIYMVVELLDVHGRWLDIEENRPPLHLIFIEEPEAHLHAQLQQVFIRKVLDILAVPEEDSPYCTSQLVVSTHSPHVLYERGFKPIRYFRRVADAGIQQSQVLSMAAFYEAAVDPNDPNDRTRDFLERYLRLTHCDMFFADAAILVEGNVERLLMPQMIAKAAPRLQSNYLSVLDVGGAFGHRFKGLIDFLGLTSLIVTDIDSVSPPAAGALAANGELPVDEDPADAEPDDNEDAEEAEARRKGRKACMVHEAGALTSNQTLIKWLPGHTTIDDLLAATAEQRTQLRDEEGGALVRVAYQTPVAVVWGGATQVRTGRTLEEAFALQNLTWTQHLDRKDLGLRIKGSNNLEIAGIAERLYRKVKSSSFRKTDFALGLLAQEPSAWTVPNYISDGLRWLEDLVAPPPPAVAEAEAPLNGGEV

SEQ ID NO: 64777 - protein, 632 aa, Pseudomonas cichorii JBC1
MTARIGQPDTQADIELRLCLDQRPQRSFVMVAGAGSGKTTSLVKALAHLGQTRRLKLNMRGQRVACITYTEVAVKEIWGDVGNDPLFHVSTIHSFLWTAIRPFQVNLKAWVIARIHEKIAEAQQHHDKPRTRAATRERLVKDIARYQRHLEAVRHLTHFNYGAGSDFGRGVLGHFDVISAAVELIEQSQLLRDVIASRYPVLFIDESQDTRPEVVAAFRRIAETTPVEFCLGFFGDPMQKIYLEGAGVIETAAGWEQITKPENFRCPQRVLQVVNAIREPDDGLSQTRGRMNWVDGNPEPVMGSVRFFLLRADDHRSMKLAKVREWMRRTNDDDHWVSDDPAADFRVLVVVHRMAAARLGFPNLYAALNDNDAPPSIKEGLKDGTAWPLRPFLNYLLPLATAVSENRKLDVMTFLRSECPLLQPTALVGSDPVAVLRALQASTTELARLIFSSDALLQDVLVHSQAAGLLQLDEAWTKYLGPDRTADDDDPEIPAVSAFLRCGVGELAGYRHYLEDLSPFATQQGVKGAEFERVLVLIDDEEGRGQRQFSYEKYFGIVEPSDTDLENLAQGKDSVMDRTRRLFYVCCSRATRDLAVVMFVQDIENAREKIAETGIFESDDIVDEEALEAALT

SEQ ID NO: 64778 - protein, 466 aa, Bacillus boroniphilus JCM 21738
MTGEKQYHFEAGISPKDLEEIKGRYYLKTLNLKYLASTRDLNSFIKRERKNLLVDIKKNRTPEETVYDEKYLDKIDKSLDIINKRVSNLNYVKKAMGNINDELKGLSFHHLSQKIEFDVGAWDSSHFVDNLNLVSKVRDKNLSISGDGRSNQLFIALWANRNEVNKDHLLEVTFYCIEEPEAHLHPHQQRKLAGYLSNNINSQVILTTHSPQIAEEFPPDSIIRLYNKDLKTKAALDGCHSLINDSFVKFGHRMSIIPAEAFFSNVVLLVEGQSELLFYKALAESIEIDLDRMNISILMVDGVGFDYYIDVLSNLEIDFVVRTDNDFFKLPKKDKYWFAGIKRCIKIYKTFYEEEEGMEDLLTQENALTDVPLDVTQDIKELTVKLRQELEQLSMFLAEKDLEHDLRDSPVSGQLEKYFGLLFEENADPEIIKEMQKKKATFMFNFINDPNTDLSVLKTIHWQNLC

SEQ ID NO: 64779 - protein, 264 aa, Bacillus boroniphilus JCM 21738; identical to SEQ ID NO: 64701

SEQ ID NO: 64780 - protein, 695 aa, Streptococcus sp. BS29a
MKLTKMVINNFRSFGECQAINFNNQTVLIGNNSSGKTTVLQALSKLFSDKQSERIIRKSDFHLPKGLKPGENTRNLFIETIFEFDELAGTVYGPAIPTFFEHFTVSQDGAKPFLRIRLESSWEDDGTVEGSIDTQIYYISSDEDTIRDEDKHRAPRKDLDKIRVLYVPASRTPEKELGNASGSMLSRLVNSINWTKDEINEIKDKIDELNNTFLSENGALTQINNEIQKSWELYHEDNRFSQAELIINSSEMAAALRQIALKFSPTTTEEAFTVSDLGDGLRSIFYFSLVDSILDIELEITKDREENPDNPRFKLVPPILTILAIEEPENHIAPHHIGKLVKRFKQLSNNDNSQVILTSHSPAIVKRIEPEELRYLRIESNGRVLQTIVSDIKLPQDTDESYKYIKGAIQAYPELYFAKLVVLGEGDSEELLLPKFFDLLGNEIDSSQISIVPLGGRHVNYFWKLLNSLKIPHITLLDFDNERYGGGWGRVQYVIQQLLKIGIARNDLVRMKDGRILDDQDIARISSNQISDILSQPLLSWINHLEKFNVFFSAPLDIDFLMLQYYKDYYLETLSTNEGPVVSYTDENSDNKKIKITKMDRTNDYQLIGFKNRISEAIQATLKDKSGPGDSFTEEEKELMIWYQYFFLGRGKPTTHMQFLLSIRDEELIESLPSVFEKIVKRAKELLGDIEYGEE

SEQ ID NO: 64781 - protein, 605 aa, Streptococcus sp. BS29a
MVKSDDWLPKGDIILENAALEAVKNVNNCLVIAGPGAGKTELLAQKLDYLFSTNECISPKKILALSFKTDAAANMKNRVKKRYGDEYASRFTSLTYSAFEKMILDQYINALPEEIRPDRDYLVDDWDVIKATLIKNGINVNGRRMSDIRKSVEKTVLNDEANLKFKKDLLKGTRNNKAVLLYKQITKLATYIIYTNKYIRKALQMTYEFVFLDEFQDTTYDQYNLLKTCFLGSTCKLTAVGDNKQAIMRWAGANPDIFQDYKLDFKANEYQLLMNHRSVPKLIEFQKEVHQILNSNHSSIQSNYYPEFQEGEITLFEFENESLESKLIANDIESKIQGGIRPSEICILAKQKVDDYSSKLIITLSSKGIKARIENEYQELLKDPTCNLLLDLISCSQGKRDPLIWENISNFYGNINGIDELTDELILAKSYKEIDNIVSDITYLISNVIPNEESMLKLIDCIIEKIDEKRIISNFSTYNRKSDLDIIVKNFSKLLYKEYSQTQGEWLDTVSSFKGENSIPIMTIHKSKGLEYEVVYFLGLEDSAFWSFNDQPEEDKSAFFVALSRAKSHLIFTYCKLRNNSPQNNRNINEIYSLLTQSNLVDVIN

SEQ ID NO: 64782 - protein, 561 aa, Veillonella sp. AS16
MRFSSIRIKNFRNFEDIDIKLSNKNIIFGLNDVGKTNFLYALRFLFDRNIRKNGFIDSDFYQKNTENDIEIVVEVDLSDIENDASKLIRSIVKGALRSGDGSLYIKLKASYNYQLQYGEPQLMWAGNEMNYESVKQIGSFTDLDKIFNVIYIDAYVNLQELFSRSLRYILPDASEADADIQKLIDGDIKSLNEHISSLSNIKSIEEELTPLFNSYQGKEHKISLKSEVSVNGYYSNLTPYIEGADSNGVYPTAGEGRRKLLAYALYKLLMKKDEGKKINLFLLEEPENHLHKGMQLSLSSVIFNDNTYEYLFVTTHSPFILYEMNNVNLVRIYNLGNISSKSFIYKVPTEFEKSRKLLNSYLAEAIFANRVLLVEGPSEELLFNKVLLSVKPNYEALGLYILSIRGIYFNKFIDVLQPLGIICIIKTDNDINAIKNKKSQYMPAGFKRCNKLLKKTLLPEETLSSKSINQRKKLYRDNIDKIKEMNNLNIFISEVDLEHDLQATLKLKHFKELVGHKNPVKYLQEKKQTYMVDFIHRLEEEDCKKILKSSYFSCLKALLNE

SEQ ID NO: 64783 - protein, 507 aa, Veillonella sp. AS16
MNNHKWTEEQKEIIIDKNTLIVSASAGTGKTFVITQKIEYEIQLNRSFKKLAALTFTNKAADELNSRLKKNNDGNFIGTIHNFVLHEIINPFFKDLYDLKYEGEVSYGTTLKFHTIKDGINKLSELGQVGNYYDNKKSFIFELALSIIKSSEACQLFLKSKYYKIFIDEYQDCDVSMHNLFLYILENFDIPLIIVGDEKQSIYSWRGADPTLFQSLLTSDKFEKYRLSTNFRSDASIQNYANLIFGYRVNSYKEAESNKVLFLVADKSNNVILNVLDYIDNKASLAILTRKNDIVKKIGSILNENGKKCAIIQKSPIENIQNKDSNIYLSIAKYIIIKGYSEYDFSRDVDLENKFKEVSLEELKMHLNKFNEIVDKSYKDVVCSIVKLFKLDFNEVLYSMLEETINNNIFHYGFNIDQYQNVVMTIHAAKGLEYEQIILFADDFDFTSPENRELHYVASTRAKSKLIIIAYNDWNSYKFWTYLKSRAEIEGVELDKIIKRVNLNLKR

SEQ ID NO: 64784 - protein, 425 aa, Paenibacillus sp. FSL R7-269
MFLLKNHLMQVEKIQVSENVRGNIELQLQRLNKKIIRESEILKSISQELKVTTSDKESVVDISPITKDIESLYRGMNIYYSNKSSMPTSIENLGLGVRSWAVFSTVKAEINSKMKKRQIDDYAYLPLILVEEPEVHVHPQAQRQLFSNINEMNGQKIITTHSPYILSQIDLDKIRYVRKTGATSEVLPLLIDGLSEDDVRKIKRTVMNTRGEILYANAVILAEGETEEQALSVFLREYFKKEPFELGINVIGVGGNNYTPFMRILDRLHIKWYVFSDGEPQPLNDLKTCLKKLKDTQVQPNLDEFDNVFVIDNGECFETYCLSQGYVKEITKAICQIESDPNYMKYYIEHYNEQKAKGGVIRNYKADADGGYCRAIRDCIMSDKTKYPTAIAEEICKSKLKSKRIPKKLKDLFIKVENDMKEGGM

SEQ ID NO: 64785 - protein, 627 aa, Paenibacillus sp. FSL R7-269
MSISLSRDQEAVVNYSGKNLLVIAGAGSGKTRVLTERITKLILNLKRGEKILAITFSNKATEVLKERLIASLGEKKFYDYTYVGTIHSFCFDIISSRGSAIGLPDELHICESYNDRLHIFKEAIENVPSFKTEYLSGDSKENQKVIKAFLDDLSNAKRNLKFADDYSDDPLIQTLFEEYNNLLLQQGVIDFDDILRYTYQILTERESVSRLYRKVYKYICVDEAQDLNKAQYEVIKALAGEQIGITMVGDPNQSIYGFSGASNEYLDKIFLAEFNAHKMQLHENYRSSQLVIEAAHIIEPSFEVYGTCKYQGEFEIHEFQDEFKEAEYIMSKILFLLKNGHPDVENCSISLGQIAIIARNRYVFSRVEELLKANDLEYTLKVSAKGSFTSESDFIKAFELGIRLLVNNRDRLHFIELEKLINSKIKNGTFEELRWDNNISDHWKALMLALNNAWDLLLKNDREVKFHTAIKLLKTFIEDAETKIDEHEKILINEDIKAWEINWKSYIKNSTSGERSLGNFVRTVSLGSAQSTNDKGIVLSTVHMSKGLEYDVVFIMGLNDGVFPDYRAINAYNSSKDNKQITEERHNMFVAITRSKRLCYLTYPLVKETPWGKKRQTPSRFVLELER

SEQ ID NO: 64786 - protein, 649 aa, Paenibacillus sp. FSL H8-457
MYLERICIWNWRKFEVVDNEKASIEIVFNKHLNVIVGENDSGKTAIIDAIKAGLSTNSQDVTWILESDFFDPSLPIKIEYFYKELTEDEEAFLYEWLYFVEKESIFRVVLEVENIKDLNGKQRISRVLLGGEAGKESVINDNVRHLLSVTYLKPLRDAESELSPGNRSRFAQILKNLNVFQENDGVIKKEIEEILTVAFSDVQQKIDDPVLNKMEDVVQSFFDKSRERKPVIQPRNMKFDEFVKKLELNLGEIGTGLGSSNLLFMAAELLLLSENKFGPQLALIEEIEAHIHPQSQLRLIKYFEKKSKEDGIQYILTSHSPILASSISLEHIILIYNNRAYPMHAGLTLLDEDDYKFLERFLDATKSNMFFARGIIMVEGDSENLLIPALAEIIDRPLYDYGVSIVNVGNLAFKRYASILLRADSQALNFPVSIVTDVDLKPRSYFDKNYITYFEVDNSIEGEIGALFDYDFDSSLVGSYFTFDILLQRIKGKVDVDPDNFVKLISLLEKFKNKKYEDILLQKIHELETRYYNNVESTKVFISSPWTLEFAIAESGLSEYLQDAVLEINFVTLKNRVAKKAEWNIIGSVEKKAVEIYRFMLTNQISKAAVAQILANKLIENKTSVSTIFRSDPKLKYLYDSILHVTGGC

SEQ ID NO: 64787 - protein, 593 aa, Paenibacillus sp. FSL H8-457
MYFTEKEFRMVEEATLHGNFFNHKQREFIELMESKYIIAGPGTGKTTSLSAKIVLLLLNSIKNNSKDGICVITKTNVAVDEINRILNHVGKSKMKHPHFVGTIHQFFNTYLATPFIQKVLNPKQIRFAKESDYLQLLTQLAERHPYFRRWQERPRSIAVQKTSISKLYFDFTNKKFDIENSTGWDKFDRHRTHMFELKWSLKKLGCFSFDDIFLFSKAAIQNEKGLSLLRKRFKYVFIDEFQDTEKGSIDLITRIFNSKSNVIQYIGDPNQTLDFEGEMPSIDLSNAFNLNICNRFGYQIGNQLPYIVDNLNIQCLEDKYSFNPMLLIYTSKTKLIDNYKIQFSKYLKDQRFSAVKKKDSILGIQNNTINEYLEEPNNIKSSRTRIKDTESFTIQIINLLQEILFHKIPNVRNNNIILRDWLKEHPTYRSLKICIVRSIKAGKLEVSLLVDYLNELIYEKGGQGVKASNSVFSKISSIIDHIYINPVQTEEDHKFTFSTIHSVKGETHRSVLLIDSEKDKNPKIHTKMIKSYFCEWDEDLSGNWVERNLLYVAMSRPTHLFTFAMDRNFITNEEIEMFRLKGWDISFTRETES

SEQ ID NO: 64788 - protein, 663 aa, Vibrio parahaemolyticus 3256; identical to SEQ ID NO: 63134

SEQ ID NO: 64789 - protein, 583 aa, Vibrio parahaemolyticus 3256; identical to SEQ ID NO: 63135

SEQ ID NO: 64790 - protein, 784 aa, Pseudomonas aeruginosa PS42
MTTDQIPASSLTDSPPLIPAGPSPKAAAAIDTPPIRLACLEVCNFRRLAKTRLELDEVTTILVGANNSGKTSLLTVLRNFLSESPGFRAFDISLSQWAKLREVCHRWEALDEDPTTDSKDAESWEAEYQELQACMPFIDLWFDAKEGAYSHVAPFITSLKWSGGAVGVRVRLEPVADANELRNLAWRYREARAPVRELPKDGHAWPIDLLDYWLRHSADLRRIAAYRLDPVKGPLADKSRRDLQELPLGSQPIELQHLRKLIRVDFVPAQRGLGAEEDEMRSESASSRPGLFSSQLMKFARQHLNVAPSGHGHREDLVKAVANAQADLDKSIYKALKPAMEDVEILGYPGLHDPHQFHFRTRIQTADLLAHSTAVQYLLDKTAVDESLPEHSIGLGYQNLQSLSFMLVSFRAARLNPPQGSPAAVHLVMVEEPEAHLHVQVQRNFSKNAHELIRPKEQVHSYLRSQLLISTHSSHLAHGDNFTRLRYVRRVASTVLGAKPSTQVVNLGDAFGEDAPTRTFAERYFQVQHTDLLFADAAIFVEGTAERMLVPLFIERDFPKLAKKYVSFLDIGGSHAHRLKPLVERLGIPTIVITDLDPVLPTRTDKGRLVRAAVHIAGQEKLECGNDTLTSWHPMLAEFQAFGKPTPAQLVWTSDTGVQVRFAWQLPVAAASEQWPSSFEDSLVLSNIDWFKALEEEVDPITAAKVKHRGTLAKVIGLVLDYPDHAELLKELHAMLRGSFSKGDFAATLFERLNAGQDLKCPAYITDALTWLSGQLNVTAGETP

SEQ ID NO: 64791 - protein, 650 aa, Pseudomonas aeruginosa PS42
MSTALPSFGNDRDAHVVEDICGYITTTPPRSFFLFAGAGSGKTRTLIEVLRRVTGVIKHEAGAHYAERLRSRGQSVRVITYTKNATAVVNGRLGENYLTEVSTIHSFCWELIQGFDDDIREALLAFNAEDLVAAKAHAMGKKRGESDTDRRKYAEIEAEAEELRKTDEFRYSPDRNTFGPGALSHTNVLDVTAWLIVKRPTLQRILEDRHPLILIDESQDTMKGVLDALFELSKNRPDRITLGLLGDHRQRIYPDGHHDLPSHVPEDWARPALQMNHRSQKRIVELINKIWDSDIEGRTQPKTGVPQHPRTEKNGGTVRIFVGDAKTDSAEKIRRETECALAMSAETALSAWQERGSGYKTLALEHKLAAKRGNFYEAYRAMELLDKDAAVPKSNGERTGPTMVRPLLGPMVELAECLQPDGSVNEFAVMDVLRRHGALAKVPESRAERQAALDKAHAAVMRFASAATKPGITVREVLEPIIEASLFEVDSRLVEAYGDSSPPPPEPKTRSKEAKEDRRKRGWHALFGTPWQEIARYHAYLGGETELATHQVVKGSEFKHVMVIMDDEEAGGTWFSYDKLFGAEELSPTDLENVEGGKETTIDRTLRLLYVTCSRAEESLALVLWAKNPATALDAIKQSEWFTENELTAL

SEQ ID NO: 64792 - protein, 594 aa, Pseudomonas aeruginosa BWHPSA045; identical to SEQ ID NO: 62698

SEQ ID NO: 64793 - protein, 604 aa, Pseudomonas aeruginosa BWHPSA045; identical to SEQ ID NO: 64631

SEQ ID NO: 64794 - protein, 807 aa, Pseudomonas aeruginosa BWHPSA044; identical to SEQ ID NO: 62542

SEQ ID NO: 64795 - protein, 643 aa, Pseudomonas aeruginosa BWHPSA044; identical to SEQ ID NO: 62543

SEQ ID NO: 64796 - protein, 763 aa, Pseudomonas aeruginosa BWHPSA041
MRIKFVEISNFRKLKSTHLDLDKNTTILVGANNSGKTSAMLALRIFLLSPTRLNLRDVTIANWTKIDLLGSEWEAGAEPTVDLDSLLPSLDVWLDVPLREIQHVVDILPTLDWSGGLLGVRLAFRIKNLDKLKSEYIAQRTAARDAAIVGPNGESIKIAVWPRNLTDFLERRLRAHLELLAYPLDPAAVVPPGRSGLATPQRLPASALAFEHPPFKKLIKIDEIAAQRDFADASSSDGGEDKGEANNRRFKRRLSDQLRSYYDRHLDPTKTPSDKDYEALGAIQAAERSFDARLEEGFSAAFQELEDLGYPGMSNPKLKISTLLRGTDGLKHGSSVQYQVADPSGDGSNTLQLPEDYSGLGYQNLIAMVFMLMGFRDEWMRVEKAGILEGADVSHEIQPLHLVLVEEPEAHLHAQVQQVFINKAYTLLRKHADLGVAENYCTQLIVSTHSSHVAHEADFANLRYFRRRPAASMGETPTTTVANLSYIFGDGDETKRFVKRYLKATHCDLFFADGVIFVEGQAERILVPHFIRHHFPELSRRYVTLLELGGSHVHSFRNLVDALGIATLIIGDLDATTAVKIIDKNMRETTRWKSARPEQGKAQQTANSVLKDWHPGKKLIDELVALPPDGHISTAGGDYELYVAYQKPVNVKGASEDSDLIIPRTFEDALILENLAVAGKIEGSITSAKVRGIVAQDLSGDELEDELFELLKTAEKAAFALDCLMLEDPKALKPPGYIAAGLKWFEGAVGKDIAQSEIQGAED

SEQ ID NO: 64797 - protein, 636 aa, Pseudomonas aeruginosa BWHPSA041
MIIETAAPDFDESADVQIRACLNPAAPQSFFLYAGAGSGKTRSLKRALDTFREDHGATFRRTGKKIAVITYTNVAADEIAERVGEDPLFPISTIHSFCWRHIEAYHRDIQAWLLNRLPVELADLREKQAKGRSGTKAAQDRERAIASTMQRIEWLSVPRRFTYSPNGDNFGQDSLSHAEVLKITAAFIETKPSMQAILVNRFPFLLIDESQDTNRGLIEAFFALAAAHKGKFAIGLFGDTMQRIFLDGHPELERLVPADWARPAKRLNHRSPQRVIALGNVLREPVDGQYQVAREDSEIGIVRLFVSPSDVLDKPALERRARDRMADLCNDLQWREEAAVKALTLEHHMAASRRGFLEMFQALNQDSRLSTGLRTGDLAGLRLFTDRVAPLIAAARMKDDFAVMAQLRATSPLLQRAAIARLAHTDDPLLPIRAAVEALLTLDTDGQETTFLAVLECVAKHRLFEIPDALRPFVANGAEENDVELAGDESAPGEEDAPEERSPASLEAWRAFLETPYRQSIPFAEYVSDKGPLGTHQGVKGLEFERVLVILDDSDARGFLFSYDKLFEATPATGASRKTPADTAEEGTVRTRRLLYVTCTRAQKSLALVAYTKDPEALIAAALRNNWFRAEEIERL

SEQ ID NO: 64798 - protein, 548 aa, Roseivivax atlanticus
MLLHLPEEMEKKLFSKTRPWSDSKGGFVDEDGAEPGDADGEDVVRALPLTFIGYYDRKEDDFVGTTYFAHPVEELGEDEEHYGKPFAGLSFFPREWKIQCGFIYLRTLRTGRRALSLERGSLLDTILRLGDTGKESMWESTLKQLRALDPPIGDIPQLEGIQTQIKDRMARFVGLSADKDATGFYASDLTRENLREVVQLFLKSQDSNHAVPFNRLGTGAVNALVFALLTHIADLRGNRAIIFAMEEPEIALPPHAQRRIAKYLLKNMGQAIITSHSPYVIEEFDMANLRAVSRTAGVLSSDSIPAGAIKHSALRTNRRQLAEAVLARGVIVAEGDTEAKMLLAASYMYEHLDPSGEYVPLDLIGVSVFDAGTQSDVPKWGPFFGALKKTTFAFHDQPKKAWTADQTAKLDTYHNNFESAYKGTEDLLAAEVPPAVHRRFLDQAKDHPDYPTDKGYLKGGESDDDVIALSKQVLKAKKGSGFAAMLIEQCTALDEMPVTVKSFLEKVAADMALPKLDDTEGEAGDDEGHGEDGPDEPDPLDIDIEDIL

SEQ ID NO: 64799 - protein, 577 aa, Roseivivax atlanticus
MAFTICEKRQSVIDEQGHALVIGGPGSGKTTLALLKSKCILDTLAPGQSILFLSFSRAAVQQILKRCREILTKEEMKRIDVRTYHSFCWDILHCHGRLLGGRPLKMMAPSEEGTRRTQFDGDWAAESKRLKGEEGMVCFDLFAAATAELFEGSTHLRSWIGRLFPLVILDEFQDSDDDQWRFVQQLSAVTQTLFLADTEQRIFEGSFRPGVRADRLDILKSAIVLREVDLRDDNYRSADSDILAFADCVLSGKGPLPNTEDVKRLPYDYKNQFPATVHFAVAVTLHTLRKRGIDDPTVAVLARSNDLVAEISDTLEVPHSYNGKELKPIPHDIVWDQELSASAGVAMAAALEFVSLDTPAAREAMHAKIEEYFLIKKDFCQRYGGRGAKAAGTKADRFGKARGKIADSKALTKGSPKTFEAALSAIPALTGDPVRDWKAVRTSFQAHDDLKAIFQDARMVRLFRASDTLATALAGRWMERGTYEGAARMIRSVLDQERLIGLERDPKGVSVMTMHKSKGKEFDGVVIVEGVYSSPFFLEHEAPDYAPSRRLLRVGITRARSFVLLVRPRKSKPLVES

SEQ ID NO: 64800 - protein, 718 aa, Chryseobacterium indologenes NBRC 14944
MNIKKLFIKNFRILSDFQIDLEDEISLVIGKNNSGKTSILTVLDKFLNQSDKNNFSIEDFNLSFKQQLQILIEDTTELSEEEYLKCYNGISLRILVLYNNTDSFINIQKLMLDLDPENNHIVLGFDYYLSYKNYLGIRKDLAQYRHRENVKKAEAEACEPPKKYNVKGFSEFFKLHYQKYFETRKKSIFYDKTSQKIIEDNYILIEDLKISDFISFKYISARRDVTNKETDKTLSLQTSKIYERKENDENEAKKIDDFHDTIINTDEELSKIYKVFFEDIIEKIKSLGGIRENESVLSVLSTLQSRELLKGNTTVYYKHELSDLPEHYNGLGYLNLISMIFEIEIKKYEFQRSLLEAPADINLLFIEEPEAHTHPQMQYVFIKNIRTIVGDKISKTIKNVDNTEFEICRSLQTIISTHSSHIVADSDFDEIKYLKKTDTITSKNLKDLKNLYDETGKQYQFLKQYLTISRAEIFFADKAILIEGDTERILLPTIMKKIDIQLSHSDKEEKKIPLLSQNISIIEVGAYSEIFELCIDFIGVKTLIVTDLDSTRKVKKLNKNDKEITKGEACRVAIGDNYANPALKFFLNNKTLEELKSLTLKDKCLIKTDDKWIPNENGTVCITYQTDYDGYTARSFEDSFLAIPQNKNLVISKIDSFKGIKNPRHFNNENKDSYDLANECINKKPHFALDILYHSNDDYSNWEIPEYIKEGLLWLKEN

SEQ ID NO: 64801 - protein, 649 aa, Chryseobacterium indologenes NBRC 14944
MVERELKSEIDQIFDHIEKGDNFLLSGGAGSGKTYTLVQCIIGIIDKFPNHKIACITYTNSAVKEIEERIDHKNLQVLTIHDFLWDCIKNFQNELKHAIVTLANNPLQKKINIESPSVEMFSEGIRYMENLNLSKGIISHNELLVIAEYLFENYEKLCDIIKDKFNFILIDEYQDTSELVIRIFLDHFRKGSKKNIIGFFGDAMQSIYEDGIGDLNKYKENAGGLVQEVKKLENRRSPLNVINLANKVRSDGLEQLPQLEKTNPIPPNMNEDGTIKEGEIRFLYSAENNLDKVRKYLEWDFNERDKDGNLKCKELNLTHNLIAKESQFGSLMDIYNNDQILEYKYLVDVFLKNNLQIQIDENDTFGDAIKKSGQVPNGGKMSDFINANIDLFNEAKSYKFNLFRKIYLNSDILTDDKKQNEKDLIKKGTKRDNLLKHLFKIQNCIRLYNEKRYNEFLKITDYKINSIEDKKILQDHIEALSKTDEKTIGDVIEKADEYKLVYADDKLYEFIQNKRYVYNRISKVKYSEFINLYNYLEGFTPFSTQHKTKGREFEKVLVILDRGGWNNYNFEYVFDDGTVYKSLVEGKSKTKSKLSSYPKIKERTEKIFYVCCTRSKEKLAVFYHNPQPSVINTAIAWFGEENTINIDDF

SEQ ID NO: 64802 - protein, 660 aa, Rhizobium leguminosarum bv. trifolii CB782
MRIESVTLSGFRCFGPDPITVPISAEITAVVGPNAAGKTALLHALSKLFGVSRAQRTVQRSDFHLGAEDDPDDREPKDLFIAVLIGLPELVDGTATPETIAPSFRHMQIEREGKSPVCRLRLEARWEDDGTVEGEVSQELFWVDTLDDDPAEDKCHPVSAADRGLIQLYYTPASRDAAAQIKATTGALAARLLRAIEWSSETEEAVQEATDNLATAFEGESAIAAIGKALQARWSGLHDDVVDTKPRLSLVSRRFEDVVNKIAVIFEQGPDGQERGLDALSDGQQSLFYFALAAAVFDLEREVVAGTVEGFRDDTLRIPALTLFALEEPENHLSPYFLARIIRQVRSLTDAGGAQAIVTSHSPAVLSRVKPREVRYCRCDPTTRVSTVKKIKIPPGVDEAAKFVRGAMLAYPELYFARFVLLVEGDSERIVLPPLAEALDLLIDPAFVAIVPLGGRHVQHFWRLLKHLGIPHATLLDLDLGREGGGFGRVKTAIEKLIEFGAPKATLLKIDKGILPDADFAAMHTWQDAEDRKNLKAWVDSLKPYGVYFSAPLDLDLAMLEAFPDAYKAIIPKGGGPKMGADKAAEVVLGTAGPGLTLYTGPFKDYPALLPAYRYHFLTNSKPATHLAALTHIKKKDLAEKMPAVLAGLLKHIAKSLRRD

SEQ ID NO: 64803 - protein, 619 aa, Rhizobium leguminosarum bv. trifolii CB782
MGVEALEANALKVVRSADNRSVIAGPGAGKTELLAQRAAYLLQTGTSPAPRRILAISFKRDAATNLAARVRQRCHRNHAGRFDSMTFDAFAKGLIDRFGQALPERWRPRPDYEIIFPNDRDYRDFLYQQVGTPPTSVGTYADLQAIAVKTFERHHLVGSPLPVDGWAKPTPGEWAADRYWQTSLHDGKKSVLSFPMIGRLAELLLRVNPMARDALRLTYSHLFMDEFQDTTQIQYDLVRTIFLGTDTVITAVGDNKQQIMRWAMAMDDPFTAFDADFGGKRTPLYNNYRSSPELVRIQHVLAQALDARAVAPVSKTAGTIAGDSCAIWDFSTPEIEADRLAAFVAAEMNIHKLGPRDFVLLVRQKAADYAAVLEPAFTAAGIPLRNEAGAVGAVMLQELLAEEVSELVVAILRLAMTKRAGRYWTDCQEALAALHGVAPDEEAAQAKLARGLDAYAIKLNCAYPNPPNMKAVARSIVDDILAFIDRERLVAVHPAYGQGGWLDKVLDAAAVHLLQSSVGRADWPSALDAYEGIHAIPLMTIHKSKGLEYHSVIFVGLDDGAWWSFSDDQIEATAGFFVAFTRARQRVVFTYCARRGARTKIATLYNLLGKAGVPRIQVG

SEQ ID NO: 64804 - protein, 582 aa, Streptococcus thermophilus TH1436
MKLKTLSIKNFRNFEDISITLSNKNVVFGMNDVGKTNFLYALRFLFERKIRNKGFLESDFFQKDTTRVIEICLEIDISDHETDFDSQNIISKIGKERDSGNLNSVFIKVIANFDENEFFGIPKLFWGNQEEELQKIPGEGTFCDLDRLFHVVYVDPLIDLDKIFSLNKRKIFSKQKTQSDGELLEDINVLAEQINSKISTMESVTKFQEILTNEYHNLKNEDISVVLRSEMVINGVFNDLHPYITKNTDVTKKLYPTSGDGRKKILAYSLLNHITEEFNTNRTIPIFLIEEPENSLHRSMQIALSKQLFNQEIYRYFVMSTHSSEMLYEMDKATLIRLCNEDRTIAKSFLYKVSEEFSKIKRELNESLTTALFADRVLLIEGPSEKVLFEKILQEIQPNYELEGGYILQVDGIKFKPYYKTLINLGIICIIKTDNDLKETTKNSSKQFEYIGYNRCVGLLDGNEWKKWEYENGYIAIDYSSSDREDKIKEWKKSNFTQIQKIQQLRNKNIYLSKVDLENDLNEAIPETLELWRNLNHDAVPYLQKQKLIRMIKLCDFLKEEDCQKIYNHSLFECLKKLTGDF

SEQ ID NO: 64805 - protein, 537 aa, Streptococcus thermophilus TH1436
MEISDQKIRNDILNYNGSLVVRASAGSGKTTIMVEKIKKVLDEIKDHKTVAATTFTRKATQEIRKKCRELGGEKTFLVTTNDSFVEQEIIRPFINDAHRTQEVKWDEVDLSGLNISNYNFNSLDLSDFSNSYDRKDSKATYGLLLKELIDNHILAKYFDNKNNFKFELALFILKNSKACKEYLKYKYKMIFIDEYQDSDGTMHELFMYLNSELGIDIFIVGDVKQAIYLWRGAKEDIFEKIPTNIEQKELWHNFRSHFEIVNYAAVIHEPKAIYSISGQTSGRVKIVDLEIHRLGELLNSSLVDLNREITIIIRTNQEAQKLKDELLDNYDLNFEFIPSTPLDQNQSENTFILRLIAKKFYDRNFSMFDFAEECGLEIRKNKIEELNRTFNELINLFNLSMNEEFNLDLFNKIIQDVSIQIEISFSESELMWLKETLSNHTFRDAFVPSKNKHKIMTIFSAKGLEFEQVIGFGKDYNLKDTNQRNNHYVLVTRAKDKLILINEINGINGMNYLEQVDEKISKNSKSTSDFFYQHSYF

SEQ ID NO: 64806 - protein, 663 aa, Vibrio parahaemolyticus SBR10290; identical to SEQ ID NO: 63134

SEQ ID NO: 64807 - protein, 583 aa, Vibrio parahaemolyticus SBR10290; identical to SEQ ID NO: 63135

SEQ ID NO: 64808 - protein, 691 aa, Fusobacterium sp. OBRC1
MVLKKIVVENFRLLKNFKLELKDELSLIIGKNNCGKTSVLVILDKMLNSYEIAWEDVNLAKQKELYNEINEFNGTIEEGNKFLEAIKLQLYVEYNDTDSYENIQNFIMDLEPENNIILLEFISSINIKNILELKDIIKEREIKDFSTFSRYMSKNFTKYFKIKKYSRGYDKETKKLILDMKEEIDSKNIQKVIKVTGIRADRAVSNDEGNHALSILTNRYYETYRKNIKDESNSIFQELEVELEKADRTLYKIYNGEKADDGKDSEGIFRDIIDVVKNYGGYDNGINISIESSISEKNLLTNNTSLYYKHGDGDSSSLPETYNGLGYLNLIGILFEIETKLQELYEQPADINILYIEEPEAHTHPELQYIFIRNIKNHINSHRNKLNKEKNKYLQIIITSHSSHIVSECNFDDIIYLKRIDNNILAKNFNSLKEEYGGDEKKEFKFVKQYLTLNRSELFFADKVLCIEGDTERILMPAMMYKVDKMQNSKNESTIPLLSQNISIIEVGAYSHVFIPLFKFLGIKVLIITDIDSAVKNNNGKYEKSHPNNATHTSNASIREFFKEDGLDYGNNQFKEPIEKKGKDKIKDRIRIAYQIPEIEGDYQASSFEDAFISLNKDFILRNKDNLYDYGALKNFSKKEINNDFYKFSLNKIEKKSTFASALLYFDEEENDMEWKVPRYIKEGLLWIQEF

SEQ ID NO: 64809 - protein, 635 aa, Fusobacterium sp. OBRC1
MDTRILENEVKVALKCIEKGVNFILEGGAGSGKTYSLISLIETLIIKSSEIKIVCITYTNNAVAEIKSRIDNENLWVSTIHEFIWHVIKKYQKEIKNELVLLINDEIIKEFKKPKDLENNLITIDYFNNIDVEYDEYYSMNPNAENKIKISHDHILILAEKMLDKYKKLSDILKDIANCIFVDEYQDTSPYIAKILLEHLKKSKKKNVIGFFGDSMQSIYDEGVGDLNKYKLKKIVKKQNRRNPRIVIEIANKFRNDKITQIPSKDKNTPNMDENGVIIEGNIKFIYGKEQEDINFLKNKALFKSWDFLDGRKTKELRLTHKYNSEMAGFKKLYDLYNDDLIIKLIDNIQKNIDNNENKESVLNELVLELRPIYNKKDLFEEITGNEIYNLIYQDIKNLLWKNVLEKCKISKESLMSYKFNGINGRYETNSHRDKILKKLDVLNELIELYESKKFNEFLKKTNFSIQNKNDKSKLKEIMNFFMLEDRKTIEEVLDFSKKQGLIREDVDFDNYISAKGFYLWERIKKISFKEYRNSILYLKEFSPISTQHSIKGSEFDNVLVVLESNWNKYDFKTLFGKGSKNENVKKRTRKLFYVCMTRAKKNLVIYMPTEDLEIINSAKDYFGEENVLSIDSML

SEQ ID NO: 64810 - protein, 588 aa, Shuttleworthia sp. MSX8B
MRLEKLRIKGFRNFNDTEVVFQEKSLIIGANDVGKTNLLYALRLLFDKTISEHDLELSDSDYNAYSGTDAIEITAFFCEVTEECLLSTFGGAVKDGKVVIRYSNHKGGTYKIWAGYDTTTLSELQTRQYIKRLNMQYVDTNRNLFSFLNHERIRMLQMAKEKLSAEDVASDTQKIQQIQDGLNAINNDISSLHYISTSLEQVNSELGKLSVHNEDQTVRFIAGESKADKLLDNLILAYSTGDTPLSIGGDGRNNQIFLATWIAKQHIQESIDHVTFYAIEEPEAHLHPHQQRKLSAYIQENFDAQVFVTTHSPHIASRFDPASIVRLYAENKYTFAACGGCSHILKTVFDNFGYRLNSLSAEAFFSDGVFLVEGTSEVLLYTALAKEIDLELDRHNISVLSVEGIGFKPYVAVFNALNIPWVLRTDNDIFSKPKNAPTKKYFAGISRIMGIIEGIGDNSTGLLNYWESHSQENEWDKDKEPPESAAKLNVYIRALAEHLGIFLSETDLENDLANSTLAGALVTHYGKSEHSALVSSMQKKKAENMLEFINSNYKNLSVLKGSKIAAPLEMIVNTVVGKVRPGDDKTTD

SEQ ID NO: 64811 - protein, 530 aa, Shuttleworthia sp. MSX8B
MIRQPTDEQNRIISHTGNIVVTAKPGSGKTYTIVEKIADILPGLPAHKGVIAISFTNKASDELKKRCKYRCSDTKQSFFGTIDKFYISQVIIPFASHVTGKTTDFEIIDTVSEESRFAALSKCEGELSSTKTALLVEGLCEGKIFLKYTGETAMYLLENVPGALYYIKARYSHIIIDEYQDCGDIQDKIFLKLVENGLIGIAVGDINQAIYGFTNRFPKYLIALIGRTDFTHFELTRNHRCHPGISEYSLCLFNASKTIPEDKRVFLVRVAGDERNIAAAIDARIDAIKEKYDVSNNNQIAVLCRSNSTVSITSNALRTPHKIFEETVLDRDNSESGRFFRELLSSCFDKNTFAVDYAEQLFSEEFEPTKYRSALLLCQRVFTYPLDTFYEAESDIKELAKLVCAQKITAASVNNLQSVIRDTQQLKNYIPALDDEINLMTLHKSKGLEFNIVFHMDLYKWIMPNEYGDETSILQDLNLHYVGITRAKDVCYIMNGSRRYRKRQNDFISAEPSPFLNRPGLVERRYDVCW

SEQ ID NO: 64812 - protein, 585 aa, Streptococcus sp. ACC21
MEFKKLVIENFRNFSSIEVALSNKNVIFGMNDSGKTNLLFAIRYLLDRTIRNKGFIKSDYHRHDTSRPIKIQLELDLSDRKMEGDEESLKSSHSRLLISTVAGARNNSSLDTFFISLEAVYNEKELFGNPVLSWGSTLDNLVEVPQYGTRSDIDKIFQIVYVNPAIELDSFFKRNRRILFSDDSKTDEDVKLEEEIENNIEKLNENISNLHLITSVQSQLTEAYKSYRKENLEIKIQSEISISGYLDNLTPYINWNDDTHNYPTSGDGRKKLLSYAINHLISEKQYNKKVIIYLIEEPENSLHRSVQISLSKQLFVQNIYEYFFLTTHSAEVLYEMDNTQLIKITNQQDATGQSVYYTVPNEFSNLKKKLNKSLAQSIFYDRILLVEGPSEYYLFSAIFEYVSPNFEADGKYLLQVDGINFKPYSELYKELGIDFWIKTDNDLKASRGDKHVFSPIGLNRCIDLLDHSATPRLDNYRIDFSSKDERKQNIKSKKEELYLTNHNLVLQLNADGIFISEIDLENDLAQVLSDSERNEMSKLDFVNWLQSSKQYNMLEYISNHLTKEIALKIVESGYFKVLAEFLDYE

SEQ ID NO: 64813 - protein, 512 aa, Streptococcus sp. ACC21
MSDIATQDKNVKKELLEYQGNILILANAGSGKTTFLTKKLKSDSKRLNNYQKLAAITFTRNATEEIKQKLVDIPDNVVVSTIDSFLDKEIILPFLNQKYEIQTSVQFSFRIDHNFSDYSTGIKQILQDGIFGTYDFPTSKHGKNFKCEVALDILKTIDSASEYIKYKFNTLYIDEFQDCDQSMNDLFLYLKNELGIPLFIVGDDKQSIYQWRGASPKYINNLWKNKNDFRKKRFIGNFRSLPRIVDFSLALTPEVTVDNIREEGSILYLEPKQDYPKEDIIKYLIDNGDINLQEKNYFLIGINKDIEETATHLNDILSNKVDYVRKNPFIDCTNSNFLQSMAQYYFLEDFSEYDILNNLFPEYNDEFRKELLKKLKRLRQRPTQSLIEEIASYLDVSITNYEDKLESQILLEILSNLDNKKLFDTNLMSNNLLMTTHASKGLAADTVVIFVEYLIDWRTGLKFEDHYVAITRARSKVIIIDNRTIYTSEINRLLSNNNGNFSFEDFIERRYI

SEQ ID NO: 64814 - protein, 588 aa, Providencia alcalifaciens R90-1475
MSIQIDTVRISGFRGISNIEITLPRVTVLLGQNNAGKTSVIKALQLALGDYSRFLSDEDFNIGEDDKRQEKITVDLRFIALDGHARTNEFSEEWQQEFGDKIQAEADGKQFVAIRTTAEPDKMKGGYIVERYHLDSWPEKNGWNEVIITKKNRLGKRLESVPFISIDAQRDIHSELKEKTSFIGRVLSSVEYNDDDVVALENMVANINKEAIEKSEPLKQLKSHLDNLNQSFEGKGQTELTPFPKKIRDLSKRFSVHFGESDKSSFSMEYHGMGTRSWASMLTVKAFTELMVKNHEEEVEPFFPILAAEEPEAHLHPNAQRTLFEQLRDNTGQVVISTHSPYLVGMSDLKDLRGLIKTSHTVRATGLIEGLDPEDINILQREIMRFRGELLFSKALILFEGVTEEQIIPAMFQAYFGKTSFSLGVNCISVAGKNYPPFIKMAQSFGIPVCIISDNDGETKKEVDSQINKIKENTPLTLADDEFSLFYLSDGNDIEAELLLVLGLRDEVIEALVKTETRGSDNTRYIEAKTAELSALNNEALVEKMRASKASYAGFLADVINRNPMNRPIDELVPSAAIEAFKKLKEWE

SEQ ID NO: 64815 - protein, 631 aa, Providencia alcalifaciens R90-1475
MLNLSESQAQIVNASLANPIQVLASAGSGKTRVLTERVRYILDNTKRDGIIALTFTNKAAEEMTARLADCDDAEDRAWIATIHSVAQRILEKYGHTVGLPTELYIYDRDKDRMEVFMQSLRDDGVDIDEYLNIADSKELRNREKNLQDYMDIFSKIKRELLTELEVAELYPNSNIWKVFQDYQSSLINSGGIDYDDILVYAHRILLTHEWIAKVYRSKYKHVCVDEAQDLNQAQYEFIKALCGDVIKSVLMVGDPNQMIYGFNGSSKDYLCTHFVDDFSPQKFELKENYRSTKAVIRAANRLKQDSQKEIEYALEGKINISEFDTEEAEADYVTSTIQYLLSLQSHDEIEGELSLDKMVVIARNRFVFSKLERSLKEKSIPYSLRKGERQLEPSTTFGKVLDYALRIKLNPKDWVDGKKLCQVLSIAEPESWTSETLLSMAAQVSFVKGERAELLSKLLSAIDGLDIENPKIPKLVQEFNDYLTSLVENQSEVPDDKSEDVKLSLEELKEFSGMWTRFKRKGFGDSLVAFRNALALGQLSESSIDEGLTLSTVHTMKGLEKDIVFLIGMCEGVFPDYRARTAKELDEERNNAFVAVTRAKRWLYVSYPKQRMMPWGDLRFQQKSRFISEIE

SEQ ID NO: 64816 - protein, 729 aa, Staphylococcus aureus M0630; identical to SEQ ID NO: 62500

SEQ ID NO: 64817 - protein, 597 aa, Staphylococcus aureus M0630; identical to SEQ ID NO: 62501

SEQ ID NO: 64818 - protein, 729 aa, Staphylococcus aureus M0636; identical to SEQ ID NO: 62500

SEQ ID NO: 64819 - protein, 597 aa, Staphylococcus aureus M0636; identical to SEQ ID NO: 62501

SEQ ID NO: 64820 - protein, 729 aa, Staphylococcus aureus M0645; identical to SEQ ID NO: 62500

SEQ ID NO: 64821 - protein, 597 aa, Staphylococcus aureus M0645; identical to SEQ ID NO: 62501

SEQ ID NO: 64822 - protein, 729 aa, Staphylococcus aureus M0658; identical to SEQ ID NO: 62500

SEQ ID NO: 64823 - protein, 597 aa, Staphylococcus aureus M0658; identical to SEQ ID NO: 62501

SEQ ID NO: 64824 - protein, 729 aa, Staphylococcus aureus M0668; identical to SEQ ID NO: 62500

SEQ ID NO: 64825 - protein, 597 aa, Staphylococcus aureus M0668; identical to SEQ ID NO: 62501

SEQ ID NO: 64826 - protein, 729 aa, Staphylococcus aureus M0671; identical to SEQ ID NO: 62500

SEQ ID NO: 64827 - protein, 597 aa, Staphylococcus aureus M0671; identical to SEQ ID NO: 62501

SEQ ID NO: 64828 - protein, 729 aa, Staphylococcus aureus M0709; identical to SEQ ID NO: 62500

SEQ ID NO: 64829 - protein, 597 aa, Staphylococcus aureus M0709; identical to SEQ ID NO: 62501

SEQ ID NO: 64830 - protein, 729 aa, Staphylococcus aureus M0729; identical to SEQ ID NO: 62500

SEQ ID NO: 64831 - protein, 597 aa, Staphylococcus aureus M0729; identical to SEQ ID NO: 62501

SEQ ID NO: 64832 - protein, 729 aa, Staphylococcus aureus M0730; identical to SEQ ID NO: 62500

SEQ ID NO: 64833 - protein, 597 aa, Staphylococcus aureus M0730; identical to SEQ ID NO: 62501

SEQ ID NO: 64834 - protein, 729 aa, Staphylococcus aureus M0511; identical to SEQ ID NO: 62500

SEQ ID NO: 64835 - protein, 597 aa, Staphylococcus aureus M0511; identical to SEQ ID NO: 62501

SEQ ID NO: 64836 - protein, 729 aa, Staphylococcus aureus M0524; identical to SEQ ID NO: 62500

SEQ ID NO: 64837 - protein, 597 aa, Staphylococcus aureus M0524; identical to SEQ ID NO: 62501

SEQ ID NO: 64838 - protein, 594 aa, Klebsiella pneumoniae subsp. pneumoniae SA1
MRISRIRLINFANFSDVDVETGESIVIVGENKVGKSNFIRGLQLILDPALSERDRQLGFEHFWDGLGEDKLGETIEISVDFTDFTDDPRLMAHLNDCVLNPGPPMVARLTYRFQPKTELNRAPESLKDYEYVIFGGADPDMHIGGAFRRMLPIDVQGALRDAEKDLSSWRNSPLRPLIEELSASLDEEDREEIQTLVDEAQRELAGHDEVVATAERISERLIAIAGEQHAVPVSLGLAPTRVDALLRSLRLLLDSGIRGIGDASLGTANLIFLALKSLELDRLVDDGERDHTFFVVEEPEAHLHPHVQRLVYRYFLGTDGENGDERAPLTTILTTHSPHIASVTPVRSIVLLRHDAEDEKTIAVSTANAPFTQRDEDDLQRYIDVTRGEIFFSRGVILVEGDAERFLVPAFADALDIPLDMLGITVCSIGGTNFTPYVKLLGPRGLNIPHVILTDRDPMAVGEPLVRRRLINILDVLEGDVDHDDMDTDEVIARAGVYGCFVNEITLEPELFTGGLAEAMQSVIERELSLAQVTLDRIQAWGDDTDQLDIARLLKLIERIGKGRFAQALATSVSEDVCPDYIREALEHIRDAVA

SEQ ID NO: 64839 - protein, 605 aa, Klebsiella pneumoniae subsp. pneumoniae SA1; identical to SEQ ID NO: 64493

SEQ ID NO: 64840 - protein, 771 aa, Klebsiella pneumoniae IS46; identical to SEQ ID NO: 64244

SEQ ID NO: 64841 - protein, 625 aa, Klebsiella pneumoniae IS46; identical to SEQ ID NO: 64245

SEQ ID NO: 64842 - protein, 729 aa, Staphylococcus aureus M0284; identical to SEQ ID NO: 62500

SEQ ID NO: 64843 - protein, 597 aa, Staphylococcus aureus M0284; identical to SEQ ID NO: 62501

SEQ ID NO: 64844 - protein, 729 aa, Staphylococcus aureus M0352; identical to SEQ ID NO: 62500

SEQ ID NO: 64845 - protein, 597 aa, Staphylococcus aureus M0352; identical to SEQ ID NO: 62501

SEQ ID NO: 64846 - protein, 689 aa, Peptoclostridium difficile T17; identical to SEQ ID NO: 63298

SEQ ID NO: 64847 - protein, 621 aa, Peptoclostridium difficile T17; identical to SEQ ID NO: 63299

SEQ ID NO: 64848 - protein, 689 aa, Peptoclostridium difficile T14; identical to SEQ ID NO: 63298

SEQ ID NO: 64849 - protein, 621 aa, Peptoclostridium difficile T14; identical to SEQ ID NO: 63299

SEQ ID NO: 64850 - protein, 729 aa, Staphylococcus aureus M0002; identical to SEQ ID NO: 62500

SEQ ID NO: 64851 - protein, 597 aa, Staphylococcus aureus M0002; identical to SEQ ID NO: 62501

SEQ ID NO: 64852 - protein, 205 aa, Xenorhabdus szentirmaii DSM 16338
MEGDAEEVLLPSFAESIGYNLDQLGITVCNVAEVNFEPYVKLTASLRIPFAVITDWDPLDGTKQPLGKNRSISIWDAYCSVRPEAPKFTPENITWLKAVTFDECNPCFRDRSIFLNSLTFEIAIANTPGLKEALLDILDEQGFGALRSSRIKSWRSGQPVVPAQLLTMVSDVGKGRLAAKLKKKAPGLTPPEYISAAIHYVTSNV

SEQ ID NO: 64853 - protein, 528 aa, Xenorhabdus szentirmaii DSM 16338
MMLWIHEAWRVSLIIMRCAAELEKRLTDFGVANSERNFIGTVHSFALNQVIIPYSRCIPNLLPKDFRVATRNECRTAVEEAYKTLFGNSGDPHARWRFAEEKRRRDVNRLLPVWQNKNPELAKFIETYEAELRRSGLIDFDDMPLIAFRMINEHIWIRNAIQSRYPVLFVDEYQDLGCVLHELVLLLCFEGGIRLFAVGDADQSIYGFNGANPSLLESLQSLKDVKTFRLRFNYRSGSKIIRASLGALGEERDYRGPSGTAEGELGFHSVNGDYDSQAHYIAKKLLPSLTKRGFQLERIGLLYRAAWLGDKLVDALQAENIALIRADSNALIKRNSRLARFIEACSQWVTGGWKEASPSFNQLLGQALSIAYGRSVNQAEEQNITIQLINFLRNGIERSETAHQWLKRLYTELIIKWQLLSQNNFQEWEVCAELLQRTDPDRSLDMTLEIFAGKVDGAGRVILSTLHSAKGREFDVAIMYGVNSYDFPSKRDCITIHTMREARRLFYVGVTRPRKELHMVYEKGKHSP

SEQ ID NO: 64854 - protein, 695 aa, Peptoclostridium difficile T15
MQLTKIILSNYRCFGKEPTTIEINNLTGFIGHNSSGKTALLSALIKLFGEKSSDRIIERSDFHIPESTDPDSVDMNELYIETQFEFPELERDEDNLSIPVFFKNMVVNEPGGKPYLRIRLEASWEKSSNPEGSIDTNIYYITSTTEDINPEDKRNIKRHDLDQIKIIYVPAIRKPDEQLRNVSGTIISRLLNGISWSEQTKTKIKTKANETEKIFFEEKGVESLKKSLETQWNSYHKDIRYSNPKINFNSTDLETILKKVEVTFSPTETHRDYRVEELGDGLRSLFYLSLVNTFLEIEEEILKSINDDKEEEIFTLIPPVLTIVAVEEPENHISPHLLGRVVEKLNLISKKENSQTILTSHSPAIVKRIEPTDIRYFRICKEHECTKVKSIILPNKEKEVEQFKFVKEAVLAYPELYFAKLVVLGEGDSEEIIIKKMIELKAESVDSSEISIVPLGGRHVNHFWRLLNDLEIPFITLLDLDRERDGGGWGRIKYAIQQLIKIGRDKNVLLDTKDGILQDNEFKDMHTWNVTKTEIMLEWIKMLKEYDVYFSSPLDIDFAMLQSFKDKYIATLESSQGPIIKGYGKIQNLEINEDTEEGLKNAYQARIVSDIKSTLKQEGGDGSTYTEEEKKLMIWYSYFFLGRGKPTTHLSLFSNNTDLDFESFPECLKEFVNRVIEKMIDDLGDEEDNEEELDC

SEQ ID NO: 64855 - protein, 623 aa, Peptoclostridium difficile T15
MKRNWIVKEEWHPASGFKLEVEAMNTVINDKNTLVVAGPGAGKTELLAQRACFLLETNTCKYPKKILAISFKKDAADNLKERVELRCGKELALRFESKTYDAFAKEIVDRFRNSLDEKYRPLNNYNIATNGDVRRAFEISGLNFRGNQTEFNKLYGNKLSINKLPLHTNFVDKIFIDAWNVLLKGKEDNNFESSLTFEMISRLAEYLIRTNRYIKKAIEMTYSHVFLDEFQDTTSIQYDLVKACFFKTETIITAVGDGKQRIMLWAGARKSIFEDFQNDFLSQKRTLIMNHRSAPRLVEIQKAMYNRFNEDAIDLKTNEKWNHEDGEAYLRLFEDYIKEADILSEEIVGLVESGIKINEICILVKQSVDIYSKEIIHKLSECNIKARNEAVYQELLKEDIIKILVSLFRLSLNDRSPDDWDYIYDILGELYGIDEGYNPKVLNDFITKVELMINDIKVNLNITDEKQFSDLVDSKVEYISYEKFASKFQQYKSKDYFDDLVDKFKKLVWSEYNETKDWIKAIDNFEGKNSIPIMTIHKSKGLEYDTIFFVGLEDSAFWNFKNQPDEDRCAFFVALSRAKRRIDFTFSLDRPAGFSNSQTHDCINEFYELFDDTKIVKRIEYCD

SEQ ID NO: 64856 - protein, 689 aa, Peptoclostridium difficile E12; identical to SEQ ID NO: 63298

SEQ ID NO: 64857 - protein, 621 aa, Peptoclostridium difficile E12; identical to SEQ ID NO: 63299

SEQ ID NO: 64858 - protein, 729 aa, Staphylococcus aureus M0047; identical to SEQ ID NO: 62500

SEQ ID NO: 64859 - protein, 597 aa, Staphylococcus aureus M0047; identical to SEQ ID NO: 62501

SEQ ID NO: 64860 - protein, 729 aa, Staphylococcus aureus M0059; identical to SEQ ID NO: 62500

SEQ ID NO: 64861 - protein, 597 aa, Staphylococcus aureus M0059; identical to SEQ ID NO: 62501

SEQ ID NO: 64862 - protein, 687 aa, Peptoclostridium difficile E9; identical to SEQ ID NO: 64408

SEQ ID NO: 64863 - protein, 428 aa, Peptoclostridium difficile E9; identical to SEQ ID NO: 64413

SEQ ID NO: 64864 - protein, 717 aa, Xenorhabdus cabanillasii JM26
MKISSFVLKNYRRLADVTLVLDDKTTVLVGANNSGKTSYIGAIYTFLRSSDNLKVRDISKLNWKKIQKLGEQVEREFPTSEKMQELLEAFISLLPSLDIEITAKASEAYKVRDILPDLEWCGGVLSVRITYEPTDISKLCREFVDMRGVVSEHKGKVSLWPKDLCDFLEKGRNFSNFIKQKHYILSKETKPIPNEVLQPLKSEALKKLIRVDVISEQRGLDSEDNTYQKGPYSEKQRLNKLLRAYYDRILNPEDFPEMQDLEVLGQQQALEEGFTERLNKQFEAPFNELKNMGYPGIGGNPTVEIAAKISGMDALKKSSSIRYRFDKEEEEFVPESYLGLGYQNLIYLTFRLLEFRDKWMRVGKSAAFEYKIEDQIEPIHLVLLEEPEVNLHAQVQRVFVSKAYNTLRSHPDLCDKQDESEYQTQLVISTHSSHIINDIDFKELRYFRRNNANSSIAMDHTSITNMSELFLDAKKELQFVRKHLKLTHCDLFFADGVIFVEGQAERLLVPEFISNSFPDLSKRYISILEVNGAHTHKYRDLIEKLGIATLVLTDLDSVNNEGKSCSPQKNSGQKTSNNTLKMWHPKKEDLDDLVALSKGEHATESQGAPLYVAYQKPTQISGKEILSRTFEDALILANFEDEYFQSKEKIKAAKDAFENDSNPLSKSLYDYVQALKKGDFAFDCLFYLANKKGNSFNPPEYMSEGLKWLDSQLQPKM

SEQ ID NO: 64865 - protein, 647 aa, Xenorhabdus cabanillasii JM26
MSEEFYLAETKPIDHDNRVDEGIQECLRIGSGKSFITFAGAGSGKTYSLKEALDFLKKEHSGNFIRQGKQIAVVTFTNNAADEIMDRIEQNPIFAVSTIHSFCWSAIAGFNEDIRKWYLEKIPAVLAEVDDLERRGRAGKASDARKRTITLLKEKMDWLTEPRSFIYDPNGVNSTKNALSHADVLKIFSSFLTTKPMMAEVIVNKFPFIFIDESQDTNKDVIRAFFELQYAKSNKVVIGLFGDTMQRIFGGGESELGNTKSSGWITFDKEMNHRSARRIVALGNQIRSEYDKRKQFARDGAANGYVRYFLLSNDVSNKNEIEARIREVMAEVTDDADWTDIQSKDTAILLLEHKMAGRRLGFDDLWNKLEKSDKIKERISNGENTELNFFSDIVFPMAEASRNERRAELMSILRERNSPLLEANVLDSNKDDPLSLARTAEHAFKNVVSNNKVSFRAVLEVLAKHNLLRIPEKLLSFVVASEERKVESEPEQIGAIQEVESETEERDDSEITAWAEALETDFFQIRNYKDYINENSIFLTHQGVKGNEFKRVMVVMDDDEAGGFLFSYEQYFGAKELSSSSKKKQDAGEETGLDRTRRLFYVTSTRAKNSLAHVIYTSDVAKIKENLINKKFAQEGEIIEFYGNKYE

SEQ ID NO: 64866 - protein, 729 aa, Staphylococcus aureus M0088; identical to SEQ ID NO: 62500

SEQ ID NO: 64867 - protein, 597 aa, Staphylococcus aureus M0088; identical to SEQ ID NO: 62501

SEQ ID NO: 64868 - protein, 729 aa, Staphylococcus aureus M0113; identical to SEQ ID NO: 62500

SEQ ID NO: 64869 - protein, 597 aa, Staphylococcus aureus M0113; identical to SEQ ID NO: 62501

SEQ ID NO: 64870 - protein, 729 aa, Staphylococcus aureus M1375; identical to SEQ ID NO: 62500

SEQ ID NO: 64871 - protein, 597 aa, Staphylococcus aureus M1375; identical to SEQ ID NO: 62501

SEQ ID NO: 64872 - protein, 729 aa, Staphylococcus aureus M1427; identical to SEQ ID NO: 62500

SEQ ID NO: 64873 - protein, 597 aa, Staphylococcus aureus M1427; identical to SEQ ID NO: 62501

SEQ ID NO: 64874 - protein, 729 aa, Staphylococcus aureus M1183; identical to SEQ ID NO: 62500

SEQ ID NO: 64875 - protein, 597 aa, Staphylococcus aureus M1183; identical to SEQ ID NO: 62501

SEQ ID NO: 64876 - protein, 729 aa, Staphylococcus aureus M1294; identical to SEQ ID NO: 62500

SEQ ID NO: 64877 - protein, 597 aa, Staphylococcus aureus M1294; identical to SEQ ID NO: 62501

SEQ ID NO: 64878 - protein, 729 aa, Staphylococcus aureus M1346; identical to SEQ ID NO: 62500

SEQ ID NO: 64879 - protein, 597 aa, Staphylococcus aureus M1346; identical to SEQ ID NO: 62501

SEQ ID NO: 64880 - protein, 583 aa, Enterobacter aerogenes UCI 46; identical to SEQ ID NO: 63878

SEQ ID NO: 64881 - protein, 591 aa, Enterobacter aerogenes UCI 46; identical to SEQ ID NO: 63879

SEQ ID NO: 64882 - protein, 770 aa, Enterobacter aerogenes UCI 45
MSAADATTSLSGQISLRFVELCQFRRLGKVQLEIDPKTTILVGANNSGKTSILAALRHFLADGSSFGAFDISVSQWPKLRELGRAWDALEEDPSTSGASEGEWEEQLGTLLSAMPTLDLWFDAKAGMFHYVSPFLSKFSWKGGGVGVRLRLEPATNIEELKQLAWKYHLTRIPVKDMGKDSLAWPIDLLDFWLREPSQLGQVRAYKLDADNNPLDGIKTYVSQVLDADSSQIDRKHLQKLIKVDFVAAQRGLGSEEADSRSASGPHRIGLFSNQLLKFARQHLNVAATGHGHRADLIKAVANAQQELDKKIHEAIGPSVEEVKELGYPGLHDPQEIRFRTRIQTAELLDHGTAVQYSMQKDSLEELLPEYSIGLGYQNLQSLSYQLVSFKASRLNPEKGAPAPVHLVMIEEPEAHLHVQVQRIFPGKAHKLISPNGSDESGLKSQLIISTHSSHLAHAENFDRLRYVRRIAKSEEQNMPTTEVVNLGQVFGDDKTTRQFAERYFRVQHTDLLFANAAIFVEGVAERMLLPLFIERDFATLNSRYLSFLDIGGSHAHRLRSLVERLRIPTVIITDIDPVEEKVGNPKKNDEPTTTLVAVANTGQPGLQCGNPTLRGWHPKLQQLEDFKDPKDEHLVWNEIAECFVRFAWQLPVAEADGQWPSTFEDSLILRNIPWFKQLIDEKVDGDGKKIKPPKGALGSVARKVAENDNIPDLLSALHKLMHGSFNKGDFAASIFEMVAADEPIVCPKYIEDALEWLQTQLEPSREVMHD

SEQ ID NO: 64883 - protein, 649 aa, Enterobacter aerogenes UCI 45
MTNSPILDGNDRDAGVVEEICGYLTDTPPRNYFLFAGAGSGKTRTLVEVLRRLTGVTEHEKGGQLARSLKMYGRSIRVVTYTKNAVSVINGRLGDNSLVSVSTIHSFCWELINGFNDDIRESLIAVKEAQLAKETAEAQAKPKGITAAKQRDLDEITNEIEDLRTTEVFKYHPDRNTYGPGALPHNSVLDATAWLLQNKPTLQSILKDRHPIILIDESQDTMKGVLDSLMFLVKKREGDLTLGLLGDHRQRIYMDGHADLPSIVPENWATPELQMNHRSQRRIVTLINKIWETELEGRTQPAKGSAQHPRTEKAGGTVRLFLGDTLQSPDDKVLSERWCAEQMFEVSGSVAWNQEQYKLLALEHKLVATRGSFLDVYEAMFLLDPHTAAPSGSGDNKGPSTVQILLNELAHLEACVSNEGIVNEFKATEVLRRYGALDNIPEDSEARAERTDEMLEAIAIFAMACANPESTVAEVLAPVLSAELFEVDHRLQEAYADKSPAPQVPGRGEDESKQTRMRRGWCALFAAPWKQLKCYRNYLAGISELATHQVVKGSEFKHVMVVMDDALAGGTRFKYDTIFGGTQLSPNDKKNAKSGKETTIDRTLRLLYVTCSRAQESLALVLWSSDPAAAMARIKESQWFAEDEIQIIT

SEQ ID NO: 64884 - protein, 770 aa, Enterobacter aerogenes UCI 28; identical to SEQ ID NO: 64882

SEQ ID NO: 64885 - protein, 649 aa, Enterobacter aerogenes UCI 28; identical to SEQ ID NO: 64883

SEQ ID NO: 64886 - protein, 770 aa, Enterobacter aerogenes UCI 27; identical to SEQ ID NO: 64882

SEQ ID NO: 64887 - protein, 649 aa, Enterobacter aerogenes UCI 27; identical to SEQ ID NO: 64883

SEQ ID NO: 64888 - protein, 583 aa, Enterobacter aerogenes UCI 16; identical to SEQ ID NO: 63878

SEQ ID NO: 64889 - protein, 591 aa, Enterobacter aerogenes UCI 16; identical to SEQ ID NO: 63879

SEQ ID NO: 64890 - protein, 712 aa, Enterobacter sp. MGH 10
MYISKLTLVNYKNFKNTSLRFHKGVNTIIGENGSGKSNILRAIRLLLDDNMVRSAYRLEEGDFSRSLDQWQGHWIIISMEFDEITTDESVQALFLHGTAPLDDGPIHKATYNLIFRPKKDIRLKLAALELFDFKELSEIRDAITIDDYETLFTGRSSADFGNPAVYRSIVGDFDICDFSSETEFPEIGAKVPGFLSVTKEVSLTFIQALRDVVSEFHNNRTNPLLTLLKSKSGDINPLTMEPISEMVRGLNASIEGLEDVQSVRNHIRETIKDAAGETYSPASLSIKSDLPEEADKLFQSLRLFVGESEEGYEGAIHELSLGGANLIYLTLKLLEFKYQREKLAMANFLLIEEPEAHIHTHIQKTLFDRIAYSDAQIIYTTHSTHISEVSNVSNVNILGRHGAFCEAYQPARGLDPTQINSIQRYLDAVRSNLLFAKSVILVEGDVEEILIPILIKLVLGVSVDELGISVINIRSTGFKNVAVLFHDLRIKKRCAIITDLDKAFFNITVQATDNAIVAKIKAKAAGSQKAGLERQADLTEFTAENPWIETFYAKHTFEVDFVAAGNQEAIVQTIPVVYKDQGTREEAKQQLKSGDLQQMGSRTLTMARQEGKGWFALLLAEYLTPQVQIPEYIIQAIHFAHGKFPRSLIVRILQYRAEYRYGADVANLPAKQLFLQEINRFAQGDIGLAEFRITIGRLLPGDPIIVFLGKLQ

SEQ ID NO: 64891 - protein, 594 aa, Enterobacter sp. MGH 10
MRFIWDPSDLNPEQAAAVTEPSSIFLIACPGSGKTRTLTYKIAYELSRRTDKRMVVAITYTHRAADEIQERIEDLGVDTSGLWIGTIHAFCLEWILKPYGIYSPELARGYRVIDPYDRERLLERLCAQYKGITHWDCDYYVTETGYQLGCVDTRKHPIIQNVLKEYFKELSSSRQIDFELILWYAYCLMRDRPPIAVLLSRVFSHILVDEYQDTKQIQYSILTSILRAGRGETKILIVGDPNQAIYGSLGGYAMPLDEFRAQAGIPIKEFALSLNYRSSERIISYFSNYSVHASKITGAGKDAKFPSRITYNQKVTRSNVHDEIVRLIRKSLDNGYSPENICVLAPQWVLLASTTRKLVAMLPDQQFDGPGLIPFSNNFDNFWFKVSKVLLTDSSPALLIRRLRWANEVIKDLDSFGVDTKTLTPRILLRESNALTVNELDGLRYLDQAFTELLKRLNISPEIHPALLTHREAFFSSSAARIERLQKEGATYINQISVFKKVFRERSGITVSTIHGVKGAEFDVVIAFGLLEGMVPHFNEVNGHVAASKLLYVLSSRARKNLHLISESERQRGRYSSYSATELLAACIFNYDEE

SEQ ID NO: 64892 - protein, 712 aa, Enterobacter sp. MGH 7; identical to SEQ ID NO: 63712

SEQ ID NO: 64893 - protein, 599 aa, Enterobacter sp. MGH 7; identical to SEQ ID NO: 63713

SEQ ID NO: 64894 - protein, 716 aa, Enterobacter sp. MGH 6
MCSKTMLRAQSITMYINKLAIRNYKNFRSSNFYFVKGSVNTIIGENASGKTNLFNAMRLILDDSLPMNSRILSNEDFYRGLSEPFGHWIIITLYFDDLSESEEEQVLANYTVNDGNDKSIKEGNYTFIYRPKFHIRQKLYELTLEDDNVEARSASFTEFASNHIISKETYEAVAFVRTKVDLNNDEIYKQVVGDFDSYSFSNPNDDDATVLGVKKPPYFALGSEVACTYVKALRNVVADLKYYKTNPLYKLLTLKSKQIDDRRDIVENVKEINGKISAIPEIERLSNKISASLLNTVGSTYSPKILVSSQLPEDFTELIQSLGLVVEDSLDYNGSGKIDDLSLGGANLIYLALKLYEYEEIRDSEEHITHFLLIEEPEAHIHNHIQKTLFDNFNFKNTQVFVSTHSTQISSVSKISSMNILSRQNGFTDVYHPSFGLTPKEISSVERYLDAIRSDLLFAKSVILVEGDAELILIPAMVKETLGISLDELGISLIKVDGTVFKHISNLFHEKRLKRKCAILTDLDSAYVKVADNIFDADFVESLVDAEDDGLRRKEELDKYIEGNEFITVHYAENTFETELVRYDENNNLFIEVMKTEYKKEAYFKKAESDVNSSDLRVRYKRVLKFAKKIGKGWLATEMVEHLSVDNRVPDYILQAIQFVLRDRNVEPIYQKMLDYNMSLMGVKAFDCINAEKDFSSKMIEYKKHFNDSFVRLLEL

SEQ ID NO: 64895 - protein, 583 aa, Enterobacter sp. MGH 6
MPYRNLTSEQMDAVKFNGNLLLTACPGSGKTKTLVSKLCFILENKELFCIGKKKIIALTYTNIAADTILERIMSFGISSESLWIGTIHSFCLNWIIKPNVDKIPRLCRGFSVIDEHEKEFLINELKEKHGLSANDKVFTNLDFNLGQFYSRGTKEHLIVKEYHNHLYEKKLIDFDLILNLTCRVLTKYNALCERLSLLLRCILVDEYQDTSLIQYEILRQIVLKKNTMITFIGDKEQAIYTGLGAVVKNRDELINCFQLDNLTEMKLTGCFRSSQSIVDFYSKYKDEDYEINSLSDNKDFNSVIFKESEVDVSQLPIYVSGIIRTHLAQGVLPNEIAILCPGWFDVIKLSNDIVTLNPDIEIDGVMISPIPKNNENLWLALVKLFLIRRVPSNFNTRQKLLRDFLQELNVVAPYTESLSPKKILKIINKISLSVDYNCEIDVWLRQVITRFCHSINLGISNDSYYYQEMELLINATLKRMLKYNMAYKANELHLFFNFRSGVKITTCHSTKGDEYEVVICTGLLNGKIPNWNDIINCSSEHQNYVARRLLYVVSSRAKKHLYMISERGYKTKRGYPYQTTPQL

SEQ ID NO: 64896 - protein, 716 aa, Enterobacter sp. MGH 1; identical to SEQ ID NO: 64894

SEQ ID NO: 64897 - protein, 583 aa, Enterobacter sp. MGH 1; identical to SEQ ID NO: 64895

SEQ ID NO: 64898 - protein, 729 aa, Staphylococcus aureus UCIM6015; identical to SEQ ID NO: 62500

SEQ ID NO: 64899 - protein, 597 aa, Staphylococcus aureus UCIM6015; identical to SEQ ID NO: 62501

SEQ ID NO: 64900 - protein, 729 aa, Staphylococcus aureus SJOS6053; identical to SEQ ID NO: 62500

SEQ ID NO: 64901 - protein, 597 aa, Staphylococcus aureus SJOS6053; identical to SEQ ID NO: 62501

SEQ ID NO: 64902 - protein, 729 aa, Staphylococcus aureus SJOS6072; identical to SEQ ID NO: 62500

SEQ ID NO: 64903 - protein, 597 aa, Staphylococcus aureus SJOS6072; identical to SEQ ID NO: 62501

SEQ ID NO: 64904 - protein, 729 aa, Staphylococcus aureus FVRH6002; identical to SEQ ID NO: 62500

SEQ ID NO: 64905 - protein, 597 aa, Staphylococcus aureus FVRH6002; identical to SEQ ID NO: 62501

SEQ ID NO: 64906 - protein, 729 aa, Staphylococcus aureus LAMC0011; identical to SEQ ID NO: 62500

SEQ ID NO: 64907 - protein, 597 aa, Staphylococcus aureus LAMC0011; identical to SEQ ID NO: 62501

SEQ ID NO: 64908 - protein, 729 aa, Staphylococcus aureus UCIM6042; identical to SEQ ID NO: 62500

SEQ ID NO: 64909 - protein, 597 aa, Staphylococcus aureus UCIM6042; identical to SEQ ID NO: 62501

SEQ ID NO: 64910 - protein, 729 aa, Staphylococcus aureus WAMC6030; identical to SEQ ID NO: 62500

SEQ ID NO: 64911 - protein, 597 aa, Staphylococcus aureus WAMC6030; identical to SEQ ID NO: 62501

SEQ ID NO: 64912 - protein, 729 aa, Staphylococcus aureus WAMC6102; identical to SEQ ID NO: 62500

SEQ ID NO: 64913 - protein, 597 aa, Staphylococcus aureus WAMC6102; identical to SEQ ID NO: 62501

SEQ ID NO: 64914 - protein, 729 aa, Staphylococcus aureus KINW6048; identical to SEQ ID NO: 62500

SEQ ID NO: 64915 - protein, 597 aa, Staphylococcus aureus KINW6048
MTNIFEKIVNDLNLEQKDVVESEDNLYVNACPGSGKTRVLTRKIAYQAIKHDGSLKRIIAITYTNRAAEEIKERLSLLSIDDDINIWVGTIHQFCLEFIIYPFKMNLSRVSKGFTIIDDYTQRAYVSQINNMLNLNLKTYELNKIDLSLSHDFKINEVQYTQVSEMYHTMLEKNKEIDFDMILLVAYKILTVNSNVARNIASNIRAIYVDEFQDTRELQYNVIAKLLQNNPQIQSMFVGDIDQAIYGSLDGIAKSVEELEMLTSHTFQSKTLHGCYRSNQRLVDFYSNFQSCPYEIESRGNNKNDRGFISYDCKVTKEDLPNIIKNIIKEKIESGIHEKDICVLAPQHYPLFSLGEYLKKELPYCNFDAINISPIKVNNHSLFFKLAILYFTESGEKVRRRKLIANDILIILKNEFVIEVKDYFIDLDLLQLINSVKRMYSGDDNGVDLYKFVTKHIFVNLNIDEKNYPSIFKHYLFFINEVEDRIKNNSLSSSVSSFKKMFKSRDGITLTTAHKVKGNEYDTVIAINLLNGKIPHWNEIFNVSDKGISSARKLLYVICSRAKNNLFLFSEVGYFTSKGDLLYPTQLLDKIEFDYNI

SEQ ID NO: 64916 - protein, 729 aa, Staphylococcus aureus M0800; identical to SEQ ID NO: 62500

SEQ ID NO: 64917 - protein, 597 aa, Staphylococcus aureus M0800; identical to SEQ ID NO: 62501

SEQ ID NO: 64918 - protein, 729 aa, Staphylococcus aureus M0801; identical to SEQ ID NO: 62500

SEQ ID NO: 64919 - protein, 597 aa, Staphylococcus aureus M0801; identical to SEQ ID NO: 62501

SEQ ID NO: 64920 - protein, 729 aa, Staphylococcus aureus M0833; identical to SEQ ID NO: 62500

SEQ ID NO: 64921 - protein, 597 aa, Staphylococcus aureus M0833; identical to SEQ ID NO: 62501

SEQ ID NO: 64922 - protein, 729 aa, Staphylococcus aureus M0853; identical to SEQ ID NO: 62500

SEQ ID NO: 64923 - protein, 597 aa, Staphylococcus aureus M0853; identical to SEQ ID NO: 62501

SEQ ID NO: 64924 - protein, 729 aa, Staphylococcus aureus M0858; identical to SEQ ID NO: 62500

SEQ ID NO: 64925 - protein, 597 aa, Staphylococcus aureus M0858; identical to SEQ ID NO: 62501

SEQ ID NO: 64926 - protein, 729 aa, Staphylococcus aureus M0893; identical to SEQ ID NO: 62500

SEQ ID NO: 64927 - protein, 597 aa, Staphylococcus aureus M0893; identical to SEQ ID NO: 62501

SEQ ID NO: 64928 - protein, 729 aa, Staphylococcus aureus M0894; identical to SEQ ID NO: 62500

SEQ ID NO: 64929 - protein, 597 aa, Staphylococcus aureus M0894; identical to SEQ ID NO: 62501

SEQ ID NO: 64930 - protein, 729 aa, Staphylococcus aureus M0910; identical to SEQ ID NO: 62500

SEQ ID NO: 64931 - protein, 597 aa, Staphylococcus aureus M0910; identical to SEQ ID NO: 62501

SEQ ID NO: 64932 - protein, 729 aa, Staphylococcus aureus M1017; identical to SEQ ID NO: 62500

SEQ ID NO: 64933 - protein, 597 aa, Staphylococcus aureus M1017; identical to SEQ ID NO: 62501

SEQ ID NO: 64934 - protein, 729 aa, Staphylococcus aureus M1056; identical to SEQ ID NO: 62500

SEQ ID NO: 64935 - protein, 597 aa, Staphylococcus aureus M1056; identical to SEQ ID NO: 62501

SEQ ID NO: 64936 - protein, 729 aa, Staphylococcus aureus M1094; identical to SEQ ID NO: 62500

SEQ ID NO: 64937 - protein, 597 aa, Staphylococcus aureus M1094; identical to SEQ ID NO: 62501

SEQ ID NO: 64938 - protein, 729 aa, Staphylococcus aureus M1101; identical to SEQ ID NO: 62500

SEQ ID NO: 64939 - protein, 597 aa, Staphylococcus aureus M1101; identical to SEQ ID NO: 62501

SEQ ID NO: 64940 - protein, 729 aa, Staphylococcus aureus M0760; identical to SEQ ID NO: 62500

SEQ ID NO: 64941 - protein, 597 aa, Staphylococcus aureus M0760; identical to SEQ ID NO: 62501

SEQ ID NO: 64942 - protein, 729 aa, Staphylococcus aureus M0766; identical to SEQ ID NO: 62500

SEQ ID NO: 64943 - protein, 597 aa, Staphylococcus aureus M0766; identical to SEQ ID NO: 62501

SEQ ID NO: 64944 - protein, 729 aa, Staphylococcus aureus M0771; identical to SEQ ID NO: 62500

SEQ ID NO: 64945 - protein, 597 aa, Staphylococcus aureus M0771; identical to SEQ ID NO: 62501

SEQ ID NO: 64946 - protein, 729 aa, Staphylococcus aureus M1400; identical to SEQ ID NO: 62500

SEQ ID NO: 64947 - protein, 597 aa, Staphylococcus aureus M1400; identical to SEQ ID NO: 62501

SEQ ID NO: 64948 - protein, 729 aa, Staphylococcus aureus M1408; identical to SEQ ID NO: 62500

SEQ ID NO: 64949 - protein, 597 aa, Staphylococcus aureus M1408; identical to SEQ ID NO: 62501

SEQ ID NO: 64950 - protein, 729 aa, Staphylococcus aureus M1436; identical to SEQ ID NO: 62500

SEQ ID NO: 64951 - protein, 597 aa, Staphylococcus aureus M1436; identical to SEQ ID NO: 62501

SEQ ID NO: 64952 - protein, 729 aa, Staphylococcus aureus M1447; identical to SEQ ID NO: 62500

SEQ ID NO: 64953 - protein, 597 aa, Staphylococcus aureus M1447; identical to SEQ ID NO: 62501

SEQ ID NO: 64954 - protein, 729 aa, Staphylococcus aureus M1348; identical to SEQ ID NO: 62500

SEQ ID NO: 64955 - protein, 597 aa, Staphylococcus aureus M1348; identical to SEQ ID NO: 62501

SEQ ID NO: 64956 - protein, 729 aa, Staphylococcus aureus M1351; identical to SEQ ID NO: 62500

SEQ ID NO: 64957 - protein, 597 aa, Staphylococcus aureus M1351; identical to SEQ ID NO: 62501

SEQ ID NO: 64958 - protein, 640 aa, Corynebacterium casei LMG S-19264
MKFTILRISNFQSFGPTPTILNLADMTYVLGPNGAGKTAVLEALSRMFSPVTAQRTVRISDFHVPMDHSRSELQDEEPVLWIEVDIEFPEADSEGYYASIPPNFHHMMIESADRVPKVRVRLTAKLALDGVVEERIEYIRQVDESGEPTVCSEMSRYDRGYIEVHYLPARRNPSEHIAYTATSLIGRTLRAADWSQERTTLSDLSEQLTDALTSNSAVSSMGLSLTKEWGGLHRGEFFTEPTITFGRGELEGVLRQLTIHFSPSHDGASLPFDLLSDGQKSLLYISLVLAWQSLARRVLRNEEASLDPTRLRPPVHTIIALEEPENSLAPQYLGRIIRQLHNACSEGDLQALIATHASTLLRRVKPESVCFLRLNSERETTVHRVLLPEDDDEAAKHVREAVQAYPELYFSRLVILGEGDSEQVVLPRILAAAGIAEDDASVSVVPLGGRHVNHFWRLLNELNIPHVTLLDLDSGRYQAGWGRVRYALNQINKVKPKTYPREELNNLPKWDSTDSFPQFPRGKGPIWDLEQQGVFFSNPVDLDLLMLEAFPDAYDVERSTPDKKEIVAVLGKSHVNKDLLNPKVLSLFGDYHENFNLKSKPATHLRALSMLTDEELCEGLPAVFKRLIKHVDAKLMGLPE

SEQ ID NO: 64959 - protein, 552 aa, Corynebacterium casei LMG S-19264; identical to SEQ ID NO: 63289

SEQ ID NO: 64960 - protein, 729 aa, Staphylococcus aureus M0007; identical to SEQ ID NO: 62500

SEQ ID NO: 64961 - protein, 597 aa, Staphylococcus aureus M0007; identical to SEQ ID NO: 62501

SEQ ID NO: 64962 - protein, 729 aa, Staphylococcus aureus M0008; identical to SEQ ID NO: 62500

SEQ ID NO: 64963 - protein, 597 aa, Staphylococcus aureus M0008; identical to SEQ ID NO: 62501

SEQ ID NO: 64964 - protein, 729 aa, Staphylococcus aureus M0080; identical to SEQ ID NO: 62500

SEQ ID NO: 64965 - protein, 597 aa, Staphylococcus aureus M0080; identical to SEQ ID NO: 62501

SEQ ID NO: 64966 - protein, 729 aa, Staphylococcus aureus M0097; identical to SEQ ID NO: 62500

SEQ ID NO: 64967 - protein, 597 aa, Staphylococcus aureus M0097; identical to SEQ ID NO: 62501

SEQ ID NO: 64968 - protein, 729 aa, Staphylococcus aureus M0100; identical to SEQ ID NO: 62500

SEQ ID NO: 64969 - protein, 597 aa, Staphylococcus aureus M0100; identical to SEQ ID NO: 62501

SEQ ID NO: 64970 - protein, 729 aa, Staphylococcus aureus M0101; identical to SEQ ID NO: 62500

SEQ ID NO: 64971 - protein, 597 aa, Staphylococcus aureus M0101; identical to SEQ ID NO: 62501

SEQ ID NO: 64972 - protein, 729 aa, Staphylococcus aureus M0107; identical to SEQ ID NO: 62500

SEQ ID NO: 64973 - protein, 597 aa, Staphylococcus aureus M0107; identical to SEQ ID NO: 62501

SEQ ID NO: 64974 - protein, 729 aa, Staphylococcus aureus M0109; identical to SEQ ID NO: 62500

SEQ ID NO: 64975 - protein, 597 aa, Staphylococcus aureus M0109; identical to SEQ ID NO: 62501

SEQ ID NO: 64976 - protein, 729 aa, Staphylococcus aureus M0111; identical to SEQ ID NO: 62500

SEQ ID NO: 64977 - protein, 597 aa, Staphylococcus aureus M0111; identical to SEQ ID NO: 62501

SEQ ID NO: 64978 - protein, 729 aa, Staphylococcus aureus M0123; identical to SEQ ID NO: 62500

SEQ ID NO: 64979 - protein, 597 aa, Staphylococcus aureus M0123; identical to SEQ ID NO: 62501

SEQ ID NO: 64980 - protein, 729 aa, Staphylococcus aureus M0186; identical to SEQ ID NO: 62500

SEQ ID NO: 64981 - protein, 597 aa, Staphylococcus aureus M0186; identical to SEQ ID NO: 62501

SEQ ID NO: 64982 - protein, 729 aa, Staphylococcus aureus M0337; identical to SEQ ID NO: 62500

SEQ ID NO: 64983 - protein, 597 aa, Staphylococcus aureus M0337; identical to SEQ ID NO: 62501

SEQ ID NO: 64984 - protein, 729 aa, Staphylococcus aureus M0353; identical to SEQ ID NO: 62500

SEQ ID NO: 64985 - protein, 597 aa, Staphylococcus aureus M0353; identical to SEQ ID NO: 62501

SEQ ID NO: 64986 - protein, 729 aa, Staphylococcus aureus M0453; identical to SEQ ID NO: 62500

SEQ ID NO: 64987 - protein, 597 aa, Staphylococcus aureus M0453; identical to SEQ ID NO: 62501

SEQ ID NO: 64988 - protein, 729 aa, Staphylococcus aureus M0454; identical to SEQ ID NO: 62500

SEQ ID NO: 64989 - protein, 597 aa, Staphylococcus aureus M0454; identical to SEQ ID NO: 62501

SEQ ID NO: 64990 - protein, 729 aa, Staphylococcus aureus M0457; identical to SEQ ID NO: 62500

SEQ ID NO: 64991 - protein, 597 aa, Staphylococcus aureus M0457; identical to SEQ ID NO: 62501

SEQ ID NO: 64992 - protein, 729 aa, Staphylococcus aureus M0469; identical to SEQ ID NO: 62500

SEQ ID NO: 64993 - protein, 597 aa, Staphylococcus aureus M0469; identical to SEQ ID NO: 62501

SEQ ID NO: 64994 - protein, 729 aa, Staphylococcus aureus M0527; identical to SEQ ID NO: 62500

SEQ ID NO: 64995 - protein, 597 aa, Staphylococcus aureus M0527; identical to SEQ ID NO: 62501

SEQ ID NO: 64996 - protein, 729 aa, Staphylococcus aureus M0542; identical to SEQ ID NO: 62500

SEQ ID NO: 64997 - protein, 597 aa, Staphylococcus aureus M0542; identical to SEQ ID NO: 62501

SEQ ID NO: 64998 - protein, 729 aa, Staphylococcus aureus M0563; identical to SEQ ID NO: 62500

SEQ ID NO: 64999 - protein, 597 aa, Staphylococcus aureus M0563; identical to SEQ ID NO: 62501

SEQ ID NO: 65000 - protein, 729 aa, Staphylococcus aureus M0564; identical to SEQ ID NO: 62500

SEQ ID NO: 65001 - protein, 597 aa, Staphylococcus aureus M0564; identical to SEQ ID NO: 62501

SEQ ID NO: 65002 - protein, 729 aa, Staphylococcus aureus M0567; identical to SEQ ID NO: 62500

SEQ ID NO: 65003 - protein, 597 aa, Staphylococcus aureus M0567; identical to SEQ ID NO: 62501

SEQ ID NO: 65004 - protein, 729 aa, Staphylococcus aureus M0577; identical to SEQ ID NO: 62500

SEQ ID NO: 65005 - protein, 597 aa, Staphylococcus aureus M0577; identical to SEQ ID NO: 62501

SEQ ID NO: 65006 - protein, 729 aa, Staphylococcus aureus M0593; identical to SEQ ID NO: 62500

SEQ ID NO: 65007 - protein, 597 aa, Staphylococcus aureus M0593; identical to SEQ ID NO: 62501

SEQ ID NO: 65008 - protein, 729 aa, Staphylococcus aureus M0615; identical to SEQ ID NO: 62500

SEQ ID NO: 65009 - protein, 597 aa, Staphylococcus aureus M0615; identical to SEQ ID NO: 62501

SEQ ID NO: 65010 - protein, 663 aa, Vibrio parahaemolyticus V-223/04; identical to SEQ ID NO: 63134

SEQ ID NO: 65011 - protein, 583 aa, Vibrio parahaemolyticus V-223/04; identical to SEQ ID NO: 63135

SEQ ID NO: 65012 - protein, 677 aa, Bacillus amyloliquefaciens EBL11
MKITKLIINNFRSFGPTNTEIELEELSVLIGANSSGKTSAIQALLKLFSPYQRDRLIERSDFHIPANENPLDYDESSLSIEAIIDFNELENDAEKVKTTIPPHFNHMVAGEVDGSPYVRIRLKAELSEGYTLEGNIEQGLYYVLSPLGTKAEDEDLQPVKASERSQVQMIYIPATRDPAVQLKNASGTILGRILKGINWPKEINSDIQEKMKQVDGIFDEVNGVKRLREILNSQWRKYHNDFRYGSTMVAFNHADLDSILKKVEVYFEPTETGSKYKVDQLGDGLRSIFYLTLVNSFLEIENEALQDDAEEDKKVYNLQPPVLTLLAVEEPENHISPHLLGRIMKALTDVSENDNAQVLVATHSPSMIKRVDPKSILHFRIDQKEIRTIVNSIILPEKDKEEEYKYIKAAIMAYPELYFSQFVVLGEGDSEEIILPKIINLLDTDLDQSNISIVPLGGRHVNHFWKLLHQLNIPYLTLLDLDLERNGGGWGRIKYALQQLIQLGYDKRELLSVQNGVLSDDEFSRMHTWSIEKEDERENLYSWVEFLEDYGVYYSAPLDIDFMMIESFLDAYKKTVPKNGGPKGVDKEKDSIEYMDRLEKGVRATLKTEGGSGITYSDEKKELMIWYDYFFLGRGKPGTHIMALENIDTKLLNGKLPIPLKKLTKGIKSFIDGDLSE

SEQ ID NO: 65013 - protein, 623 aa, Bacillus amyloliquefaciens EBL11
MSNYVKKESWIPKDGVVLERAAQEVVKYEKNAYVLSGPGAGKTELLAQKACYLLETNTSAYPARILAISFKRDAAKNLKERVEKRSGKEFANRFVSLTFDSFAKQIMDRFRLAIPEFYRPSLEYEIVNFNKRDVPILREEAEEPSEENGWNYYFDYELFAKTYAVERLPLHMDRINSVESWYRFQLWKTYINEKENSRLTFPMISRIVEYLFRSNPKILRAIRATYSHVFLDEFQDTTLIQYDLVRTIFMDSNVSVTAVGDLKQKIMGWAGAMEGVFTQFKEDFNAKEFEMVLNHRSAPNLVRIQTSIINDMMGGSTVVIPSDKWKNEDEGICEIWNFTYASEEAKTLALEIKTWIDQEKLERRDIGILVRQRADMYCDMLIDELRNLGIHSRIEDQWQDLLAENFMKFIIDVFSLATTDRDPKAWSSLISNVLSLRGDNETESYQVEKEINSFIVDFKKILKDETMKVTEKVVEQLLYEILTLIGLDIIKSSYPEYRKGNYLERKVKLTSEFLFYSYEKHKVWNKAIEDFLGIYSIPIMSIHKSKGLEFESVILLGLEDRAFWNYEDSPEDETFTFFVAMSRAKTRMIFTFCENRFYGQERSKINDIYQMLENAGVKQFKWT

SEQ ID NO: 65014 - protein, 585 aa, Streptococcus sp. AC15; identical to SEQ ID NO: 64812

SEQ ID NO: 65015 - protein, 512 aa, Streptococcus sp. AC15; identical to SEQ ID NO: 64813

SEQ ID NO: 65016 - protein, 729 aa, Staphylococcus aureus H79477; identical to SEQ ID NO: 62500

SEQ ID NO: 65017 - protein, 597 aa, Staphylococcus aureus H79477; identical to SEQ ID NO: 62501

SEQ ID NO: 65018 - protein, 696 aa, Bacillus firmus DS1
MYISELSLENFRSFKEKKTINFHEGINVIIGHNNAGKTTVIKALELLFDIKKSKRLSIDDFNKNTTCEELKKEPPKIIISATLLESETEEEYSDDLVTVSTWLTKIESPYEARITYEFYLPEREQDEYKREIDSIKSNDINEYWNEIQHRFLQKYVHKIHIGDPKYKNSVDTESMKKFAFQFLTAIRDVERDLYSGSNALLKEVIDFFMDYEVKINNAIDTDEKNKQIREKKRQFSKDAQGLIHSLQKRMEEGKEHMLRYVKNTGADYDKMQPSFEGSILDTELYSALKLIVENETGIKLPAINNGLGYNNLIYISLLLAKMQKDASGDYLGSNAKIFSILAIEEPEAHLHPNMQYKFLKFLKQNRETEVRQIFITSHSPNITAAVDLEDIIVLYKEQGKIEVAYPGKVFSDSDEDIKSKKYVQRFIDVTKADIFFAKNIVLVEGLAEQLLVPEFSIALGHDLTDTHTSVINIGGRYFEHFLKLFDVSKNSNAIRKKVACITDLDPVRKRKGIKDATWKACGPLFLNSDPGSYEYKACSNPLVKNYVEDSKSLIRVFSQKEKISSTFEYDLILKNITVKELVTESTSNDTEIKKLMDAYKSNKTIPEMLSLLRKGNYKEEVEKVVLQSEFSDDDKKKHIIAGRYLNSINKGEVAQELAYIISSNPNNVLKEVASNKIICPDYIKEAIEWIGQLQQN

SEQ ID NO: 65019 - protein, 530 aa, Bacillus firmus DS1
MDWSTATKLVNSKLSIPIDQHFKLCAGPGAGKTTFLIHHIRRILTYSTRLSKSRRIACITYTNTGVETIRSRLKDTGEDIEISTIHSFLYTHVVKPYLWLLNDISFPLDRLEGHDEIKPSYTTLKEYKQRTSQFWIKDDQGLSNALSKLSWVINKQEEVELGFLKPYHGKVEERFIKKNSYLTYKEICWEQGMMSHDDVLYFSYLILKKHEKVKEIIRAKFPYFLIDEFQDTSPIQVAITTLLAEKEITVGVIGDPSQSIYSFQGANGKTFSQFNIKGMSFYILENNHRSTIQIISVLNHMRNDKHFIQHSPDNKVGNKPVILIGDVFSSYRYFLENVKNDWCVLSYKNEVTNRIKYDIRDIVTTDFDLFYRDNKRGRLIYFVVHALEYGRQMKLKDAIKYMKKAYRSIEDFTDQDAFRNLKRLLNNYEDYYSNNIKDFYNTHIFNYYGVKSKITKGEISEYYENLGFDRLAAIVNIADDKSFHKTIHKAKGDEFKNVLVISSENNYNKQLDFLLSPDMSKEEHRVFYVV

SEQ ID NO: 65020 - protein, 695 aa, Klebsiella pneumoniae UCI 18
MQWEAAPDDQEPIQWDRFSPFLDVWLDVPPNELHHVQKILPTLDWDGESIGVRLRFEPKDPDALQHEYLTAKRAAAEVMAQAKEYGEQVSSTTAFALWPRSMMEFLAQRMRSTFEIRAYLLDPSKLKMPEEGRASPQTLPESSDPIDGGDPFNGLIRIDEISAQRGFGHSDQTGYTRGNESREDMAEPRMGKKLSSQLRNYYSQHLDPFDTPEPKDLQALMALHEAQTAFGTRLADCFSDALTELENIGYPGVTDPKLTITTNIRPIDGLNHPSAVQYEVPTHVTGSFGAHRLPEDSNGLGYQNLVSIVFALMAFRDNWMKVGKAGKSKVAEETLIPPLHLVLIEEPEAHLHAQVQQVFIKQAYGVLRKHDKLKDSSRLQTQLIISTHSSHLTHEAEFSSLRYFRRLPALAQSGAVPLTSVINLSEVFDGKDKTERFVKRYLKATHCDLFFADGAILVEGPAERILVPHFVREREAYAYLKRSYITWLEIGGSHAHRLKNLIEHLGLNTLIITDIDAKDGTTNAAVVPKRGMGQRARNETVKTWLPKEESFDALLDMESERKVLAEPGGYAIRVAYQTPIFMPFKSEEALEAVANTFEDALVYENPGLFANLDGYGLIAKFREALKESADLSELARKIFEALKNGTKAEFALDVLFSEEIERLKVPQYIDEGLVWLAEQLKRKEYDVLGKTEVGE

SEQ ID NO: 65021 - protein, 624 aa, Klebsiella pneumoniae UCI 18
MSRLETIIPDDEIDMPADAEIRKCLDLDTPKSFFLFAGAGSGKTRSLVSALQYVRDTFGDELRLKGQRVAVITYTNAASEEIQRRLDFDPTIDVSTIHSFAWSLIEGLNRDIREWLRAKITTDITKLEAEEAKGRKGTEASRTRLKKIASRTKRLQNLDNVKRFVYSPTGENLGRDSLNHAEVIHLTAYFLTTKPTMQNILIGRNPILLIDESQDTNKFLIEALFAVQAQHKETFVLGLIGDMMQRIYSDGKDGLDKNLPADWATPGKQMNHRCPKRIVKLINTVRSAVDKQIQRPRTNSLEGSVRLFVLPNHTVDKPAAERKIAMYMAEVADDEQWRNLALCKCLTLEHHMAASRLGFLELFAPLYSVKSWRTNLIDGSLPCVRFFTDEMLPLIQAKFAEDRFSIARILKKRSSLVSPDALQYAADQRSQLKLASAAMERLMALFAQGSDPSLGDVLRFVADSALLPIPESLQLCIASDNTLPSVTPYVDESDADHQSERTMAIGEFLLAPFSQVEKFASYVSGKAPFDTHQGVKGLEFERVMVIMDDEEARGFMFKYENLFGAKSVTDPSVEAVRRLFYVTCSRAQQSLALVAYAASPEQVRRFVMDQGWFNADEIVIGIPE

SEQ ID NO: 65022 - protein, 653 aa, Klebsiella pneumoniae MGH 43
MKIEKIKLQNFRCFGHEVVELNFEEELTILVGGNGSGKTAVLQAVSRLFGTSSAQRSVQRRDFHIPLGRQELQSGDSLFVEAVLAFPELEEQDATPLDAVPEFFNQMAASGEGGPLKARIRLQATWTDDGTPEGAIEEDIRWIRALDDNFEWDDCSRIQAVERSSIQFIYLPANRDATTQVTALLKGRLWQAAKWSTAFRDASYVNAGQIQSSFEEEEPSKFLLERLSKRWQQVHEADTDSKPRLRLIENRFEELVRKAEFTFTPDEEGQERHLSELSDGQRSLFHIALTAATLETEREAFSLPADDSSFEQDKLRRIHLTILAIEEPENSLSTFFLSRIIKQAREIGALPSAQVLLSSHSPAILSRIEPEEVRYFRMDRSARRSSIRELTLPEDDVEASVYVRLAVKAYPELYFARFVILGEGDSERVVIPKIAEEMGVSLDPSFVPVVPLGGRFVAHFWRLLNDLEIPHATLLDLDLGRRHGGVNTMRSCLQNLADIGSNFGSANGANVAQLTDQQLYNEGLQGQWLQAFRREGVFFSYPIDLDFAMLHAFPTAYQVANPGGNGPQSSAVAIQAKKVSTLKTGGNPALYTAHYDDAFKWYPYLFLSRSKPETHLAAFSRIAEGGVAASAPVELRALIEYVTDKLNLSGESE

SEQ ID NO: 65023 - protein, 621 aa, Klebsiella pneumoniae MGH 43; identical to SEQ ID NO: 64651

SEQ ID NO: 65024 - protein, 594 aa, Klebsiella pneumoniae MGH 39; identical to SEQ ID NO: 64482

SEQ ID NO: 65025 - protein, 605 aa, Klebsiella pneumoniae MGH 39; identical to SEQ ID NO: 64483

SEQ ID NO: 65026 - protein, 634 aa, Pseudomonas aeruginosa VRFPA06
MKLQTIRLSNFQSFGVQPTELGLDDITYLIGPNGSGKTAALQALCRLFAFDPSLRRILRSDFHVPFDEENVPEERQLWIEADFLFPELAEDEDNSTVAPHFGHMRLDEADGMPRVRFRLSATMGQDGDIEETLVYVLDANLDGSPLTTAQVPRSERNHIHVHYLPARRDPADHIAYGANALLGRMLRAVNWDAERDAIKDLTDQISDSLASNPSVNAFSSSLRAAWGALHKGSFFTDPKITFVASEVEALLRHMSVSFSPGHDEQLVDFSRLSDGQKSMLYLSLVLSSQAIGRAVLAEEDTSFDADKLRPPVFTLVAVEEPENSLSPHYLGRIVNALNLMTGNGDAQALIATHAPSMLRRVAPERIRYLRLTEGRTSRVAHIQLPDTTDEAHKFVREAVQAFPEVYFSRLVVLGEGDSEEIVLPRLLQAKGAPVDESAVSIAPLGGRHVNHFWRLLSALQIPYLTLLDLDVARYQAGWGRIKYVNDQLAAHEPGKTLPADHGIPKWNDAADKVRTYANYRSLLEARDVYFSFPMDLDFAMLLAYPDAYGVVREKPDESTIKAVLGKSHHDASQYSEDEQKLFGTYHHSFKLGSKPAAHIDALAKLSDVDLLANMPESLGRLADAVIAKLAELPE

SEQ ID NO: 65027 - protein, 557 aa, Pseudomonas aeruginosa VRFPA06
MITVSAWQPADGLTLEPNALRAAKEQVHCLALTAGPGAGKTEMLAQRADFLLRTGTCRYPKRVLAISFKVDASSNLKERVKRRCGSELASRFDSYTFHAFAKRIIDRFRPVLTGDYALDVGYKIADRKTGPSRSLIEFADLVPLAIQILQKSKMARNAIRQTYSDVFLDEFQDCTNLQYELLKLAFQGTSIRLTAVGDTKQKIMGWAGALDGIFQTFAADFAAVPLNMYRNFRSKPRLLRLQNEIIRVLDPTSVMPADQLVGDEGEVFAWRFDDSRKEAEYLADLIDGWIKTEQLPPAEIAVLIRNQLDLYADHLMAALEVRGIPFRNEQQMQDITVEPAARLIVDYLSCLYGQCEPKAWIRLMNQLIPFADEDIQSNARKDLDRLIKQQRKEAAIADLIVEPFSGWWEFVRAFLKQISLETLVALSPDYESQDRLKEVVRSTRARIEELLKLEPDLPKALERFSDDQAVRILTIHKSKGLEFDSVIIMAVENEIFFGNQAENRCAYFVGVSRAKKRLVLTHADQRERPAGANNWRVGRTPQAEYLGYAAPFVGQQE

SEQ ID NO: 65028 - protein, 781 aa, Burkholderia thailandensis H0587
MHIEFVEIANFRKLLSTRVDLSTTTTLFVGANNSGKTSALLAMRRFLSPRRCPFEIHDFTLSHLPAIVALGTSWIVARDAGDVVDLVVAPWVRFVPTLDLWLHVETGEMHRVRDLIPTLDWDGGRLGVRLRYEPKDLDLLFKDFMGAVAEAEAMRAAAIAAAALEHQDSDSPPDPPKLTLWPDNLVDFLGKKLSTHFTIRAYSLDPAKLAAPDKSQARPQALPAASLPIEGDPLNGLIRVHDIPAQRGFGEEQSSRDDEDTPAASAGSRLSDQLRSYYAKHLDPTKGPDPKDLGALQAIEAAQDAFDKRLTESFEVAFTEVEGMGYPGVTDPRPRVSTRLKAIDGLNHSAAISFEVDVSTEDGATIPILRLPEANNGLGYQNLISMIFRLMSFRDAWMRVGKASKGTTNTDIEPLHLVLVEEPEAHLHAQVQQVFIKKAYAVLRAHEDLGESKRLRTQLVVSTHSSHMAHETPFSCLRYFRRLPAGMAANVPVSTVINLSEVFGPASETERFVTRYLRAQHADLFFADAAIFVEGPAERMLVPNFIRAHYDELNQCYVTLLEIGGSHAHRLKPLIDHLGLLTLIITDLDTLDGTGGTSTQPAKGANQKTNNATLKTWVPGIEDVDALMDADAADKTLRADGDPLFAVRVAYQTPLAVTPPGAVEPEIAYPYTFEDALAFENLAYFSALDGAGLVRKFREAITTGGGVTAIGERMYQALRNGKKAEFALDILDVEKFDDIAVPSYIAEGLEWLLKQLKKKQVEILVQEEQTEQSEHGEQAET

SEQ ID NO: 65029 - protein, 637 aa, Burkholderia thailandensis H0587
MSAADDQFDAAADETILGCLNLEKPRSFFLYAGAGSGKTRSLVEAIRRVCHEQGRRLWLTGQKIGVITYTNAACDEIKQRLEFDPRVEVSTIHAFAWSLIAGHDGDIRQWLATRLLQDVAELEQAQAKGRPGSKAATDRARSIESKLRRHAGLDAIARFVYSPTGDNRTRDSLSHSEVISMTADFLAVKPGLRRLLVTRFPILLIDESQDTNRRLMDVLLDVELAYRDAFCLGLFGDTMQRIYADGKDRLAEAIPERWARPRKRMNHRCPTRVIELINRIRHDEDREEQVPRSDASSGVVRLFVVSQGTADKTAAEAAIAARMAEITGDRNWAQGSEAIKTLALEHLMAARRFGFEAFFEPLYSVERIRTSFLQGAGAGIGLFTREILPLVTALRASDHFAAAAIVRRTSPLLERKALEEAGDKQADILSKANVACNGLLALVSADEKPSARAVLAYIAKTRLFAIPDVLVPFATADEVAIAGNAGGEADNETSREEDLDLAGELGSWREALEAPFDQIEKYDRYVRGVSQFDTHQGVKGLEFPRVMVIVSDEEARGFMFAYDKLFGAKGKSKADLENEATGKETAIDRTRRLFYVTCSRAEESLAVVYYAADPASSRDAMIRQGWFKSDEIELFGQ

SEQ ID NO: 65030 - protein, 784 aa, Burkholderia thailandensis 2002721723; identical to SEQ ID NO: 62512

SEQ ID NO: 65031 - protein, 639 aa, Burkholderia thailandensis 2002721723; identical to SEQ ID NO: 62513

SEQ ID NO: 65032 - protein, 778 aa, Pseudomonas aeruginosa SG17M; identical to SEQ ID NO: 64580

SEQ ID NO: 65033 - protein, 625 aa, Pseudomonas aeruginosa SG17M; identical to SEQ ID NO: 64581

SEQ ID NO: 65034 - protein, 766 aa, Halomonas sp. BC04
MPEAAPAVPVSGDIQLRFLELCQFRRLEKVQLDVDKKTTILVGANNSGKTSILAALRHFLADGSSFGAFDISLSQWPKLRALGKIWEALTEDPSTIAGTEDQWNEQLQTILTAMPTLDLWFDAEAGMYHYVAPFLSKLSWQGGAVGIRLRLEPAASIEELKQLAWMYHTARLPVKDMGADSLAWPMDLLDFWLREPSKLGQVRVYKLDADNNPVTGFATYTTQILSEDACPIERKQLLKLLRVDFVAAQRGLGSEEADSRSASGPHRVGMFSNQLLKFARQHLNVASTGHGHRADLIKAVAEAQKELDKKIHEAIADSVEEVKELGYPGLHDPQEIRFRTRIQTADLLDHGTAVQYSMQKESLEELLPEYSIGLGYQNLQSLSYQLVSFKAARLKPEKGSPAPVHLVMIEEPEAHLHVQVQRIFPDKAHKLISPTEQNASALKSQLLISTHSSHLAHAENFDRIRYVRRIAKSAEKPMPTTEVVNLGQVFGDDKKTRQFAERYFRVQHTDLLFANAAIFVEGVAERMLVPLFIERDFKTLNSRYVSFLDIGGSHAHRLKPLVEKLRIPTVIITDIDPSEEREGKPKKNGDPTKKLVAVANTGQIGLYCGNPTLRGWHPKLNQLDDFKNPTDAQLVWNETADCLVRFAWQLPVSEAGGSWPSTFEDSLVLTNMPWFKGLMDEKVDENGLEIEAPTGALGSVAKRTAEDGSFPELLCALHTLMHGSFNKGDFAASIFEMISSDEPVVCPKYIADALAWLQAQLEPGQE

SEQ ID NO: 65035 - protein, 653 aa, Halomonas sp. BC04
MSAVPTFANNDRDAGVVEEICGYLTEEPPRSYFLFAGAGSGKTRTLVEVLRRMTGVVEHEKGERLARSLRMYGRSIRVVTYTKNAVAVINGRLGDNDLVEVSTIHAFCWELISGFNEDIRTALIAIKETQLEKETAEARAKPRGITAAKQRDLNELKEVIEAFRGTDVFIYHPDRETYGPGALAHKHVLDATAWLLRNRSTLRTILKDRHPIVLIDESQDTMKGMLDALMGLAEPRRSGLTLGLLGDHRQRIYTDGHSDLPSLVPPSWATPELQMNHRSQCRIVTLINRIWEAEIEGRTQPGNGVEQHSRTEKAGGAVRIYVGDTKLSSEDKVICERWCADQMREASGAAAWSQGEYQMLALEHKLVATRGSFLDAFGAMVLLDPNAAAPSGSGENKGPAAVQVLFNELAQLEACVSPDGTVDEFKTTEIFRRYGRLDDMPEDTAARISRTDEMLQAIEVFAAACADPISTVGEVLEPVLSAKLFEVDPRLSAAYADTSLPPPAPGRGEEESKQDRMRRGWCALFASPWIQLQKYRTYLAGNSVLATHQVVKGSEFLHVMVVMDDKLAGGNQISYDKIFGGVQLSKTDRENVEKGKETTIDRTLRLLYVTCSRAQESLTLVLWSSDPTEALVRIKNSGWFVDGEFEAIPEIAN

SEQ ID NO: 65036 - protein, 530 aa, Bifidobacterium breve 2L; identical to SEQ ID NO: 63238

SEQ ID NO: 65037 - protein, 368 aa, Bifidobacterium breve 2L
MLRNFIEIIFFAALVDEFQDLTHQQLRLVQALCKDRVTFAGDLAQGIYSFAGGDARFVFHEITKNTEKQVKLLKSFRSSPAILDAVNSLSPRTGSEHLSAAFPEHWGNGGLSSYASFNREDAEAEWVVRMCQLILERCPEHRIGIISRTAFRAESVKSTLKSHNISYADWGNGLFRPETAKILRNICDELSVESCKEPEELMSFIKKRYTAFHGNLSEEHEDACGWLFDRLAQSDASSIAEVKRCINAKKGNKTIATRKGIHCLTGHAGKGQQFDWVFIVGLEEGTIPFYKAKSEEAIDEEARVLSVMISRARIGYVATSSSTNPRFWYSRNASSFLRYLQHAPNFLFGKDQIELWCAEADWTALSQM

SEQ ID NO: 65038 - protein, 530 aa, Bifidobacterium breve 12L; identical to SEQ ID NO: 63238

SEQ ID NO: 65039 - protein, 567 aa, Bifidobacterium breve 12L; identical to SEQ ID NO: 63239

SEQ ID NO: 65040 - protein, 729 aa, Staphylococcus aureus M1319; identical to SEQ ID NO: 62500

SEQ ID NO: 65041 - protein, 597 aa, Staphylococcus aureus M1319; identical to SEQ ID NO: 62501

SEQ ID NO: 65042 - protein, 729 aa, Staphylococcus aureus M1304; identical to SEQ ID NO: 62500

SEQ ID NO: 65043 - protein, 597 aa, Staphylococcus aureus M1304; identical to SEQ ID NO: 62501

SEQ ID NO: 65044 - protein, 729 aa, Staphylococcus aureus M1297; identical to SEQ ID NO: 62500

SEQ ID NO: 65045 - protein, 597 aa, Staphylococcus aureus M1297; identical to SEQ ID NO: 62501

SEQ ID NO: 65046 - protein, 729 aa, Staphylococcus aureus M1270; identical to SEQ ID NO: 62500

SEQ ID NO: 65047 - protein, 597 aa, Staphylococcus aureus M1270; identical to SEQ ID NO: 62501

SEQ ID NO: 65048 - protein, 729 aa, Staphylococcus aureus M1263; identical to SEQ ID NO: 62500

SEQ ID NO: 65049 - protein, 597 aa, Staphylococcus aureus M1263; identical to SEQ ID NO: 62501

SEQ ID NO: 65050 - protein, 729 aa, Staphylococcus aureus M1262; identical to SEQ ID NO: 62500

SEQ ID NO: 65051 - protein, 597 aa, Staphylococcus aureus M1262; identical to SEQ ID NO: 62501

SEQ ID NO: 65052 - protein, 729 aa, Staphylococcus aureus M1153; identical to SEQ ID NO: 62500

SEQ ID NO: 65053 - protein, 597 aa, Staphylococcus aureus M1153; identical to SEQ ID NO: 62501

SEQ ID NO: 65054 - protein, 729 aa, Staphylococcus aureus M1132; identical to SEQ ID NO: 62500

SEQ ID NO: 65055 - protein, 597 aa, Staphylococcus aureus M1132; identical to SEQ ID NO: 62501

SEQ ID NO: 65056 - protein, 729 aa, Staphylococcus aureus M1124; identical to SEQ ID NO: 62500

SEQ ID NO: 65057 - protein, 597 aa, Staphylococcus aureus M1124; identical to SEQ ID NO: 62501

SEQ ID NO: 65058 - protein, 709 aa, Granulibacter bethesdensis CGDNIH2
MRRNHRESQRSGKDRKGRLMRIKGVEIENFRLLRDVAVGLEERTTLIVGRNNSGKTSIAELFRRLLGEKAPSFRMEDFSLGCHECFWTAFEAFRTEASEPDVVALLPSIKVTIDITYDVNAPDLGPLSDCIVDLDPNCSDTRLILTYGPRPAAPTTLFADLTVGEDVAVNRATLFRALGSRISGAYTASLEAVDPNDATNRKALEPKTLTALVRGGFINAQRGLDDDTHRERDVLGKVVEVLFQSALTDPVDPAKRTTAEQLKAAVEQIQGDLHAGFNAKLTSLLPTFDLFGYPGLSDPGLVTETSFDVDKLLNDHTKVRYVGVNGMTLPETYNGLGVRNLVYMLLQLLRFFREYQAEPTAAGVHLIFIEEPEAHLHPQMQEVFIRQLDQITSAFVAQLNENKPWPVQFVVTTHSPHMANEARFEAMRYFLSIPDGEGMRRSVVKDLRRGMGGAPEPDREFLHQYLTLTRCDLFFADKAVLIEGTAERILLPAMIRKTDSAAAGQPKLGSQYLSVMEVGGAYAHRFFDLLSFLELRTLIITDIDAVKPNDGGKRVAVPVAEGLFTSNGCLKAAFGNDVSPQTLLGKTAAEKITGIRRIAFQIPEAPGGPCGRSFEDSFILANPARFPLDDDDKALAAYELASDQKKSAFALGHAIEHTDWNVPKYIAEGLRWLAEGNPAPAEPNPPIAVEIVAGAAGVAVNVTGVSADG

SEQ ID NO: 65059 - protein, 588 aa, Granulibacter bethesdensis CGDNIH2; identical to SEQ ID NO: 62537

SEQ ID NO: 65060 - protein, 697 aa, Hydrogenophaga sp. T4
MTTPAAPTAAPATTASGSITLRYVELCKFRRLGKVQLDLDQQTTILVGANNSGKTSILTALRHFLSESSAFGAFDISLSEWPALRALGLKWEALAEDPATEAPKPGDDWEDQLATLLSAMPTLDLWFDAEAGMFHYVQPFLSKLVWKGGAVGVRLRLEPASDVSSLKELAWAYNAARQPVKGMSSDSLAWPIDLLDFWLREPRKLGQVRPYSLDAANNPIQGIKTYQTQILAADAQPADRKHLGKLIRVDFVAAQRGLGSEEADSKSTSSSHPVGLFSNQLLKFARQHLNVAVTGQGQRADLIQAVADAQKDLDQKIHDALAPSVAEVKLLGYPGLHDPQEIRFRTRIHTADLLDHSTAVQYSTKGGAGEDMLPEFSIGLGYQNLQSLSYQLVSFKTARMNPDKGSPTPVHLVMIEEPEAHLHVQVQRIFPDKAHKLISPTDKDGSALKSQLLISTHSSHLAHAEDFDRLRYVRRILASPALPTPSTEVVDLGEVFGSDDDTRQFAERYFRVQHTDLLFANAALFVEGVAERMLVPLFMELKYEKLNNRYVSFLDIGGSHAHRLRPLVEKLRIPTVVITDIDPTEKKAGPKGNMRWMATANTGQAGLRCGNATLREWHPKLQNVDDFKTPTPAQLIWTGPGLQGTVRMAAAGCRGGRPMADDLRGLAGPDQHRLVQGSEQARRRSGGCQSQRPTEGR

SEQ ID NO: 65061 - protein, 466 aa, Hydrogenophaga sp. T4
MSGGTTPEGNDRDAGVIEEICSYLTEHPPRSFFLFAGAGSGKTRTLVEVLRRLTGVVSHESGGKLAHRLRLYGRSIRVVTYTKNAVAVISGRLGINDLVAVSTIHSFCWELIGGFDDDIREALIVGKKAQLEEKRAEATKKVKGISKTDLRNFAEIEEEIEALKAVQTFVYHPDKDTYGEGAMQHGQVLDATAWLLLNRPTLRTILQDRHPIILIDESQDTMKSVLDALMKLADPRGSGLTLGLLGDHRQRIYMDGHSDLPGLVPPGWAKPELKMNHRSQQRVVQLINKIWAAQLAGRTQPASGVEQHHRTEKTGGTVRLFIGNTSLSTPEKRQKEAWVASQMQQAAKSDAWVTPGGFQSLALEHKLVAARGDFLNVYTAMTLIDPNAAAPSGRGENTGPSAARLVLHDLAQLAASVAADGSVNDFAATEVLRRAGCLSSCRPTPISGLHGPKKCMMPSWRLVRHA

SEQ ID NO: 65062 - protein, 613 aa, Hydrogenophaga sp. T4
MHLAKLIIKNFRKLSHAELSFQPGLNVLVGGNNVGKTAVVDALRALLAGHDEPYPRLSEDDVHRPTGGTSSGDIVFEYVFSGLSLDDEADFLASLVPSAAGGLEARITIRYSDPDNAGRLRAKRWCGEHEDVGLTADMMEYLRGVYLPPLRDASQGLKPGRTSQLARLLTLFADPTGVDDINFSLQKLDSELKKQLPILHTHEAISTRHQSMLGPQLAQLLEVGLSASDFKNLKSRLGLLVDGFEIEQNGLGFNNLIFMAVVLSELAKNAQSCYRALIVEEPEAHLHPQLQAVLLQYLESVKAVEGEKPVQLFVTSHSSNFASIANLDSLVCLVDTGTTVETLFPRNISFKKGKREKLERYLDVTRAELFFARRVIFVEGAAELMLVSVLARRIDFDLRLHGVSLISVEGLNFDSFLPLFGDEALKIPVAVLTDADPVAPKQTASVVASAGSPDPETAATAGAEQPDEEDDEDEDAEPVYPAPGDAIIVSPNTAKMKSCEDTYVRVFHGLKTFEYDLALEPANRDAMLAALRELHPRIAKSLKLKVDAATGDAAKARALFSGMFERTKNNVQKGSFAQSLAQVISDPKVPFTVPGYIHRAIEHACQVAGTTKP

SEQ ID NO: 65063 - protein, 480 aa, Hydrogenophaga sp. T4
MGASQAAYLVTGGEAFLAAFTFTGASFPLPITDLHLSFDAGNESFFYMQRDTRQPVNTFMARGLVARLGRTGAYTHELGRYWAYRALKERPELLSVIARRYPHILIDEAQDIGSVHQALLELLIGAGCCVTLIGDPNQGIYDFAGADGKFLSEYHHRPGVMRYSLKRNFRSVPNIVTLANTLCGRNDFAERTVPTHLHGAFFTGYKREEHAQLLTAFRSALTVAGANVKMSVVLCRGRTLAEQIRGEGTSFGQGTVKLFAAAAVLRDRKNDFQAAFRNVAIAVVGLLESATPGLVSQITQPARYPDARMLRRVVWAFTRNAADGLPSSSLNAEMQWHPVLVDRVKKLLARLQAEFGLTPKDNIGNKLAKKGLQNLPLVGAIDLADDADTALRVDTVHQAKGESLDAVLYVALKDHAEEMLSGVSTEVGRIGYVASTRARDLLWIAVPNTALKQLRPLLQAKGFQEVGISAPRSAPAGGAA

SEQ ID NO: 65064 - protein, 688 aa, Sphingomonas sp. BHC-A; identical to SEQ ID NO: 63456

SEQ ID NO: 65065 - protein, 590 aa, Sphingomonas sp. BHC-A; identical to SEQ ID NO: 63569

SEQ ID NO: 65066 - protein, 729 aa, Staphylococcus aureus H41336; identical to SEQ ID NO: 62500

SEQ ID NO: 65067 - protein, 597 aa, Staphylococcus aureus H41336; identical to SEQ ID NO: 62501

SEQ ID NO: 65068 - protein, 638 aa, Acinetobacter baumannii 1440422
MYIKNLSIEGYRCFSDCFEINFRKGLNVIVGENGAGKTTIINSFRQLFIDTESGSYNVSSDDFNKPFKEKSIVVDSFKIKVEFDNLEGPEPIAFLQWSDAKNNVILNLEVLNKELRGRFKKSFWGGNSKSSQFDIELFDKIHCIYLPPLRDAESKLVNGRQSRLSKLLKFIEANQLKICKRDEKKHPLEEKFKEFNQSLIDEKDSSIKKANELIAEHLLKAVGQNFSQSTHIQFVENEFSKIVENLRLIFFPKITTAEADQFRDLCQNSLGYNNLLYIASILAELTLTKGESLYRLLLIEEPEAHLHPQLQVRLLDHLEAVANDHNVQVIVTTHSTVLASSVKLDKIIHLTKNEKPQATALAECGLAPNNLDFLNRWLDITKSNLLFASGVILVEGIAEQMLIPELAKIVLKDKEINNIEDYGVSVINLNGIYFNHFMRLYCNIKGVSDVQEDQEGLNIPIRCAGITDLDPEQHYYKEEIVKEEKKQVKYNHKPPSEKNEIVGKNHALKLVKSINSSEHARLFVAGYKTLEYDLAMEECNAKVMAQILFDLWPSKTGEVKKGLQKIVNDDYLKITPEQKADHAIEILKRVDDDNIGKGYFAQVLADKISSGIVKLKVPQYIEDAILWACSLENSSVEE

SEQ ID NO: 65069 - protein, 587 aa, Acinetobacter baumannii 1440422; identical to SEQ ID NO: 64057

SEQ ID NO: 65070 - protein, 591 aa, Acinetobacter baumannii 1475718
MGILLDRVRICGFRGIANIEITLPKVTVLLGQNNAGKTSLIKAIELALGDYARYLSDEDFYINQNDTPQEEIKVDIRFVPFENDENTPEFSEIWQQKFGDQIQSSVDGQQFVAIRTIAKSDRVKGGYLVERYHLEVWPDQNNWQNSPINNNNKLNKKLDCVPFISIDAQRDIHNELKEKSSFVGRVLSSVEYNAADVASLEQMVADVNNAAIEKSDPLKKLKEHLDNLNHSFSGTGQTELTPFPKKIRDLSKRFSMHYGNSAQNSFSMEYHGMGTRSWASMLAVKAFTQLLVTKYQEEAEPLFPILAAEEPEAHLHPNAQRTLFEQLKSNNTQIIISTHSPYLVGMTDLKNLRGLVSSAGTSNCFQLIDGLDSEDINILQREILRFRGELLFSRALILFEGVTEEQIIPAMFKAYFGESSFALGVSCISVGGKNYPPFIKMALSFGIPILVISDNDGNTHTELMLQNHKIQSTTSLTLSPDNYHLAFLSSGNDMEAEIVLQSQLRDEVIEALVRTETRGSDNSQYIAAKKKEISALNDVVLIEMMRSSKASYAGFLAQVIENNPNNKTKENLIPQTIRDAFEQLNTWGNIC

SEQ ID NO: 65071 - protein, 633 aa, Acinetobacter baumannii 1475718
MKLSANQLAIVKMSTNIPIQVLASAGAGKTRVLTERIKHILTSTNKEGVIALTFTNKAAEEMANRLSQQIDIQERVWVTTIHSVAQRILEKYGHTIGLPTDLHVYERDQDKMEIFMQSLREDGIDIDQYLNVIDSRELKNREKQLQKYLDIFAQIKRELLTEFDIFEKYPNKNVWKIYQDYQDSMIRSGGIDYDDILVYSHRILITHDWIAKIYRAKYKHICVDEAQDLNKIQYEFIKAFCGDTLKSVFMVGDPNQMIYGFNGSSNRYLCEEFVRDFLPNKYDLKENYRSTREVIKVVNKLKSDSQVVSEYALEGQVHFNEYEDEIDEAKGIVAQIQNLLQMRVHDEIEGEITLEKMVVIARNRFVFHSLESGLKDNNIVYSLKKGERLLEPSTKFAKTLDFSIRIKLNPKDWVNGKKLCQLLQLDEPVNWNNDLLLDLAKKMNISSDSNHQLLSELLIAVYNLEINNPKIPKLTKDFRDKFTILREDKLNILDAEYEDIKRSLEELDEFDHTWTRFKRKGIGDSLTAFRNALVLGQLSESNSEKGLTLSTVHTMKGLEKDIVFLMGMCEGVFPDYRALSQKELEEERNSAFVAITRAKRWLYVSYPKQRRMPWGDIKNQRKSRFMIEMETDK

SEQ ID NO: 65072 - protein, 119 aa, Acinetobacter baumannii 1295259
MGDKRWKAFEKMINAHGIFMSNIDLECDLVSVASEEIKKALGKKNNNSAVDFLKKSKALNMQILMAKLEKKGFEKIYESDFGKPIRYLINLLLKQSDTDTESPVLINTNSETAKEVVLL

SEQ ID NO: 65073 - protein, 539 aa, Acinetobacter baumannii 1295259
MKLTNDQIKAIQDIENNSVIMACPGSGKTTVLINKMSLCCEKLKRHNGIIGLSFTRKSSEELRRKFQKKTISSNLNYLGTIDGFLINEIIRPFLPKLWGNENDDIEIVSILSEEESIPFVQEFANREIYLKDIENYNAFKGLFLSGKIWQRTVTPLALFVLKNSSVCRRYISSRYKYLFVDEYQDTSSGQHLVFLEILKLGLKFTAVGDIDQSIYRWRDAIPENLTSLVNEHDFKEYAIDQNHRCDPSIDLYARAFLKGIDLEEIDKKNIFGLHINNSGKHRYAKLDDFIQKIKDENNFNFSDFVILAANNATVQHYALNTRHSYRIYEDDPLDSMNHYIAQLCSDLILYKFCKNYSSYSIYENYKSRFINIKLNDFKVEVKKIRTENDTDEICEIIKGLINKTNYKGDCENFILATKNIFNDEFLLKKYKPHNKNELQIMSIHKSKGLEFKVVIHLGLEQWVLPRKTKKQGQWTFSDLEGDKNLHYVAITRAENLCYLVDMPIRVKSENNVFKEMNANKSEFLCIERLNKHIVDLGVM

SEQ ID NO: 65074 - protein, 641 aa, Acinetobacter baumannii 1461963; identical to SEQ ID NO: 63760

SEQ ID NO: 65075 - protein, 552 aa, Acinetobacter baumannii 1461963; identical to SEQ ID NO: 63761

SEQ ID NO: 65076 - protein, 638 aa, Acinetobacter baumannii 625974; identical to SEQ ID NO: 65068

SEQ ID NO: 65077 - protein, 587 aa, Acinetobacter baumannii 625974; identical to SEQ ID NO: 64057

SEQ ID NO: 65078 - protein, 710 aa, Yersinia similis
MYISKLSLLNYRNFANTKLLFNKGTNTIIGENGAGKTNLFRAIRLLLDDNMIRSAYRLDKTDFHRGLGQWQGHWIIISLEFEEISADEAVQALFLHGTGLAENVGKATYNLIFRPKKEIRLRLSQLDEGDHAGLDAILGLVTIDDYETIFTGRSEADFNDETFYRQVVGDFTNVRFNKETEFRCIGAKIPSVLSVSKEISFTFVQALRDVVAEFHNNRTNPLLTLLKSKSGDIDPVLFTAITDKVKELNDSIEALPDVQNVRTDISSTIKDAAGEAYSPSSLSIKSDLPEEADELFQSLKLFVGESGEDHEGPIQDLSLGGANLIFLTLKLLEFKYRKARQSIANFLLIEEPEAHIHTHIQKTLFDRLNYDDTQIIFSTHSTHISEISNVQNVNILGRDGGRCEAYQPASGLQPEEIGNIQRYLDAVRSNLLFAKSVILVEGDAEEILIPILVKKVLGISLDELGISLINIRSTGFQNVAVLFHDDRIRKRCSIVTDLDKSIIDTEAVEGESEARAKRKAKYQASEKKGLARKVQLEAFCNDNDWIAPFFAPHTFEVDFVTAGNSRNVIAVLPDVYTDVPTTVRAKASLKSGDITRYGQRVLTMAENQGKGWFAILLGKKIDPQTAIPRYILDAIAFAHPVVKKEVWFNVLSYRLSFIEKNDFFVEAEAVDNFKAMLQLFKNGYIDFAGIKNEMFAYFPDDRINDVLEVF

SEQ ID NO: 65079 - protein, 598 aa, Yersinia similis
MFTWDDGDLNPEQEAAIREPGSVFLIACPGSGKTRTLTYKIAHELSQLESKKQFIVAITYTHRAADEIHERIENLGVDTSRLWIGTIHSFCLEWILKPYGIYHEALDRGFRVIDLHEREKVLENLCQPYQKPKITFWDCEYYFTDEGYVISCPHDWKHAGLAEILEQYFDYLRETRQIDFELILYYAYQLIAAQPQISAILGQLFSFILVDEYQDTKRIQYSIIASILKAGQGTKAFIVGDPNQAIYESLGGYPIAFEEFQSMAGIKLEELELSQNYRSSERIIDYFANYNVYDTRIEAASNDKAYSSLISFNDSVTKDGLEDELIRLIRFNIETIGIPPHEVCILAPQWMHLASMTRRLVASMPEYAFDGPGMVPFARDLDNFWYKLSRIALTQASPSMYVRRLRWAGEVLSDLEGVGANVSMLTRQSLLRECNAITIDAMDGLVYLRFFFDKLFSNLAFDIQAFTQLHEHYEAFFESSQARIDRLKKEGTEMIGDIATFRKVFQSRIGITISTIHGIKGAEFDAVIAYALLENMLPNRNDQNGQDSAMKLLYVIGSRARKNLHLISERGRIDKFTRAEYQATKKLNACRFEYDQIP

SEQ ID NO: 65080 - protein, 566 aa, Thalassolituus oleivorans R6-15
MIIEKVSLEGYRNFREATIRFTDKTLMIGSNDVGKTNLLYGIRLLLDKSLSDRDIEPEATDFFIDSNGNQAESFSIKIYFSNINEDAVLSALKGSVSDESKTVIAITADRNTLDYEISIGCSDDELELIPSRFYLKQLNLRYVKSRRDLQKFIQIEKRKLLKQSKDSLEDEELEHDQVEMVAISAKLNEINEKIAELNYVKDATSVVNEELKKLSYTNENYSVHLDTGAIKVNQFIENLELGASTSGSKLMLGGDGRNNQILLALWKAKSQREFDPDHEVTFYCVEEPEAHLHPHQQRKLADYLIYDLPGQTIITSHSPQITERYKPNSIVRILLTENGSVAANGGCSACISDAWDELGYRMSILPAEAFFSSCVFLVEGPSEKLFYEELAIQLGIDLDFHNISILSVDGIQFKVYSKILDAMEIPWVLRTDNDVSGIKNSVNKRAVGINRCLSLAGLANGPDYTSTTTSKDLVDSGFWKTTSDQINPHGIFLSKIDLEADLALELPNELLTYSGKTDINDAVKYLQSKKAIRMRDFLSQNKNALAGVSGGELAKPLHHAVKLVGQ

SEQ ID NO: 65081 - protein, 543 aa, Thalassolituus oleivorans R6-15
MSDFSFTPDQKAAICSNSNMVITACPGSGKTTVVAEKIRNEVKDLPSYRGVIGITFTVKASKELRSRCKRNACDTKMSFFGTIDHFCLSEIIHPFLARVLERKKHQLECIKLDEISKCVMDKLSVIPHYSEEVTSTSFKCLEDDIGTLFDHGFVLLELLGVIANHVITESHACQRYIAAKYNSVYIDEYQDSSEPQHVLFLKLLELGLVGVAVGDVQQSIYAWRGSDPVFIKELTNKPDVFEHHIVNINHRCHPSITNYSNRLYDAECDLLPTSDIRVYRRCYTGTQVDVTEKINESIEVALKNNLVESYSQIGILVRNNISLEFLSNGLNVPFRIFDEDPLAVRNTKVCNLFSQLLRFRFDEHHRLNDVVEYIQSFTSVSKNSLSVLRKTISTIGDKVQDELSHTIVDITGQVLNVGISASDKELINTICLESRLLQHYKPINENEVQVMTLHKSKGLEFELVYHLDLYDWIHPKRKFVRGCFDVIYDNWEQELNLHFVGITRAKNYCVLVTSNSRLNRDYETKTGNPSQFFSLPGLDGLYR

SEQ ID NO: 65082 - protein, 266 aa, Saccharicrinis fermentans DSM 9555 = JCM 21142
MKEAIRNYPEIYFAKLAVIGEGDSEEVLFNRLMETNKVDFDDNIITFVPLGHRFVNHIWKLLDVLNIPYVTLLDLDIERNGGGWGRIKYILQQLIDAGYDRDELLELEGGEIMTDERFSKMHTWTYKDNKLKSVLSWVKFLESYNVYYSNPLDLDFLMLEYYSEKYKSAIPKGGGPQIPDKVKEDAKFKSKLKGAIQATLKSEEAQALTYSDKQKELMIWYNYHFLGRGKPTTHITALSSMTDKELSENMPPVFEKMFKKIKELLS

SEQ ID NO: 65083 - protein, 610 aa, Saccharicrinis fermentans DSM 9555 = JCM 21142
MRYRKIEEWIPSDNLQLEDNALNTVKSDYNTLVIAGPGAGKTELLAQRASFLLETNSCIYPRKILAISFKRDAAYNLKNRVDKRCGEKLSKRFDSLTFDAFSKVILDQFYRGLPKGYKINYPYDVILDEKEILEIYKAIDIQFHNTHDRNKILEFHNSALLVNNDGKQKKMRVQVWQKLLESKSSKLSFKMIMRLSQLIIVSNPKIMDFLQETYSHIFLDEFQDTTFLQFEFLNSCFGNSNAIFTAVGDDKQRIMLWAGAKPDIFDTYIKNYKAKDLILEMNFRSAPRLVELQNHLISKLLNKSDLVKSSDKWNKEEGEAFVWVYDNQQKETEHLFKEVKRWIENEDITPRDICILVKQQLGVYAGEIIDFFNQNGIKARDENQLQDLLSDDLIVFVLNTITLLSDTKSLDEKTQAINFLINTSSVYEDDEIMKLENKFNKFIRQLINKDLDPKELVNEIIKFVSIDRIKANFPNYRNPKFLKDMLNKLSESLGKYKEESENVYEAVQKLLGKDSVPIMTIHKSKGLEYNSIIFVGLEDGAFWSFEKQPDEDKCAFFVALSRAKERVAFTYSKTRKDKWDNLRNQDFKKIRVIFDELQNSGLVEFKHIVD

SEQ ID NO: 65084 - protein, 697 aa, Saccharicrinis fermentans DSM 9555 = JCM 21142
MYISGIKINNYRNFKNLNIEFNHGLNVIIGHNNAGKTNLIKALQLVLDRDLKEKPSIDDFCKTNLDYAKPPSIEISIFIKEHNDKADDKNVVYDWLINESPEYTAQLTYIFELPTKNHEEYKKQIEECKNGNGFDQEKCLKLISKKFLQKYVPRIYGGNPSKQEKADSENLERFDFQFLDAIRDAERQMFFGNNTLLRDVLNYFLDYDLTNGQGFENLSAENIELLKQREQEFNTKSKELLKILIGRIDRDKILQYSNETGADKGGKPNFDAEITEQELLFALRLIVEKSGFKIPIKNNGLGYNNLLFIALILAKMQMESSSYMGDNAKVFPVLAIEEPEAHLHPSMQSKFLKFLNTNNQARQIFITSHSTHITSAINLESIICLYDDIIGNSAVGYPGKVFSESKEDKDSKIYVQRFLDATKSNMLFAERLVFIEGLAEQLLIPSFAQYLEIEDSLVDKHVGIISVDSRTFKHFLKLYAYDETDSPYAINKKVVCITDADPTIKKSNKWVSAFPFELDDSENSKSLSTHVTELKEKFEDKYANIFVFHPPEGTGKTLEYELCKENPKSPQLITDAFPSQNSAHTPDNYTAIISRYEDDLNAIIEEYKTKLKIDNLDENRILKSISECTWGDETEKKKALIAAIYYKVVSNAKGQHAFYLEQKLRDNYKIKEDDKRLDFKVPSYIENALTEIIKKDA

SEQ ID NO: 65085 - protein, 590 aa, Saccharicrinis fermentans DSM 9555 = JCM 21142
MPDINSLPHISTLSDIETHFKVFAGPGAGKTRWLISHLERVLCESDRLNRTGKIACITYTNVAAEEILNRLKCDKSRFDISTIHSFLYRNIVKPFSYLIEKKDDGEILFDSASLDGHDEHIPRRDIIDSWVKKISEGRTKYWYLTSKENYPELAKCLSDADWFFNDTGIPQLKFRNQWTISTASKIRMPSTKLLEYKRVCWKKGILYHEDVLYFSYLILTRSPRVAEFVRAKFPYIFIDEFQDTTEIQTWLIDKITEQNTIVGVVGDIAQSIYKFTGAKRADFIDFKRDKISEYKLNHNHRSTKRIIDFLNQLRSDINQEYGQGQPDGVSINVLVGTIQNAKVWYERNFPDSPLYILTRKNTTVSEINNQIGTANTNLLKDLYSNDTNPQRVRFVHSLLMSFKFHKKGDLKNALNEIYKSLRRVSGTSVLKLSLKRLAIRIIDSLQIDANRNKTIAEFYLELRTYVLDEYGFKIGSNLNRGNAKTFYENHNLNEILPYVKVDTKSDDKVRTIHSAKGTEFKNTLVHFETTNEFRNYILNGLNHIDDAEDDCRIYYVGCSRAKDRLFISIPDFNQDDIKKLEEINVKYETV

SEQ ID NO: 65086 - protein, 651 aa, Gluconobacter oxydans DSM 3504
MEGVRLLQREGQISLQIKRVTIANFRSIKRAEIELGATTVLIGPNNAGKTAILEAIRIALTRRWGQRGTGFTEYDVHLCAARTDPKVGDPVVIEIEIQESVVAEWPEELHETLADIIQLNPMSGQASIIMRVSCAWDDGEQSYIPKWEFLNTDRNPLAGKGARATNFQEFFSFLPVFYLDALRDAGDEFAPRSQFWGRLLRTVQIPELLEQKSVRIFNLLNAKLLAADPLLGDLATSLSDISRVATTGTPGQANLRVLPLNTWDLLSKAEVIYQNDGTKPWLPLMRHGQGVQSLSVMFLFRSFVELLLGELYRAESTPVLALEEPETHLHPQAARTLFGHVAQLQGQKIISTHSPYFLQHVPFRDLRVVRAGPDGTIIKSLPREFRCRVPNLPTFAPVIAASGGLLEYDGGLSELVIKGSLAMPTYKKLLGACQGQAEMAAIHARLKAARDASLEFIPDEDLQKLETFARRIRGEIFFANKWLLVEGQSEYHLVHGMAKAMNFDLDEHGVAVIDFANNGNCGMFTALARALGFPWTMIVDGDLAGNQYIGSVQARNFTPAEVAQLTHQIAGQTLEHQLVADGLQPELKAILINQGMPGVAAMDDAALIATLSSDKCGYAAELAAQCATSLPLTQRMPLAIREAIETLRGLP

SEQ ID NO: 65087 - protein, 635 aa, Gluconobacter oxydans DSM 3504
MTELEKALSELTPAQAAATNWVDGPLFVLAGPGSGKTRVLTTRVAKLLAETPDKSFRVMALTFTNKAADEMASRIEAVVPDQQQRATIGTFHSFCMQMLQQHGSHIGINPNFAIYSLESDRADLLKEAIRANGLDSDDDRFLGMIDKLKARLIQPDGCAKLFKDSGVGQRVELVYSAYEAALRSANALDFGSLIAQSYRLISTYPGVALHYRRAYAYWMFDEFQDTTDGQYKLIKALAGDGFRNVFAVADDDQIIYQWNGASYKQIQRFRADFNPTEIQLPTNYRCPPSIVAAANRLVVHNTQRTAAKQPLEAGKTTLRYPDGQHINLLRYSTEEAEATSIAAGIAGMPEGKRGQIAVLARTRALLERMNTALANAGVAAAIAQRRDDFRSAQFLWLAAALRLAARPADRRALDTLTGAFNRWFDLGVSSDDIAAGAEISGRSLLAEWAGAVGSREDDQANALTGMATALSAQPTTFRAFIDQVLEKLPAEGSEDATDIDEDRTAWVSLVRSIGQAIGRDAGLDQFLQELALRSKEPPVPDNAVTLMTIHSAKGKEFDHVYVIGLSEDVLPSFQSVKAGEQSAEMEEERRNCFVAITRAREWLCLSYADRYRGWSKQPSRFLLEMGLNLPQAVSA

SEQ ID NO: 65088 - protein, 618 aa, Acinetobacter baumannii 694762; identical to SEQ ID NO: 63792

SEQ ID NO: 65089 - protein, 633 aa, Acinetobacter baumannii 694762; identical to SEQ ID NO: 63793

SEQ ID NO: 65090 - protein, 641 aa, Acinetobacter baumannii 1293320; identical to SEQ ID NO: 63760

SEQ ID NO: 65091 - protein, 552 aa, Acinetobacter baumannii 1293320; identical to SEQ ID NO: 63761

SEQ ID NO: 65092 - protein, 650 aa, Acinetobacter baumannii 1062314
MHISSIKVKNFRAIKDAELKLDPNQKQDLTLIVGKNNSGKTSFIMVFDKFFKKEDNFNFHDFSTHLREKIYKIDSETIEEAIIGLFLEISYSKDDNLEYLSEFIIDLNSKNNTVKLYFECLIDEERLRNDLINIDKKYKKKFIEKNITSYLIKNLYIYEKDEDIENNKQKLIKKEVSAINSLINYQVIHAKRNLASSETKEKSSLPLSKLSTEYFNKENMFSEKDFIKINNAILEMDENLNNLYDTHFEGFFENVRDFLGSTALKVLSNLESRQIMSNSSKVVQIDSEENFLPESLNGLGNLNILYLLLQIDLKKRFFIQEDRSINLLFIEEPEAHTHPQMQYIFSKKIKKIIENIPNLQTFISTHSSHIVSQCNFEDIRYFHNHNGNVKIKNFYLELEEKYKLQTELFKFLKQYITLYSAELFFAEKVIFIEGVSEKILLPYFIKNFDEKNKGKQDYIPISSQNITYIEAGANSKAFQHLLNFFEVKSLILTDIDSVGGENRSACSVDKGIASSNATINHYLNYNENDPDWFNLLKKRGIKITDKNINLFYQTEENGYHARSFEDSFISVNYELIKKHKKDIFGLKNKYKINDNPENFYDLTDSIIKSKSEFASSLLFLALVNGDKEGDEKIEWKTPKYIYEALEWINQ

SEQ ID NO: 65093 - protein, 697 aa, Acinetobacter baumannii 1062314; identical to SEQ ID NO: 62629

SEQ ID NO: 65094 - protein, 660 aa, Candidatus Accumulibacter sp. BA-91
MLIESITLSGFRCFGPDPITVPISTGITAVVGPNAAGKTALLDALSKMFGVSRTQRTVQRSDFHLGVEDDPEDREPKDMLIDVFIGLPELADGTATPETIAPSFRHMLIEREGETPVCRLRLEARWEDDGTIEGEVSQELFWVDTLDDDPGEDACHPVSVADRGLIQLYYTPASRDAAAQVRATTGALAARLLRAIEWSSKTEKAVQDATESLATAFEGESAIAAIGEALQARWSGLHDDVVDTKPRLSLVSRRFEEVVNKIAVIFEQGPDGQERGLDALSDGQQSLLYFALAAAVFDLERAVVAGTVEGFRDDTLRIPALTLFALEEPENHLSPYFLARIIRQVRSLTDAGGAQAIITSHSPAVLSRVNPCEVRYCRCDPKTRVSSVKKVKIPAGTDEAAKFVRGAMLAYPELYFARFVLLVEGDSERIVLPPLAEALDLLIDPAFVAIVPLGGRHVQHFWRLLAHLGIPHATLLDLDLGREGGGFGRVKTAIEKLVDVNVPKEKLLKIDKGILSDADFAKMHTWEDAEDQNKLMGWVDSLKPHGVYFSAPLDLDLAMLEAFPDAYQAIIPKGGGPRMAVDKAAEVVLGTAGLGLKPYAGPFKGYPELLPGYRYHFLTNSKPATHIAALTHIKKKDLEKGMPVVLAEVLKHVAKSLRRD

SEQ ID NO: 65095 - protein, 634 aa, Candidatus Accumulibacter sp. BA-91
MAVLSRRVSPDDWKPVGVNALEANALSVVRSANNRSVIAGPGAGKTELLAQRAAYLLQTGTAPAPRRILAISFKRDAATNLAARVRQRCHRSHAERFDSMTFDAFAKGLIDRFGQALPERWRPRPNYKIMFPGDRDYREFLSRQVGAPPASIGTHADIQAISVKAFERRHLVGSPLPIDGWPLPTPAQWAANRFWQTSLHEGKKSVLSFPMIGRLTELLLRVNPMARDALRLTYSHLFMDEFQDTTQIQYDLVCIVFLHTDTVITSVGDNKQQIMRWAMAMDDPFTAFDGDFGATRTPLYNNYRSSPELVRIQHVLAQALDTRAVAPVSKTAGTIAGDSCAILDFSTPEIEAKRLAAFVATEMKTYTLGPRDFVLLVRQKANEYAAVLEPAFVTAGIPLRNEAGMVGSIMLQDLLVEDVSGLIVSLLRLAMATRAGRHWTKCQEALITLRGVAPDDEVAQARLAHELDEYVLELSASHPNPPRSKTVSRSILNDILGFIGRERMIAVHPAYGQGDWLEKVLDSATEHLLASSSGKLDWSSVLDAYEGIHAIPLMTIHKSKGLEYHSVIFVGLDDGAWWSFSNDQIEATAGFFVAFTRAKQRVVFTYCAQRGTRTKIATLYQLLTSAGVRSTKVA

SEQ ID NO: 65096 - protein, 652 aa, Pseudomonas syringae pv. syringae str. B301D-R
MHIERLGLSNFRCFGPIQTPIFLGPSLVAFVGDNGTGKTAVMQALQRLFGITSEQRRLRKQDFHIPANEMERPAARILVIEAILAFPELDDDAENPAVPAFFKNMAAEEDGNLKVRLRLHATWTDDGTLDGAIEESYYAVQTFGDFEDSDLYRLRGSDRSRVQLIYIPATRDGASQVTAFIRGRLWRAINWSEQVKDSLAGAGASVNQAFYAEAAVESISAAVTHRWQQLHSAGTHTTPSFRPVDTRWQEFIRRVEVVFLPAEDGQDRALEDLSDGQRSLFHMAMVSATLDIEARLAGNNAPPGFAAAGIALPALTIVALEEPENNLAPFYLSRIINQIEEVAAGAHAQAIVSSHSPSILARIEPSSVRHFRLNFEPRHTEVREISLPIGDEEASKFVREAVRAYPELYFARYVILGEGATEEVVLPLLAKAMGFPIDRSFVAVVPLGGRHVNHLWKLLASLEVPYATLLDLDWGRSGGGFGRIKTTCEQLLSNGVTPQQLFGSTLHVDGPAENITAISIHPAADLAFLSQWAIWLEQFQVFFSAPLDLDYTMLKAYPGAYRALEPGMRGPAQAGEPRDAVLGAEGSPAFYVAAEDQDLRWYRYLFLGRGKPTTHVRVLSQLSSEDVVAAVPEPLGRLLTLVRSTLEQVEMR

SEQ ID NO: 65097 - protein, 631 aa, Pseudomonas syringae pv. syringae str. B301D-R
MNWRPVPLEEWRPRGIPGLEPGAWTALRRMESTSVVAGPGAGKSEFLAQRAAYLLETGLCKAPQQILAISFKTDAAANLAARVRRRCPPDLAVRFNSLTFDAFTKGLVDRFQAAIPEHWRPSRPYEISFPNRRLIQDELSRIQFMARTEWKAWIAQLSVERFEAETIGGSRLEVDALEQVATAEQLVIHQWLRHQLLGANVSKLSFVTLNRLAELIIRANPKIARALRMTYPYVFVDEFQDTSFAQYDFLLSTFGQGGAVVTAVGDHKQRIMGWAGARNDAFEQFEVDFAALRVNLLFNFRSSPELVRVQHFVAQALDPQSPQIESQAQGQLDRDIVQVWRSHSTHVEGQRLAQWIVTDMATRQKRPSDYVLLVRQRPDQFEEELRPIFAASGLSIRNESKIVGRTNVQDLMVDDAAKIALAALRLASGQRNAVAWATLSTAVYAIRGIDEDDDVRRYPVDQDVQAFLKALGQDIRSRMPTADAASEFTDRIFSFLGVVSISATYPAYARNDMLEIMMEAFSLHLQQAASETETWSDCIDRFVGTHDLSMMTVHKSKGLEYDTVFFIGLDDQSWWSHVPRNPDGIATFFVALSRAKQRAIFLFCRGRGSRNRVSELYQLLTDAGVEEIEIF

SEQ ID NO: 65098 - protein, 675 aa, Bacillus thuringiensis serovar israelensis; identical to SEQ ID NO: 62958

SEQ ID NO: 65099 - protein, 653 aa, Bacillus thuringiensis serovar israelensis; identical to SEQ ID NO: 63647

SEQ ID NO: 65100 - protein, 692 aa, Pseudomonas brassicacearum
MQIERVEIQNFRLLQNVDLGLEDGTTLIVGRNNCGKTSIAEVFRRLLSDRTPSFRLEDFSLGSHEEFWTAFNAFHGGVARSDVAAMLPVVRVTLDISYDVGAPDLGPLSECIVDLDPDCSCARIVLTYGPRATGLESLFAEMNVPDAEQEDQRPSFFSLIKKRLAAAYEPRLEAIDPNDPTNRKDLDLKSLTTLIRGGFINAQRGLDDDTHRERDVLGKVVEVLFQSALTDPTDPEKRTTAEQLHGAVEKIQKELHDGFNAGLTSLLPTFELFGYPGLDDPGLTTVTTFDVERLLKDHTQVRYRGVNGLTLPESYNGLGVRNLVYILLQLLKFFREFQATPAAASVHLIFIEEPEAHLHPQMQEVFIRQLHLIKDAFEQQLNDSRPWPVQFVISTHSPHMANEARFETMRYFLSVTNENGIRQSKIKDLRQGMRGAPAPDRDFLYQYLTLTRCDLFFADKAILIEGTSERLLLPTMIAKTDAAAVGEPQLASQYLTVMEVGGAYAHRFHDLLTFLELRTLIVTDIDSVKPNADRKRKACPVAEGLYTSNACLKDWFEAEVTPAQLLAKTPAEKTRGLTRLAYQIPEGVEPGPSGRSFEDAFILANLNRFELGQGDVASLAYEHAADQKKSAFALNYAIDDTNWSVPKYIAEGLRWLAVGASVVDAQMAARAMAAVVEAAGEAVAAEGEQGDA

SEQ ID NO: 65101 - protein, 584 aa, Pseudomonas brassicacearum
MPNNHESPADRAGREALERMFACLEEGQSFRLEAGAGAGKTYSLEKALSRLIEHRGQALIRERQQVACITYTNVAKDEIISRFQAHPAIRAETVHGFCWSLLRDFQTSLREFLGAESFWRERLETVGGVGNRRIHYEMGIPRVSEDEVSIRHEDVLTLMVQALPSPKFRAVLTSRYPILFVDEYQDTDEHFVGALKSWFLDRGEGPMIGLFGDHWQKIYDDGCGLVEHEALQPIEKNANFRSASRIVDVLNQMRPGLHQEVRDPELIGEARVFHTNRWPGTRRTGIGGGHWTGDTSPEAARAYFECLKAQLNVEGWDLSPQKTKILILNHKGIAREQGYSSIPPIFGQFNDPWLKKEDPHIKYLADQLEPACVAYQQRRYGAMFGHLASDRPTIRRHSDKVAWTEAMDTLLELRLTGTIGEVIDHIIAVPQMQLPNAVLRNEQGLHAAGVEPGEDEPRRITQLRKLREVPYSELIALDQFIDGHTPFATKHGVKGAEFENVIVVLGRGWNQYNFAEMLEWFQLGPPANRREKFESNRNLFYVACSRPKVRLALLFTQLLSQAAIAQITAWFGAEHVFELPADPG

SEQ ID NO: 65102 - protein, 630 aa, Pseudomonas brassicacearum
MYLAELTIKNFRKLRDAKLKFQPGLNVLVGPNNVGKSAVVDALRTLLAGHDEPYPRLDTSDRHRPNEGEPAGDITFHFVFKGLSHEDEADFIAALKPCEDNTMEAHIHVRYTDADQTGRFKVKRWCGDHQEVALTSDMMENLRGVYLQPLRDAAQGLRPSRNSQLARLLHLLTDDDGRKTINDALKKLDDELQLNESLKSTHAAISSRHGLMMGEQLAQALAIGLTATDFQRLSARLSITAEALEIEQNGLGFNNLIFMAVVLSELAKNPDAAYRSLIVEEPEAHLHPQLQRVLLRYLASVPKSEGDKSVQLFVTSHSPNFASNSELEALVCLVENEAGVQTFFPRDITFEKGKREKLERYLDVTRAELFFARRVIFVEGAAELMLVDALAKLINLDLREYGVSLISVEGLNFDSFLPLFGEKGLRIPVSVITDADPFEEVEIQGKAQGELSDEVIEDLLAEASYQEEAGEPEDEDPAEAEVGAKKKKVKRVEVYPSLGDEVRISSNTTKMKGMEDAFVKIFHGLKTLEYDLALLEENRKAMLAALGDPHPRIAKALGKIVNAQPDNTAKAKALFCGMFERKDSSSNVQKGRYAQALAEYIAKQPGCKVPEYLEQAIRHVCKGVNKHEDV

SEQ ID NO: 65103 - protein, 573 aa, Pseudomonas brassicacearum
MRMSDEQKNVIDAELGPISVTACAGSGKTATAIRRLIAVRQKMEKSRGRVVLLSFSNVAVNTFNKGYQQLASALPDDVNRKLVEVNTLDGFFTQHVLRPHAYRSMAATKAAYLVAGSEPFLSNYLYWPGGDDRPLSVKELKVGMEDGSPFFFVDTHAGPARLVTWKALDSVTRLGSIGAYTHDLGRYWVYRTLVEQPAVLRALVARYPQILVDESQDLGTLHQAILELLIKAGATVSLIGDVNQGIYAFAGADGMFLHTYAARAGVTPYKLTRNYRSLPPIIDIANRLCGRNDKSDRDIEAGGAYFIGYKDSELPRLFDSFKARIDELEMQHDDAAIICRSADRAMVLAGKVAPPGQGTVAMFSEAALLRDQQGRYQECFKCVCRAVVGLLDDPPHGLSTELQGAPHEGWMLRLRRLLWAFIRNENDGLPSSTLIAKTDWHPWLVKNLKILLATIEKQFGLKAVGTLGNKLAKTKLLELPLAGEGADAKQGPGIRVDTVHQVKGESIGAVLYVAKKSNVQALLAGTDVEEGRIGYVAVTRARNLFWLAVPISCIKELRDELRAVGFEELPALK

SEQ ID NO: 65104 - protein, 645 aa, Ruminococcus albus SY3
MYLSKISIKNFRMFSDAVEVSFSNGLNLLVGENGSGKSSVVDAIRALLGENEFLRRGIVEEDFYSVFCESQKKTSESLLISGVFSDLTEAQKVEYLSWLDESFNAKLTFEVQRALNRRNNYKQKRWGGNSSYSFFDVEPLNDIQCVYLPALRDAERSLRTGRGSRLARFIANLSAEDLKAKRENDELMPLEQDLKDFNEKAANESEITNATELINTSIRNAAGNVYGQKTQIRFNVLSYERIIESLQLLFSDDLSSTSNVFRSLSENSLGYNNLIYIATILAEFEGLKDRYTTPRILLIEELEAHLHPQLQIKLLKYLQEQAIEFDIQVIVTTHSSLLAASVPFESIIVFNKTKKDVSITRLSECDVDSSASGFLNRWLDATKTALFFSKSNIFVEGIAEAILVPELAKVYLAEQNETGLTKVSSLEEAGISVINMNGIYFPYFMQLYNGYRVIIPKQNDGETKTRYQERVTALVHKERLNNGEFTSTKKIEARCVAITDNDPEKNVNPSKDDCIEGNNPHLYYAKQVKNMTENCRVFINRKTFEYDLALESHYNAKVMLKILMEDITSSGSIKETMEDYIVKIDAGETIDDTKMAAFILQQVDSGYMGKGHFAQLLAEKIDSSFSVPEYIKNAIAFILMIGEPT

SEQ ID NO: 65105 - protein, 644 aa, Ruminococcus albus SY3
MSVEIFREILCKKTGDTSNFLECEGKLCAKCLIDGYCNATHLSEKQHAYLDSDIHSSIYLKACPGSGKTEVLGVKCAMEIERWSIANSGIAVLTFTNSAEDEMKSRISLYSSQSIGYPHYVGTFTSWLHGYIANPFLYKIAHNGCDGKTDSSLRIVDSDCISDFLNAFKTKYSYGQRLHNISGNAYHWDIKANKYIFSGNNNEIVSIFDSEYLSKSYMKGDLRKTKEKFWKSGFFTYEDVEYLSYLLLLNNSDIADFTSKRFPVVIVDECQDLSYAQLRILEILHKYGTAIHLIGDLNQAIYEFRQIDTNDTSEFVNENELSEMILDENYRSNQKIVDASVKIIQSESLIIGKQELIVSRPLIAILYKDKQEQKLVNYYSTILNEEGLQLNESRIVVRNNSLKNKILGKKTITGKVNTIEDFAHFVYLRKTDSLECFRESIRVLARAIQRAFFANEEHGNSNILYKPGSLEPSQWNAIIVSVQKRLLTDSSVNDLNKTWSVWKKALASCLRNIDVKTSHGLDLKKIRPKMGDKIVVDTFSNSHDRNISITIETIHGCKGMSLDSVLFVSSYKKSDSSSGAHWRDWFQHNEAGLSEAQRLAYVAFSRAKHLLALGIPNPPSAPLTEADRNMLIDYGFEIVEIAEE

SEQ ID NO: 65106 - protein, 729 aa, Staphylococcus aureus M90388; identical to SEQ ID NO: 62500

SEQ ID NO: 65107 - protein, 597 aa, Staphylococcus aureus M90388; identical to SEQ ID NO: 62501

SEQ ID NO: 65108 - protein, 729 aa, Staphylococcus aureus M42184; identical to SEQ ID NO: 62500

SEQ ID NO: 65109 - protein, 597 aa, Staphylococcus aureus M42184; identical to SEQ ID NO: 62501

SEQ ID NO: 65110 - protein, 729 aa, Staphylococcus aureus F26051; identical to SEQ ID NO: 62500

SEQ ID NO: 65111 - protein, 597 aa, Staphylococcus aureus F26051; identical to SEQ ID NO: 62501

SEQ ID NO: 65112 - protein, 591 aa, Acinetobacter baumannii 883425; identical to SEQ ID NO: 65070

SEQ ID NO: 65113 - protein, 633 aa, Acinetobacter baumannii 883425; identical to SEQ ID NO: 65071

SEQ ID NO: 65114 - protein, 552 aa, Sphingobium sp. Ant17
MRLVLDPTLADAARQLKLSDFWDGCELAKGPRIEVHLDFAGFDTDEAQAALLTDFRIAGDPTIARLSYVFRKKPEVGGPPQSSADCEFIVYGGGDESRPIPSRLRRRIALDMLDALRDAEGQLGSWRNSPLRPLLEDAIAGVDHASLEAVAADLDRATKALEAFPTVKALEDGLRSGILDLAGKTHDIDARLRFAPADPLRLFRSISMFIDNGKRGIAEASLGSANVALIALKLAEFAWRRAKNERNYSLLCIEEPEAHLHPQLQRGVFDKLFNAGDPNQALIVTSHSPTLAAVAPLRAIVHLKAQGGRTNAYSLANLPVTPEDLDDIERYLTATRSELLFSRGVIFVEGDAEETLMPAFADALGYNLDRLGISVCNVAGVNFTPYVKLAASLGFPFSVVTDWDPLDGTKPPLGIARTLDIWDAYASVSGREVLSAAQRARWDASDFAAFSKAWEQSGVFLNDQTFEVSVANTPALLGTLLDILSEQGFGSVRTKRIAAWRADMKVDPAQLLAMVADIGKGRLSAKIARKLPFGQHPPGYIAAAIRFVADRV

SEQ ID NO: 65115 - protein, 592 aa, Sphingobium sp. Ant17
MSNHLALARALVDLAANAEQAAAVQERGHCVVLAGPGSGKTKTLTTAMARCLVEDVVDPRGVACITYNNECAIELETRLAALGIASNDRAFIGTVHSFALTQVIVPYARCLPGLLPDEFRVASRAECRAAVEIAYSQVFDDQFDPHDRWGFAEEKRRRDVDRSRPDWRGCNPELADFIEAYEAELRRRSLIDFDDMPLIAFRMIQQHGWIRAALRARFPVLFVDEYQDLGYALHELVLLLCFAGGMRLFAVGDADQSIYGFTGADPELLQSLVARADVRVLRLRFNYRSGAKIIRASMGALGEERDYRGRDGAPDGDLFFWKVIGDIDTQARTIGNKILPVLLERHPAEEVAILYRAAWLGDKIAAALDAKDIPYVRTDGNALIKRSSRLARFIEGCARWTTGGWREANPPFARLLSQAKALVFGGRSSDAEEQMLSSQLIAFLRSGIDSGETTHFWLQRFWRELVTPWRAIARNPQGEWDVCSEIATRTDPARGGDIALNIFAGRIEGTGRVSLSTLHSAKGREFDAVILFGMNAGALPSQRDRKTPTALREARRLFYVGVTRPRKELAIVYQDGNPSPWVVELYKRSQQG

SEQ ID NO: 65116 - protein, 623 aa, Acinetobacter baumannii 25977_10; identical to SEQ ID NO: 64504

SEQ ID NO: 65117 - protein, 539 aa, Acinetobacter baumannii 25977_10; identical to SEQ ID NO: 64089

SEQ ID NO: 65118 - protein, 623 aa, Acinetobacter baumannii 25977_1; identical to SEQ ID NO: 64504

SEQ ID NO: 65119 - protein, 539 aa, Acinetobacter baumannii 25977_1; identical to SEQ ID NO: 64089

SEQ ID NO: 65120 - protein, 623 aa, Acinetobacter baumannii 25977_2; identical to SEQ ID NO: 64504

SEQ ID NO: 65121 - protein, 539 aa, Acinetobacter baumannii 25977_2; identical to SEQ ID NO: 64089

SEQ ID NO: 65122 - protein, 623 aa, Acinetobacter baumannii 25977_3; identical to SEQ ID NO: 64504

SEQ ID NO: 65123 - protein, 539 aa, Acinetobacter baumannii 25977_3; identical to SEQ ID NO: 64089

SEQ ID NO: 65124 - protein, 623 aa, Acinetobacter baumannii 25977_4; identical to SEQ ID NO: 64504

SEQ ID NO: 65125 - protein, 539 aa, Acinetobacter baumannii 25977_4; identical to SEQ ID NO: 64089

SEQ ID NO: 65126 - protein, 623 aa, Acinetobacter baumannii 25977_6; identical to SEQ ID NO: 64504

SEQ ID NO: 65127 - protein, 539 aa, Acinetobacter baumannii 25977_6; identical to SEQ ID NO: 64089

SEQ ID NO: 65128 - protein, 623 aa, Acinetobacter baumannii 25977_7; identical to SEQ ID NO: 64504

SEQ ID NO: 65129 - protein, 539 aa, Acinetobacter baumannii 25977_7; identical to SEQ ID NO: 64089

SEQ ID NO: 65130 - protein, 623 aa, Acinetobacter baumannii 25977_8; identical to SEQ ID NO: 64504

SEQ ID NO: 65131 - protein, 539 aa, Acinetobacter baumannii 25977_8; identical to SEQ ID NO: 64089

SEQ ID NO: 65132 - protein, 607 aa, Roseibacterium elongatum DSM 19469
MLPHHAVLIGDNNTGKTTLLESLDLALGPDRLNRTPPIDEHDFYEGRYLAKATPDTSTEGEDVSPEGGDAETVEGELENVTDDAAPRIEIEVTVTDLSEEQKARFGDFLEFWDSTTDAFYDQPDPAGVDPAHVAEALRVTFHGWYDPEEDDFEGRTYFSRSLSEGGSPVPFSKKDKQICGFLYLRSLRTGSRALSLERGSLLDIILRLKEVRPQMWEDTLGTLAEYSVAADPALGISGVLESINKALKKYVPKEWGVEPHLKVSNLTRDHLRKVITAFIATGEGKHAAPYFRQGTGTINMLVLAMLSQIAADKQNVIFAMEEPETAIPPYAQKRIVHEIRKLASQAIFTSHSPYVLEEFATEETVVLGRDTDGALSRKPIVLPDNVKLKRYRQEFRTRFCEGLLARRVLIAEGPTEASAFPVACRRLAEINPGTYSSLEALGICVVDADGEKNIPGMAKLYRELGKRIFALCDQQDAANKTLIEAEVDILLMHTEKGFEDLVLKGTNEDALKRFAALLDWPGHLTSKYPDPSADVFNALADYFSWSKGNWGIADFFAQCAEDEIPEWVRNACSQLKTACDPTPHLDDAAEPVGESDADPGASADGAD

SEQ ID NO: 65133 - protein, 606 aa, Roseibacterium elongatum DSM 19469
MELTEKQIQVLDADGHLLVTGGPGSGKTTISIFKAAQVAEAILRPGQKVLFLSFARATVSRVVEAIEFEQKIPKEIKRRIDVETYHSFFWRILKAHGYLAGLPRDLTILTPSAEAIALSDIRNSHGADNKLSDPQKQAKRAAETAKRYRLATHEGRVCFDLFAPYVGDLLHGSQTLRRLIATMYPVIILDEFQDTNPEQWRVVQALGAFCRLIALADPEQRIFDFIGADPERLNHFRCTFAPTEIDFGTDNYRSSGTDIATFANDILKGTFSQSSYTGIDFELFDPFPDPAMTKLITTTYAARGRLVASGKSDWSLAVLVPTKKMTRLVSDKFREPPAGMQPIAHTAVVELEAAILGSEIIAHLMLPDLGDAHFSEFIDLVCNFFQGKGGDRPTTGALKEAAAVRSAYEKWLAALAAGKKPHANSMIHALASVYEQARSVTLTGDPDKDWRAVRATLEAGACSRLKEIGLEVRNIRLLERGGQLRQDLTQDWRNNGSYANAHAIVQQAFVQEHFATGSKPETGVIVMNMHKAKGKQFDEVVIFEGWPRRNKGKIVANLDRIVRNNDRDEINDGSRQNFRVSVTRGRQRTTILTPKGDPCVLLLPDE

SEQ ID NO: 65134 - protein, 617 aa, Vibrio parahaemolyticus VPCR-2009
MYLHCLKLEKFRRYKQLEVEFNSGLNLLVGENDSGKTAIIDGIKYVLNTQSYEYLRPCIEDFYLDPTQDESHRSSEFRIECVFKGFDKEEAKHFIDWIGTDDEKKYFLKIWLCASRKNGRVFYDVKAGSDDEGSQVNGEARDLLRATYLKPLRDAESELTPKKGSRLSQILYNHEVFEDEEDNRLLKIMSLTNKAIEKFFTHHDGKELLTDVNTYLDDFSLENNKLNSRFNVSDSSLKSVLEKLSLKLFNQSVSENNNQGLGSHNLLYIAAELLLLKKSNYQGLKLGLIEEIEAHLHPQTQIRLIEAIQKISEENKIQFILTTHSTSLASKVKLHNLVLCKDGCLYPMGKEYTKLREGDYLFLERFLDSTKSNLFFANGVILVEGDAENILLPSFAKKLGLDLSQYGVSIVNVGSTAFLRYANIFLRNDDKKLNLDISLITDVDVKPFIYEPKQTKEEKIEGVKTKIELTEGEVEEKRLITKQSIIDKYEAPITAFVAPYWTLEYSIARSCMSELFYQAVYICHKTKSRDYVYTSEEKVTLIAEAKATYKKWKDDDKLSVDEIAYKIYKEIVLDKKISKAVIAQVFADFISDADFDGVIEDENINYLVNAIKNVTSK

SEQ ID NO: 65135 - protein, 485 aa, Vibrio parahaemolyticus VPCR-2009
MKPITDKDISDVEKRLSLGFDDGSKEFIKCSVSKDIQACPGAGKTTSLVAKLDVLSRQMPFPDKSGILVLTHTNVAVDEVKSKLGYNASKLLGYPNHIGTFQSFVNKYLATPMYIKLYSKKPEKIDSELFEKKLKSILTSSFIGSFILARSNDNNYNRVEKFINALEIRKDKICLKQATRSKTIISNKSKIFYRVKSYLEKDIVGTIVSDGYITFSHCYELANRYLEELPEIGSVISSRFKYVFVDEAQDTDSGQFELLKKIFGNSKSIIQRIGDNDQSIFNFDSSDKLTWDVSQDHITISDTKRLSKKISKVASNFSITNHNLTSNNDVDIDPVVLVFEDDNIEKVVPKFAELIKIHNLHLIEKPIFKAIGNIGKAHDTYHTIPSYVNTHYEQDAEVVNGDDFRDKLISCGDISPSHVNIHYWAILVQYLGEIGFDFDGKKFNRRTLTYYLKVNNRELLDELNGYSLSIFEDIERVDALNPYLV

SEQ ID NO: 65136 - protein, 697 aa, Vibrio parahaemolyticus VPTS-2010
MYISSIDISNYRSFRSQNIQFKNDINVIVGHNNAGKTNLLRALAVVLDNTSSKSLSIDDFNKNIPLEELKIAAPKVSIAVTFKKGNDHTPDDLATIASCLTKLVEDYEAKLTYELFLPEKEQTNYLQELDKLKDTISKEDIWKIIDSKFLRKYQYKIWAGKVENKDPVSSETLSKFDFQFLDAIRDVERDMLSGKNNLLKDVFQFFIDYDLKKNINTLEPDEIEKKVQEIRNREDVFKVSSEKVLAQLHDRMLEGKGEILGYANKTGADFNDSYPDFDGSVSEKDMLFALQLIIKKKTGITLPATHNGLGYNNLIYMSLLLAKMQVNSDGSYMGSNAKIFPMLAIEEPEAHLHPSMQHKLLKFLSDKNNKTRQVFITTHSTHITSSCKLDNIINLYSDDDEYTVSYPSKALGNDDSKRYVQRFLDATKSDMLFAQKVIFVEGIAEQLLISTFAKYYENEVKKTQPYLSKCLEDNHISVINVGGRYFEHFLKIFDTNDDNAIPKKVVCLTDRDPVRKLENGNYEKCYPFELGADNETYDYSNNSSQLVDKYKRHKNIRYFSQGEKSKTFEYELILENPKLKLLLTDSISNKSELEKLMDSIDELSIENFIKLLNKGTEKKPHAENNRIIESIKNCSWDEYSKKKAILASRYLNSVGKGENALLLSDVLERNLENIGTDKYQEFVVPQYIKDGIDFLCE

SEQ ID NO: 65137 - protein, 589 aa, Vibrio parahaemolyticus VPTS-2010
MRINTITSESVIKAIDDEFRVSAGPGAGKTHWLISHISNVVSNSTRLGKFGKVACITYTNIAADTINSRLGDSSQNTEVRTLHSFLYRHIIKPYASFLPSEYELSFDKIDGHDDHYVSLKRINDWLNNHKSKAKFKHPYTIKQLQKLKNNQEALSNWIGTIYWSMVQGENLELKCKSKEAFYIESGRRKYISNKIIGTLSEDLITYKKIFWRKGILHHDDVLYFSYKLIEENPFILTVMKSKFPYIFIDEFQDTSPIQSKIISKLKAIGVTVGVIGDKAQSIYGFQGATPNDFDEFISPKTTQYTISQNRRSTSLIIDVLNHIRKDIKQTPYRKESGILPQLLVGPIYDAYEYLNSNVVGGEIKIISRDNISVYNLNRIFNGGVSDVNPIDEIRNIDSNTERKNKVINCITALFLANNFRFKDAVDEIEKNFREISDEDIRKKMALDSLFTLTANLSKFEEENIYDFFVFIKDNIHSSISKLTDRGKQKPVYERILYKDIINQLCTGEETGDIKTIHKTKGDDFDNVLVHLPDEKKLDFLINPDLENNEEHRVYYVAVSRAKDGLFISVPTLNSKDKEKLSSLFKIVYL

SEQ ID NO: 65138 - protein, 209 aa, Vibrio parahaemolyticus VPTS-2010
MSYRMSILPAEAFFSDGIFLVEGPSEMLFYESLSKALGIDLDFENLSILSVDGISFKVFISILDALQIPWTMRTDNDVSKVSGKNEWQHAGINRCLDLIKEAPFDRRNTEFSSQSTVDNGEWKTASDLLNDKGIFLSKVDLETDLVEELSNEVRTAVGKSDDDSAIKYLQGKKALRMRKLLKSISGDLHKLNSGELAKPLNKLVQMRRT

SEQ ID NO: 65139 - protein, 536 aa, Vibrio parahaemolyticus VPTS-2010
MSTFNPTLQQQAAIDCYDSIVITACPGSGKTTVMKEKIRGITPNLPSHKGVIAITFTKKASEELKKRCKENAHDTKLSFFGTIDSFCLKELILPFLGRVWDGTPSDCKIIKKLDSHQQLYLSRTYSSPTCDDLSSDDGFKALYDAGILWMSSFAALSLLVLNNSVSAQRYIRARYSHVFIDEYQDSSQAQHELFMKIKELGLIATAVGDIDQSIYQFRGSQPKFLLALTKDNANFQHFELDLNHRCHPSIVNYASRLLNPAYKLIAHEDDIHVFRRLITGSLKNAAEHISPWIGDWVKKSTINSASDVAILAKKEVSLREFATGLTHNHRLYTDTPLNGIGTECADVYLDLLSYKFGAIPTAQDVIEKYFSQLPEKNLVSMRKQLKTIRAEPELETFIEKCNSALDLIGLDEFEAENDAVRIIWNNDTLVKLFKPIAEDEVQLMTLHKSKGLEFKIIFHLDMEEWSFPHRVPGANWDDINYPSLAEDTNLHYVGITRAELCCVLIRTTLRKNAKGNYVDSRPSYFLGLPQLEGLYK

SEQ ID NO: 65140 - protein, 678 aa, Eubacterium acidaminophilum DSM 3953
MNTQPYICKVHIENFRNFRCADFWLNEKQVIIGENAVGKSNLLYALQLILDPNLSDKDRMLEESDFWEGVDEPMKNGEQILIELWFANFEENKNVLAQLTDATVKLNEKEMLKLTYKFYPYRKYGEINEYNFIIFKGDDETRRFSYEDRKYLNIRVIKAIRDVESEMRNSKTSPLTQIIKQKYTISKDVLAEISKALEEKGADTLQIGQVEDLESRIHMLLNQMVAFNQDQFDVSLKTMNIDATKLLYALRPLIDSRESGNTSLGINNLLYIALILLLIEDETIKTYLPKELYEELVEKDENNLIESCYSEVEKINGYTLNDTVLTDSAKRDDLYDFMTETIPTANGVTILAVEEPEAHLHPLYQRLLYRHVMNRSNASVIITTHSTHISSVAPITSIVHLISKSTGTSVKTTAQLRLSDSDFADLERYIDVKRGEIYLAKGVIFVEGVSEEYLIPSFAKTMEYDLDRLGVVVCNINSTNFEPYRQFARALGLPYIIVTDGDYYHRVDEKNKYGDMASEDDVEYGYAGIDRAKAFSGVEDKIESFVTSEYEEGTVFEDLDTDDQIDFFESIGVFIGKHTFEVDIFCKSGGPDTVEGQIISSVFDDLTAGGPQQKQNFKNNMSEGKYDRCLAQIEASNSQIGKGRFSQRLSSCVTHNMMPEYIEAAIAKITELVRSRSN

SEQ ID NO: 65141 - protein, 602 aa, Eubacterium acidaminophilum DSM 3953
MNDYFKQKVKDLSNDADQLRAYESTDSTVVIAGPGSGKTTVLTLKVMHLLENLIAEPRGLACLTYSTESAREFKTRLSKLGIRSRKNVFLGTVHSFCLAEILTPFAKLYPKYGIPNPIRIISEAEKKKLFDDVNPPGGTSITEMDKERTRNISGISRVAIESYEVALKTAIAFEEKLLKSGYIDFISMVKFSVELIQNESYVRKAIEAKFPWFVIDEYQDLGRPLHEIVLSLLDVSDIKIFAVGDADQSIYDFQGAAPDYLHELSQRKGIKCIRLLNNYRSAQTIINASEFVLNTQRGYVASGVLKDYPASMEFIECESGMDEQYQQTIEMVKRFHSDGIPYHEIAILVGKNDEVNALKDKFDSEGIAVYLARQEFRNTETIQWLQKCASWVENKTQVSFDEIFLTWMNFISHQQDNMISDEFNLIVRRTLLRVLQVSRQYKDNLFEWLRHVLTELDFKKVFDGSDRFPDEIENMKKLIRVVKQAEPAMTIGFLTRLGIPDNQVVLSTRHSAKGLEFDVVIMLGMEKDSFPGYYDTTQRKIDEARRLCFVAVSRARKACVLIRSKQLPNKYGRWFSKDPSPFWTTLKEFHDAQSSGKRDLQT

SEQ ID NO: 65142 - protein, 615 aa, Paenibacillus polymyxa SQR-21
MFLLEVRITNFRKFGQGTNGEPGLVLVLNKGLNVLIGENDAGKSAVIDAIKFVLLTQSREYSRLEKDDFHADSNELKIECIFKGFSVNQAKDFLEWITIDSDKQYSLRVFLTAKKDVKGKILIDDVHAGSDSEGQILHSKARDLLRTIYLKPLRDAENELAAKRNSRLSQILYSHPEFSTGEDHRLVEIIKEANQKIKRYFDYDELTSEEKKILKSINFYLSKFSDNKNLLSSNIEIAAVNLKMILEKIDLLLVTTKSGLGSLNQLYIAAELLLLQIEKTEGINLALIEEIEAHLHPQAQIRVIDYLQELSESSTSPMQILLTTHSVTLASVIKLNNLILFAEGKSFSLAEGNTKLHNGDYRFLERFLDSTKANFFFAKGVMIVEGDAENLLLPTLADKLGKSFAKNGVSIVNVGSTALLRYSKIFIRELGPIMQLPVAIVTDCDEPVSKIDKESGGIVMLPARKPKKIKSEKKVKYSDQNVKAYISHEWTLEFDLACSCLKKELFASILMARDYANQDKELTEGRAAKTYKEIGDYLKEAETQISGWSTYEPFMLASNIVRDVVLKKNISKAVVAQCFSEILNERSFTLEELEDIRSDSYLKYLVDAIDYVTGA

SEQ ID NO: 65143 - protein, 656 aa, Paenibacillus polymyxa SQR-21
MQMVTVTDEDIEYAAKVLNIPNGFDAPRVNVIKCMESRDVVACPGSGKTTVLLAKLLILARHIPLKNNKGICILTHTNVAIDEIKERLGDKANELLTYPNFVGTIHSFISKFLANPAFVNYYSGRISRVFEPLDYKLRLIKKYKSLYPPFSGSKLDGFLYGRLNKKIKESKDNSKIAKAKDDLLRSLELDYTDNTIKKVAFNKKTTVLKNPNSDAYKEYITLIDQLQNEGICSYNELQGLAHRYVNDFPRELQSIFSERFSFVFVDEMQDTSLLQLQVLEKIFDNEKMIFQCFGDPQQTIYESDDKGCSWEPKDPLFIKNSNRLSKSIAKVADVVALKPYGMLGRESQKGTLLSPVIISYKDNDVSHVLESFAKLIIKYKLDELDNAIFKAVGMVKDKNEGLSITSYFPVFEKLEIRSNVNKDFSDLKSYLVMLDKAVIEKEGIKAYYDRFILAILKYLRINDIRTDEGRLFSKISFLKYLRENDERLYKTTHRYFARIVLAIAKGKCILASFNYILAIIVNRLFCFKVNIYKDEFMNGTPVVATIAVNEEKVNMYRYDDLRIELDSVHGVKGQTHNATLYLETFYFSKTNESIIKFLIGEQSSTIEEHVEKHIRVAYVAMTRPTDLLCIVLNEEIYLENKVKLNDLGWIHYQEII

SEQ ID NO: 65144 - protein, 614 aa, Bacteroides fragilis str. 2-F-2 #7
WKKDSVGVRLRFEPKDIKSLYADYKKEVMKVRSLQDSPEYKETKNLKLYPQNMWDFLNHNHNLLAYFNIKYYVLDSEKINHELESEVQVTPDDSLEENPLVDLIRIDSIEAFREFSDPMGKNESDIDTLSKQLQAYYRQNYTDETIIETGDLKLMEELSRANTSYDLKLQKSFSMPIGELSNINYPGFQNPSISIRSNVNIVDSISHDSSVQFSIQGKPELSLPEKYNGLGLRNLISIYLKLIQFREQWTRNSKNEEDVKKSIEPIHLVFIEEPEAHLHAQAQQVFIRKALEALTNAAENNALKENSNLTTQLIVSTHSNHIVNEVDMNCLRYFRRVLDEIIGIPVSKVVNMSRTFGENENDTKKFVTRYIKLTHCDIFFADAAILVEGAAERILMPHFIKREGMDNYYISVMEINGSHAHRFSSLLKKLNILTVIVTDIDAQQEVEEDGKKKKKSSLPQRRQSQTTNNDTIKHWIGKDEIDDLLELPETDKIKDNVHVVYQTGVDVVWIKEKETIYPYTFEDSLIFTNLDLFRGDEKLKKLGTVTTFYNYLHSIKDLKTFHMKIFDKLESSSNVKAEFANTLLYAEQFEALQTPAYIREGLEWLKSYFEFNHK

SEQ ID NO: 65145 - protein, 617 aa, Bacteroides fragilis str. 2-F-2 #7
MGHNIDEKVDLTLEACISPNSRKSFFLFAGAGSGKTHSLVRLLNKIKDKWEKQLNLEGRHIAVITYTNAATDEILNRLDYSPLFHVSTIHSFVWEVIKHYQTDIKKYYIAFKEVEKAEIELKLEKSKSKSGKNYNNNLEKLVAINEKIIKASDINRFIYNPNGNNYEYNALSHADVIKIGAKMIVDNELLQKIIAQQYPFFMIDESQDTKKELIAAFFEIERNVDDNFTLGLFGDQKQRIYTDGEERIVEIIPQEWEKPIKEMNYRCAKRIVELANKIGCQIDVYAKQSPRDNAPEGTVRLFLIKNKDDLNKIELESKVIQMMADITGDQMWNRDATNVKVLILEHMMAARRLGFAEFFDVMHEVDKYKQTLLQGLVSDMDIFTKLIFPLVENVLKNDNLSALNLLKLYSPLLRELPQNKAFQILDKCKKVIDILANMDFNVVTIRELITYVCTTHIFVVPEILKRASKMVLNDLTEDDKEDMDIVCSWIKVMDLPVNQIKRFDDYVNRRTMFDTHQGVKGLEFERVLVVIDDNESRGFLFSYDKLLGVKSLSDGDIKNKETGKETSMERTTRLFYVTCTRARNSLAIVMYTNAPETAKETVLVNKWFIDDEIIIIN

SEQ ID NO: 65146 - protein, 656 aa, Bacteroides fragilis str. 3986T(B)10
ESDLDENKLSISAWQPFVPQLDVWINVEENEIHYVNRIIPTLDWASGKLGIRLRFEPKDIKTLYTDYTTAKSTIEELTKDRSKKATKLWPIHLWDFLQKKLHTYFTVNAYILDPSKFGQGDTPQLLSEDNIPIDFDPFQGLVKIDIINAQRGFSDPNTPETGISNLSSQLREYYSKHINPTETIDATDLDALEAIEEANKAFDIRLEAGFSSSLDELRNLNYPGFGNPEISISTKVSPVDGLKHDSAVLFNVQKGETDEQCLRLSEKYNGLGYQNLISMIFKLIRFRDEWMKVGKIAKNSTHEIEPLHIILVEEPEAHLHAQVQQVFIRKAYDVLRNHARLKEKKDFCTQLIISTHSSHIAHECDFKSLRYFKRNITQNQIPTSTVINLSKTFGAEDETTKFAKRYLKTTHCDLFFADAAILIEGQAERMLLPFFINQEFPKLASAYISLLEIGGSHAHRLRPLIDDLGIITLIITDIDSVDPNAHRRSVRPEKGKNYVTNSSTLKQWTPAKESIEELVDLASTKKQSSNGLVRVAYQYGTKITFKNKVVTVYPYTFEEALVFDNIDLFKSMKGDGLIKKYSEALNESTIKECLRKMFEALDNAKKAEFSLNLLFIDDTKKIKTPTYISEGLKWLSEILEKNSSNCSMSVSSNAIK

SEQ ID NO: 65147 - protein, 182 aa, Bacteroides fragilis str. 3986T(B)10
MITDYDNCLDDKVDEELLACLNLQNPKSFFLFAGAGSGKTRSLVNVLEQIKDKYGDELKLRRKNVAIITYTNAACDEIIHRLKNDPTFAVSTIHSFAWELIRHYTADIKNWLRNTLNKEIDELEIEESKGRPGTKTSVDRKRKIENKKNRLSTLDRISKFAYNPNGDNIEDNSLSHTEVISI

SEQ ID NO: 65148 - protein, 610 aa, Bacteroides fragilis str. DS-166
MQKILINEIRIDGFRGLKDFKMSLSETTVLTGMNNVGKTSVLKALQLLFGNSSFLSTEDLHIDKNGKSNYIIVDAKIVAIDNDGKRIANFSDVWEIAFGADNIKMDAEEHAYVPLRVKYTFQTLQNSFNRDMQILNEWDSAGIAWQNLKGKKSTVKGDYFQFHYLDAKRDIQDDLKARTSYLGKMLGDVVSNYDPKDVAELEQKISSLNAEAIEKSDVLRNIQESLKGIDATMDSSGKVYVSPFAKKLRDLNKSLTIHYGTEDSSFTMDYHGMGTRSWSSMLSFRAFVKQMCDSKNPEDEAFLPIIAIEEPEAHLHPNAQKQLYKQMNEMPGIKIISTHSPYVAACAELSELRGMYKAAENTVCGSLPVTELTSEEQRKIRQAVLTSNGELLFAKAIVLGEGETEVQALPIFCQQHWGLTPVESGLSFVDAKGCGNYYPFVALAEAFQIPWYIFSDGEKDTKKGLKKLLKRTYNEDKELAEQNNIFIISPEKDFEGMLLDDGYKDEIEKAIEQLKGEGYIDEFIRKFNHKPKGREQTPNICKSCNQHIFVDIERIYDGEDGRLTALDDIMEKNKAQLGPVLANCIIESEKPLPPLVVKLFDGIKKDICHV

SEQ ID NO: 65149 - protein, 614 aa, Bacteroides fragilis str. DS-166
MCKIKLSPKQQEIASLTDGAVLVRASAGSGKTRVLVERIKMLAGMTKRKVLAITFTNKACEEIRTRLAEVDENLLEHVFVATFHGLCESIIESHIAATRFVTMPQIFADDDRKKILEETITETPSLSQWYRGLDDKERRETLYRALDNISLIKRSVILDDELYNVIKDEQMRNLYLSYREQMDSLNAIDFDDLLLNAYQLLIHNPRIADLYRRSFTYICVDEAQDLNKAQYMVLRAITGGEHKNVMLVGDTKQSIYAFNGSSSKYMDDWFVKDYNPTVYNLNENYRSAKAILDYAQKVVHDDTLDVTLPYTGVCKEYAYDTPCEEAQEVVSGIKSLVGAEIEGYDGKLSYSDIAVLARNKFVLGKIEEQLKSGGLPYHYKTTGAGLEFASTAAKAFDLAMVVRTNPYDRLHLDMLQSIVGVSHCKSLEQVVENISDAFLKEVVQQASLLKDDGSNMYQTVKSILNTLKASNASEFKSTDEVLAVFDEFELLKHHWSSYAKSVTNYSLSAFRNAMSLGQTSVTSSDGEGVTLSTVHTMKGQQAVVVFLVGMDEGTFPDYRAIKKGNNSIEMQQEKNNLYVAITRAQRHLYICYPQKRKMPWGDWSPRKKSSLLPK

SEQ ID NO: 65150 - protein, 423 aa, Bacteroides fragilis str. 1007-1-F #8
PGQEHPFVTYVKSANRSINSWFNDELQALGKDGLPILGTSNKEQIKDKIDSFLHAFINSNINSSLTITEPKIRNILETISIVIEFAQNMGLGTMNRLYMATELLHLNKEWDGLKLCLIEELEAHLHPQAQMKVISALQCQKVQFIMSTHSPNIASKIKISDKENTNIILCYDSDVYPLNTDTTRLDEDDCIFLDHFLDVTKSNLFFAKGVIIVEGWAEELLIPVIANKLGYNLTNKEISIVNVGSTAYIRYANIFIRTDGKILNMPISIVTDLDVSPEKIKKEEVELDTIEYSEISHEVELEKSKKILDSLALPDESNVKILISPHWTLEWCLYLSSTLNECFKECVSKVHSKTEGFKKNKAGKYDEEKFKTTLIKKLKDRTLDKVAIAHELCQQICSLDTLAIPEDDSIYYLVEAIKHVSKV

SEQ ID NO: 65151 - protein, 650 aa, Bacteroides fragilis str. 1007-1-F #8
MRRIDDNLISSVQDFLLPKGCNFDDERRNFIKELSSCDLLAVPGSGKTTALIAKLCCMAENLEIGDAILVLSHTNTAVEEIRKHLSKKAAKLFEYPHNVSTIQEFVDKFLAIPYYENKYKRGIEIIDKDRYDAEIQRILSRCWDRRILYCKHQFDFTSVRFISSFGEPRIGLGIEGSDISYKIPTTWRGNEDFNKQYVCNWLLKAKNEILEKGILHYDDCYYLAEEYIKEYPEIKSVLQKRFKYILIDETQDMQLHQLNLIDKLFYSDNCILQRIGDPNQSIYNAVTDTCDWLPRNPMYINNSLRLSKEIADVVNPFTLITGDDGTGKARFVVNGKNVLDSPILPTLLLFNEETMPLLKGKFKDLIERNNLQNTINGKKYGFHIIGWNAKISEPEFNIEKLRLDNIFPNTTKVTTSKTYDTISEFLQFSENETISQCQKTVFAILCHILRLSGVVDVNGRNFTIKTLLKQYKNNELIILNQTVFKISVAIKQNDFETAYKLLKQVVDSDLKSKFELQQNAYVDNFIGNTFVKYNNEEKEEEDSIPIKIGTVHSVKGMTHCATMYVETFFHNYECKHLIKKQNRGGFQPSPFFKDIVDKKSSRAKQAMKMLYVGMSRPTHLLCYASLKMNWSSDALKKMRESGWEIIDLTI

SEQ ID NO: 65152 - protein, 644 aa, Bacteroides fragilis str. 2-F-2 #5
WDDIVPSLDIWIDVSESEAYQVYKIIPSLTWKKDSVGVRLRFEPKDIKSLYADYKKEVMKVRSLQDSPEYKETKNLKLYPQNMWDFLNHNHNLLAYFNIKYYVLDSEKINHELESEVQVTPDDSLEENPLVDLIRIDSIEAFREFSDPMGKNESDIDTLSKQLQAYYRQNYTDETIIETGDLKLMEELSRANTSYDLKLQKSFSMPIGELSNINYPGFQNPSISIRSNVNIVDSISHDSSVQFSIQGKPELSLPEKYNGLGLRNLISIYLKLIQFREQWTRNSKNEEDVKKSIEPIHLVFIEEPEAHLHAQAQQVFIRKALEALTNAAENNALKENSNLTTQLIVSTHSNHIVNEVDMNCLRYFRRVLDEIIGIPVSKVVNMSRTFGENENDTKKFVTRYIKLTHCDIFFADAAILVEGAAERILMPHFIKREGMDNYYISVMEINGSHAHRFSSLLKKLNILTVIVTDIDAQQEVEEDGKKKKKSSLPQRRQSQTTNNDTIKHWIGKDEIDDLLELPETDKIKDNVHVVYQTGVDVVWIKEKETIYPYTFEDSLIFTNLDLFRGDEKLKKLGTVTTFYNYLHSIKDLKTFHMKIFDKLESSSNVKAEFANTLLYAEQFEALQTPAYIREGLEWLKSYFEFNHK

SEQ ID NO: 65153 - protein, 617 aa, Bacteroides fragilis str. 2-F-2 #5; identical to SEQ ID NO: 65145

SEQ ID NO: 65154 - protein, 584 aa, Bacteroides fragilis str. 3998 T(B) 4
QFRVFDDITLYFKNGINILIGENNSGKTAIIDALRICLGCGKPDNYIYIQESDLHINPTDPTESNTTIQFDLTFEFGDALIEKECFYDFISQDKEDPAKQTIQLHLKFIQENNGKKKYFKRIIWGGDNEGQQVPYESLQEIFYTYLSPLRDAVSCLRPYSYDNKTSQLFNQLTKYNKGEEEIELNEERKDLLAKNLYHVFEDDASDWKHILTTGKSKVNAHLEGTGITRKHPNIEMRYVGRKFSDVVRGVELKCPVYKTIEDGQEQKYFELYQNGLGENNLIFTSVVLGDLINRCEDNALEIYNALLVEEPEAHLHPQYQNTFFEYLNELQSKGLQVFVTSHSPTITAKSDVNHISVLQRKQNIVQSFSFGRLTESDYPIESKRHLRKFLDTTKAQLFFANGVLLVEGIAEAIIIPILAKKFLSEKIDLCKSGIELVNIGGVAFNHFGLLFNNDDERKRLLSRCAIITDSDPKEDGDISDRAQNAKDLEKHNLKVCLAPHTLEYDLFEQSEQNKTIMRDVYRKLHPRTEILKSEFDAQTLMQYLEQNKDKAEFALQLYDRLEKEEAFDVPDYIKDAILFVAPTE

SEQ ID NO: 65155 - protein, 593 aa, Bacteroides fragilis str. 3998 T(B) 4
MDVQLSAQQQAVVDCTEPRIVVKACPGSGKTFSVAARMAKLLQENNLSRHQGIAALSFTNTACEVIQKEIKETFGYANIGYPSFIGTIDSFINTYIFLPYAHLVMGCDCRPEIIGTEFNKWFDYDPAQTRHIRDKFGRNIITFRDVNYYFDIISFGLDEELLRLAPYQAYHFGKADWENPNKKDGSLKKNISELIEMKWKHFNAGKVNQADATYFAFRILNEYPSIAQNIVRRFPILIIDEAQDTTELQMAIIDIFSRYGANSIMLIGDPDQAIFEWNTANPHLFMEKYNSPDWHSLDLSENRRSSEKICQLANRFSGNAMSSIASDKDYTDEPCIKGHLDTPESVNQIMNHFIEKCNEMGLDESEYAVVFRGQKFGETNFGLVNNDSSSKQNSPWINGHYGVRDIVYGKYLIDHGKYTDGLSLIEKGCYKIAKRVRYVPASTMRKEIAEVGFRIHRAEMFDFIQKLPSTNDTLSNWITELQQKGINLTVDFGKANVRIESLFRIVNHQFRQERPYLKTIHSVKGMTLEAILVFLSKKAVRTNYATILNNPAKYSVDNNEELRIVYVACTRPKKLLWIAVPSDDIDCWRNKLF

SEQ ID NO: 65156 - protein, 734 aa, Bacteroides fragilis str. 3986 T(B)9
MRISCLEIQNFRKLKSSRIDIADDRTIFVGANNSGKTSAMDCLILFFRDKKSFTTQDFTLSNWREINKIENDYIVYSKESDLDENKLSISAWQPFVPQLDVWINVEENEIHYVNRIIPTLDWASGKLGIRLRFEPKDIKTLYTDYTTAKSTIEELTKDRSKKATKLWPIHLWDFLQKKLHTYFTVNAYILDPSKFGQGDTPQLLSEDNIPIDFDPFQGLVKIDIINAQRGFSDPNTPETGISNLSSQLREYYSKHINPTETIDATDLDALEAIEEANKAFDIRLEAGFSSSLDELRNLNYPGFGNPEISISTKVSPVDGLKHDSAVLFNVQKGETDEQCLRLSEKYNGLGYQNLISMIFKLIRFRDEWMKVGKIAKNSTHEIEPLHIILVEEPEAHLHAQVQQVFIRKAYDVLRNHARLKEKKDFCTQLIISTHSSHIAHECDFKSLRYFKRNITQNQIPTSTVINLSKTFGAEDETTKFAKRYLKTTHCDLFFADAAILIEGQAERMLLPFFINQEFPKLASAYISLLEIGGSHAHRLRPLIDDLGIITLIITDIDSVDPNAHRRSVRPEKGKNYVTNSSTLKQWTPAKESIEELVDLASTKKQSSNGLVRVAYQYGTKITFKNKVVTVYPYTFEEALVFDNIDLFKSMKGDGLIKKYSEALNESTIKECLRKMFEALDNAKKAEFSLNLLFIDDTKKIKTPTYISEGLKWLSEILEKNSSNCSMSVSSNAIK

SEQ ID NO: 65157 - protein, 632 aa, Bacteroides fragilis str. 3986 T(B)9; identical to SEQ ID NO: 63697

SEQ ID NO: 65158 - protein, 593 aa, Bacteroides fragilis str. 3998T(B)3
MYLSSLHIRQFRVFDDITLYFKNGINILIGENNSGKTAIIDALRICLGCGKPDNYIYIQESDLHINPTDPTESNTTIQFDLTFEFGDALIEKECFYDFISQDKEDPAKQTIQLHLKFIQENNGKKKYFKRIIWGGDNEGQQVPYESLQEIFYTYLSPLRDAVSCLRPYSYDNKTSQLFNQLTKYNKGEEEIELNEERKDLLAKNLYHVFEDDASDWKHILTTGKSKVNAHLEGTGITRKHPNIEMRYVGRKFSDVVRGVELKCPVYKTIEDGQEQKYFELYQNGLGENNLIFTSVVLGDLINRCEDNALEIYNALLVEEPEAHLHPQYQNTFFEYLNELQSKGLQVFVTSHSPTITAKSDVNHISVLQRKQNIVQSFSFGRLTESDYPIESKRHLRKFLDTTKAQLFFANGVLLVEGIAEAIIIPILAKKFLSEKIDLCKSGIELVNIGGVAFNHFGLLFNNDDERKRLLSRCAIITDSDPKEDGDISDRAQNAKDLEKHNLKVCLAPHTLEYDLFEQSEQNKTIMRDVYRKLHPRTEILKSEFDAQTLMQYLEQNKDKAEFALQLYDRLEKEEAFDVPDYIKDAILFVAPTE

SEQ ID NO: 65159 - protein, 593 aa, Bacteroides fragilis str. 3998T(B)3; identical to SEQ ID NO: 65155

SEQ ID NO: 65160 - protein, 681 aa, Bacteroides fragilis str. DS-208
MYIKEIKISNFRNFRDASVPFHEGVNVIIGHNNTGKSNLLRAMGLVLGYSDGHRLCTSDLFYETDVTKLQQQSPRIQITLVLRRSEGEALDSVEMGLFSGMMVDPALSEEAELRYEFKLADSQEDNYKADVAIATTAKEIWKIIDHDYIRLYRSSRSGGNQAAGISVNDTLGQIDFQFLDAIRDVSHDLYAGYNPLLRDVLNFFIDYSVKNDSTKTEDEIKEQLKTLRDDFVQQSNPLMQTLQNRLQNGKNVFLKYALDTGATFNGAVPDFDGTVTENEMFAVLRMIIKYAVGIEVPATYNGLGYNNLIYMSLLLARMQADSSITYMKRNAKVLSFLAVEECEAHLHPAMQYKFLQFLQDNNANGHVRQIFMTSHSTQIASAVKLDDLICLTSPVLGQIHVGYPRVIYKEDNIDDVTSKLYVQRFLDATKADMFFANRLIFVEGVAEELLLPVFARYLNKNLTDEHVLVVNMGGRYFNHFLKLFDTNNPYTINKKIVCLTDIDPCRKKNEPDEDYEACYPYEYNIDTANYDYKHHADTEVAQYAAHPNIRFYRQDVTYGKTLEYDIMRENPDCELLLTNSVSNLKEIKAMMAEQDMNKMMSKMRNSEANTRIKTSIGASKWTDEEKRKALLASRYLNSVSKGSNALELNVVLMANLDKPVADRKKFHVPQYIVDALTWLLS

SEQ ID NO: 65161 - protein, 553 aa, Bacteroides fragilis str. DS-208
MAIIITSEQTIPIDEPFKVCAGPGAGKTHWLINHIKNVVSNSHKLDIVKKVACITYTNVGTDTITSRLNIGNDVVEVCTIHSFLYANVVKPYVHLVAEDFELKLDELVVIDDSNFKSEGTAKIVLNRIGRSWLDAKIYLKGLESANWRYENHEYKHYKPNYPQVYYTKSGKRYVGNDWYMGFKRWLWSGGYMSFDDILYFSHILLSRYPNIYKLIKARYPYIFVDEFQDTIPFVVDFLTLLGNDGVIIGVVGDKAQSIYDFLGATVQQFDNFALPEMQEFEIRGNRRSTKQIIELLNIVRTDFSQDWLNGAEGMVPELLVGDMLNCYQQSIEKSGTDEIQSLAFQNVLANSMRNKNGMRKAEKILEMDFDSNVERQMVIKALIKAVEYTRMNDLRNAWHQLDIIDRERSLTIVLLRHLLNGYKDYKNGSMMDFYNFLVNDLHVKMPKIKKKTIKDFYMNHTYADAALGVKYGDSNDKHKTIHKSKGEEYDNVFVVLKEEDDIEFLLTPDLNGNNAHRVYYVAASRAIKRLFINVPTLSAENRIKFEGKPINIS

SEQ ID NO: 65162 - protein, 608 aa, Bacteroides fragilis str. 1007-1-F #4; identical to SEQ ID NO: 64762

SEQ ID NO: 65163 - protein, 650 aa, Bacteroides fragilis str. 1007-1-F #4; identical to SEQ ID NO: 65151

SEQ ID NO: 65164 - protein, 589 aa, Bacteroides fragilis str. B1 (UDC16-1)
MSLSETTVLTGMNNVGKTSVLKALQLLFGNSSFLSTEDLHIDKNGKSNCIIVDAKIVAIDNAGKRIPNFSDVWEIAFGADNIKMDAEEHAYVPLRVKYTFQTLQNSFNRDMQILNEWDSAGIAWQDLKGKKSTVKGDYFQFHYLDAKRDIQDDLKARTSYLGKMLGDVVSNYDPKDVAELEQKISSLNAEAIEKSDVLKNIQESLKGIDATMDSSGKVYVSPFAKKLRDLNKSLTIHYGTEDSSFTMDYHGMGTRSWSSMLSFRAFVKQMCDSKKPEDEAFLPIIAIEEPEAHLHPNAQKQLYKQMNEMPGIKIISTHSPYVAACAELSELRGMYKAAEKTICGSLPVAELTPEKKKKIRKAVLTSNGELLFAKGIVLGEGETEVQALPIFCQQHWGLTPVESGLSFVDAKGCGNYYPFVVLADAFKIPWYIFSDGEAKAQKELKKLLERIYNEDKELAEQKNIFLIPDEKDFEGMLLDDGYKDEIEKAIEQLKGEGYIDKFIRENNHKPKKREKTSKVCESCHQNIFVDIERIYDNEDGRLTALDDIMEKNKAQLGPVLANCIIESGKTLPPLVIKLFDGIKKDICHV

SEQ ID NO: 65165 - protein, 618 aa, Bacteroides fragilis str. B1 (UDC16-1)
MCKIKLSSKQQEIASLKDGAILVRASAGSGKTRVLVERIKMLAGMTKRKVLAITFTNKACEEIRTRLAEVDENLLEHVFVATFHGLCESIIESHIAATRFVTMPQIFADDDRKKILEETITETPSLSQWYRGLNDKERRETLYRALDNISLIKRSVILDDELSKVIKDGQMRNLYLSYREQMDSLNAIDFDDLLLNAYQLLIHNPRIADLYRRSFTYICVDEAQDLNKAQYMVLRAITGSEHKNVMLVGDTKQSIYAFNGSSSKYMDDWFVNDYTPTIYNLNENYRSAKAILDYAQKVVHDDTLDVTLPYTGVCKEYAYDTPCEEAQEVVSGIKSLVGTEIEGYDGKLSYSDIAVLARNKFVLGKIEEQLKSSNLPYHYKTTGAGLEFASTAAKAFDLAMVVRTNPYDRLHLDMLQSIVGVSHCKSLEQVVESISDAFLKEVVQQASLLEDDGSNMYQTIKSVLNTLKASNASEFKSTDEALAVFDEFELLKHHWSSYAKSVTNYSLSAFRNAMSLGQTSVASLDVEGVTLSTVHTMKGQQAVVVFLVGMDEGTFPDYRAIKKGNNSIEMQQEKNNLYVAITRAQRHLYICYPQKRKMPWGDWSPRKKSSLLPKQTIV

SEQ ID NO: 65166 - protein, 608 aa, Bacteroides fragilis str. 1007-1-F #10; identical to SEQ ID NO: 64762

SEQ ID NO: 65167 - protein, 650 aa, Bacteroides fragilis str. 1007-1-F #10; identical to SEQ ID NO: 65151

SEQ ID NO: 65168 - protein, 681 aa, Bacteroides fragilis str. S24L26
MYIKEIKISNFRNFKDASVPFHEGVNVIIGHNNTGKSNLLRAMGLVLGYSDGHRLGTSDLFYETDVVTLQQQSPRIQITLVLHRSEGEALDSTEMVLFSSMMTDPALSEEAELRYEFKLADVQEDNYKTDVANATTAKEIWKIIDHDYIRLYRSSRSGGNQVAGISVNDALGQIDFQFLDAIRDVSHDLYAGYNPLLRDVLNFFIDYSVKNDSTKTEDEIKEQLKTLRDDFVQQSSPLMQTLQNRLQNGKNVFLKYALDTGATFNGAVPDFDGTVTENEMFAVLRMVIKYAVGIEVPATYNGLGYNNLIYMSLLLARMQADSSITYMKRNAKVLSFLAVEECEAHLHPAMQYKFLQFLQDNNANGHVRQIFMTSHSTQIASAVKLDDLICLTSPILGQIHVGYPRVIYKEDNIDDVTSKQYVQRFLDATKADMFFASRLIFVEGIAEELLLPVFARYLNKNLTDEHVLVVNMGGRYFNHFLKLFDTNNPYTINKKIVCLTDIDPCRKKNEPDEDYEACYPYEYNTDTVNYDYKHHADTEVAQYATHPNIRFYRQDVMYGKTLEYDIIRENPDCELLLTNSVSNLKEIKAMMAEQDVNKMMSKMRHSEANTRIKTSIGTSEWTDEEKRKALLASRYLNSVSKGSNALELNVALMANLDKPVADRKEFHVPQYIVDALTWLLS

SEQ ID NO: 65169 - protein, 515 aa, Bacteroides fragilis str. S24L26
MSNSRQLDVVKKVACITYTNVGTDTITSRLDMGNDVVEVCTIHSFLYANVVKPYVHLIAKDFGLKLDDLVVIDDSNFKSEGTAKIVLNRIGKSWLDAKIYLKGLTRAMWRYEKHEYKHYKPDYAQTYYIKGGKRYVGNDWYMEFKRWIWSGGYMSFDDILYFSYILLSRYPNIYKLIKAKYPYIFVDEFQDTIPFVIDLLTQLGNEGVIVGVAGDKAQSIYDFLGATVQQFNNFVVPGMQEYEIRGNKRSTKQIIELLNIIRTDFSQDWLNGTEGMVPELLVGDMLNCYQQSIEKSGTDEIQSLAFQNVLANSMRKKNGMHEVEKILEMDFDSNVERQMVIKAFIKAVEYTRMNDLRNAWHQLDIINRDRTITIVALRRLLDGYKDYKDGSLMDFYNFMVNDLHVKMPKITGKAIKEFYVNHTYADAALGVKYGDSNDKHKTIHKSKGEEYDNVFVVLKEEDDIEFLLSPNLNGNNAHRVYYVATSRAIKRLFINVPTLSAENRIKFEGKPINIP

SEQ ID NO: 65170 - protein, 732 aa, Bacteroides fragilis str. S38L3
MRINHVHIRNFRKLRNCRIDFDENQTIFVGANNSGKTSAMSAIIWFLKGKDRFTTREFTLTNWIKINELADKWLISDEVDPLLLTPNQWDDIVPSLDIWIDVSESEAYQVYKIIPSLTWKKDSVGVRLRFEPKDIKSLYADYKKEVMKVRSLQDSPEYKETKNLKLYPQNMWDFLNHNHNLLAYFNIKYYVLDSEKINHELESEVQVTPDDSLEENPLVDLIRIDSIEAFREFSDPMGKNESDIDTLSKQLQAYYRQNYTDETIIETGDLKLMEELSRANTSYDLKLQKSFSMPIGELSNINYPGFQNPSISIRSNVNIVDSISHDSSVQFSIQGKPELSLPEKYNGLGLRNLISIYLKLIQFREQWTRNSKNEEDVKKSIEPIHLVFIEEPEAHLHAQAQQVFIRKALEALTNAAENNALKENPNLTTQLIVSTHSNHIVNEVDMNCLRYFRRVLDEIIGIPVSKVVNMSRTFGENENDTKKFVTRYIKLTHCDIFFADAAILVEGAAERILMPHFIKREGMDNYYISVMEINGSHAHRFSSLLKKLNILTVIVTDIDAQQEVEEDGKKKKKSSLPQRRQSQTTNNDTIKHWIGKDEIDDLLELPETDKIKDNVHVVYQTGVDVVWIKEKETIYPYTFEDSLIFTNLDLFRGDEKLKKLGTVTTFYNYLHSIKDLKTFHMKIFDKLESSSNVKAEFANTLLYAEQFEALQTPAYIREGLEWLKSYFEFNHK

SEQ ID NO: 65171 - protein, 617 aa, Bacteroides fragilis str. S38L3; identical to SEQ ID NO: 65145

SEQ ID NO: 65172 - protein, 681 aa, Bacteroides fragilis str. S38L3; identical to SEQ ID NO: 63490

SEQ ID NO: 65173 - protein, 553 aa, Bacteroides fragilis str. S38L3; identical to SEQ ID NO: 63491

SEQ ID NO: 65174 - protein, 681 aa, Bacteroides fragilis str. Ds-233; identical to SEQ ID NO: 63490

SEQ ID NO: 65175 - protein, 553 aa, Bacteroides fragilis str. Ds-233; identical to SEQ ID NO: 63491

SEQ ID NO: 65176 - protein, 677 aa, Bacteroides fragilis str. 2-F-2 #4
REFTLTNWIKINELADKWLISDEVDPLLLTPNQWDDIVPSLDIWIDVSESEAYQVYKIIPSLTWKKDSVGVRLRFEPKDIKSLYADYKKEVMKVRSLQDSPEYKETKNLKLYPQNMWDFLNHNHNLLAYFNIKYYVLDSEKINHELESEVQVTPDDSLEENPLVDLIRIDSIEAFREFSDPMGKNESDIDTLSKQLQAYYRQNYTDETIIETGDLKLMEELSRANTSYDLKLQKSFSMPIGELSNINYPGFQNPSISIRSNVNIVDSISHDSSVQFSIQGKPELSLPEKYNGLGLRNLISIYLKLIQFREQWTRNSKNEEDVKKSIEPIHLVFIEEPEAHLHAQAQQVFIRKALEALTNAAENNALKENSNLTTQLIVSTHSNHIVNEVDMNCLRYFRRVLDEIIGIPVSKVVNMSRTFGENENDTKKFVTRYIKLTHCDIFFADAAILVEGAAERILMPHFIKREGMDNYYISVMEINGSHAHRFSSLLKKLNILTVIVTDIDAQQEVEEDGKKKKKSSLPQRRQSQTTNNDTIKHWIGKDEIDDLLELPETDKIKDNVHVVYQTGVDVVWIKEKETIYPYTFEDSLIFTNLDLFRGDEKLKKLGTVTTFYNYLHSIKDLKTFHMKIFDKLESSSNVKAEFANTLLYAEQFEALQTPAYIREGLEWLKSYFEFNHK

SEQ ID NO: 65177 - protein, 617 aa, Bacteroides fragilis str. 2-F-2 #4; identical to SEQ ID NO: 65145

SEQ ID NO: 65178 - protein, 378 aa, Bacteroides fragilis str. 3719 A10
MLLQKIYIKGYRNFKEVTVNLNKNSLVIGANDVGKTNLIHAMRLLLDKGFSDYDFELNDSDFYAYEDTQEVIIRIYFTDVTDECVIARMPGKYSDAGEMVIQYKAAKEKGKVNYHFYCGKSDNETDLTEIEGPWYRRFLNLKYISSRRDFWGYINKSKNMLLNQAKDNRESEIIEQDDALYDDIAEKLQYVDKKIPELSYVKNATDRLNEELDKLSIHNREQRIVFDTSTTEIDRVINSVSLASKYGDKSMIIGGEGRINQIYLSLWATQNENSELANEVSIICIEEPEAYLHPHQQRGLAAYLSKTLNGQIILTSHSPFIVSEFSPNSIIRLYKKEDNKTIVASDGCSKIIEDGIDGLGYRMSVIPAEAFLLTMSFL

SEQ ID NO: 65179 - protein, 547 aa, Bacteroides fragilis str. 3719 A10
MEPTPIQRNIIQEEGNTVVLAMPGSGKTFVLSEKIRRILESDVLKDYQGVIAISYTRKASGHLKRKTLQNGTWEKNSFFGTIDSFCLTQIILPFGHYVIGYPKEEVVPITENDLEKDKMVDFEWINKIHPDYEEINEAVWENLYELFKEGKVLVSSLELVALHIIKNCPACRAHLKARFKYVFIDEFQDADTYTNGIFLELIGLGLIGNAVGDVNQSIFGFAHKVSDYLVALETMEGFTSYKLAENFRCSIPIVNYSNRLLDANCQLLECEGEMGVEHIAVNGDEEIVAEYLDNTIINDCKKWEVTDFSQVAILVRSTKMQEMIDGYLDIPHRVVISTPLDDDLNPRSHLFAQLLQYYFDEGMPFMSVVDYYMDFALLSSCARKRLLGIRDEIRSVNKDDMIDALPRLFKNIANILLPKYQEGSSIKHLNSVLNSKDWIDSYRSFSANEVVIMTLHKSKGLEFDIVYHLNMNEFEIPFKQYKNGVACYPNEAQDLDLHYVGVTRAKKLCVLVSNSTRHNSKGEAKKGEPSIFLSRNGVEALRNNYYY

SEQ ID NO: 65180 - protein, 608 aa, Bacteroides fragilis str. 1007-1-F #9; identical to SEQ ID NO: 64762

SEQ ID NO: 65181 - protein, 650 aa, Bacteroides fragilis str. 1007-1-F #9; identical to SEQ ID NO: 65151

SEQ ID NO: 65182 - protein, 593 aa, Bacteroides fragilis str. 20793-3; identical to SEQ ID NO: 64556

SEQ ID NO: 65183 - protein, 593 aa, Bacteroides fragilis str. 20793-3; identical to SEQ ID NO: 64557

SEQ ID NO: 65184 - protein, 734 aa, Bacteroides fragilis str. 3986 N(B)22; identical to SEQ ID NO: 65156

SEQ ID NO: 65185 - protein, 632 aa, Bacteroides fragilis str. 3986 N(B)22; identical to SEQ ID NO: 63697

SEQ ID NO: 65186 - protein, 734 aa, Bacteroides fragilis str. 3986 T(B)13; identical to SEQ ID NO: 65156

SEQ ID NO: 65187 - protein, 632 aa, Bacteroides fragilis str. 3986 T(B)13; identical to SEQ ID NO: 63697

SEQ ID NO: 65188 - protein, 691 aa, Bacteroides fragilis str. A7 (UDC12-2)
MYISKVSLVNYRNFENSFFLFNKGINTIIGENASGKTNLFRAIRLILDDNLLSSAYKLNENDFNRNLINWKGRWIIISLEFSEISNEEAIQALFVYGSGVIADDKVKKATYNLFFRPKPEIRKQLSELKKGDHEGLNSILDKITINDYETFFTGKSTVDFNDKNVQCELMGDFENVIFNYEIDESKFGGRIPHQLSISKEVAFTFIKALRDVVSDFQDNKKNPLLTLLKSKSEELNDKDSELISNKVKDLNETIEDLNDIKEITNNISETIKEAVGTTYSPSSLSIKSNLPNEAEKLFHALKLFIGEPGEDYEGSIHELSLGGANLIFLTLKLLEYKYRKGKDRIANFLLIEEPEAHIHTHIQKALFDKIEYEDTQIIYSTHSTHISEVSNISNMNIINRFKNYSEVYQPFIGLNDEEIMHIERFLDAIRCNILFAKSVILVEGDAEEILIPVMVKNTLGVSLDELGISLINVRSTGFENLAQLFHNQRIKKRCAIITDLDKSITGEDTEASKRGLSRKAKLDSIKNANEWICPFYAPHTFEVEFLGNGNKDIVLSTVKDVYKDKDTIELSEREINSSDIKEYGKRILTMANYKGKGWYAILLSNYITPSVCIPKYILDAIVFAKSKFSNELIVQMLEYVLDTYDENEEIDNLKNELKSYKEGRTSFDYIKKSLEEVLNDNEPILYILNQL

SEQ ID NO: 65189 - protein, 591 aa, Bacteroides fragilis str. A7 (UDC12-2)
MFVWGKNDLNPEQEKAIYNENSILLIACPGSGKTRTITYKIAYELSKLESNKQYIVAITYTNRAADEIKERIELLGVDTEQLWIGTIHSFCVEWILKPYHMYIEELRFGYDIINTNDTENYLVSLCASYSTPKKKITYWDCLCYCFTSEGLKINCTKPTIKETVELIIYDYYQNLKEKHEIDYELILYYSYCLLKENQSICKTLSNIFPYILIDEYQDTKELQYMILGAILKTGKENKAFIVGDPNQSIYGNLGGFPMDKAQLESVTGLYYDELSLSNNYRSSSLLVSYFDYFKTYANKIEATGKTKDYQSVISYNKTISIEDLENEIVRIIQKNVDEYHISPNEICILAPQWIHLSGLTRNLMARLPQYSFDGPGMAPFARDIDNFWYKLSRIILTDSTPGLYIRRLRWASEIVTNLISIGVTNIDLSAKQILYICNSILINEQDGLEYLKKFFNAFLDRVNIDINQNKYLKMHYDAFFDSSKKRIERLKKEGAEFITNIDTFRKVFQQKKGITISTNHGVKGAEFDTVIAFGLLDGYVPHSSESNKEESAKRILYVIASRARKNLYLISEQGRNKTPTPILSKYGYKYK

SEQ ID NO: 65190 - protein, 681 aa, Bacteroides fragilis str. S24L15; identical to SEQ ID NO: 65168

SEQ ID NO: 65191 - protein, 515 aa, Bacteroides fragilis str. S24L15; identical to SEQ ID NO: 65169

SEQ ID NO: 65192 - protein, 610 aa, Bacteroides fragilis str. S36L5
MQKILINEIRIDGFRGLKDFKMSLSETTVLTGMNNVGKTSVLKALQLLFGNSSFLSTEDLHIDKNGKSNYIIVDAKIVAIDNDGKRIANFSDVWEIAFGADNIKMDAEEHAYVPLRVKYTFQTLQNSFNRDMQILNEWDSAGIAWQNLKGKKSTVKGDYFQFHYLDAKRDIQDDLKARTSYLGKMLGDVVSNYDPKDVAELEQKISSLNAEAIEKSDVLRNIQESLKGIDATMDSSGKVYVSPFAKKLRDLNKSLTIHYGTEDSSFTMDYHGMGTRSWSSMLSFRAFVKQMCDSKNPEDEAFLPIIAIEEPEAHLHPNAQKQLYKQMNEMPGIKIISTHSPYVAACAELSELRGMYKAAENTVCGSLPVTELTSEEQKKIRQAVLTSNGELLFAKAIVLGEGETEVQALPIFCQQHWGLTPVESGLSFVDAKGCGNYYPFVALAEAFQIPWYIFSDGEKDTKKGLKKLLKRTYNEDKELAEQNNIFIISPEKDFEGMLLDDGYKDEIEKAIEQLKGEGYIDEFIRKFNHKPKGREQTPNICKSCNQHIFVDIERIYDGEDGRLTALDDIMEKNKAQLGPVLANCIIESEKPLPPLVVKLFDGIKKDICHV

SEQ ID NO: 65193 - protein, 614 aa, Bacteroides fragilis str. S36L5; identical to SEQ ID NO: 65149

SEQ ID NO: 65194 - protein, 610 aa, Bacteroides fragilis str. S36L11; identical to SEQ ID NO: 65192

SEQ ID NO: 65195 - protein, 614 aa, Bacteroides fragilis str. S36L11; identical to SEQ ID NO: 65149

SEQ ID NO: 65196 - protein, 608 aa, Bacteroides fragilis str. 1007-1-F #7; identical to SEQ ID NO: 64762

SEQ ID NO: 65197 - protein, 650 aa, Bacteroides fragilis str. 1007-1-F #7; identical to SEQ ID NO: 65151

SEQ ID NO: 65198 - protein, 670 aa, Bacteroides fragilis str. 3976T8
MVVHFKDGVNVLIGENDSGKTAIIDAIRYVLKTQSGEFIQFDDKDFYQDYEGQRKDEFKIECVFDGLNGQDSGLFWEWLSWNNDKTKYLLKVWLYVKRKDNVIMPTFSAGFDGLAERMDSEARELLKVVYFKPLRDALTDMTHGYKSRLAQILGSHELFKTQKDAEGNNAKHKLETDYEHLKEDIENYFRIGGNGESITSEINNFLRDHFLLNGDPRNAEIKLTGGELTEILRLLDLIMEGNKSGLGTLNLLCIAAEMLLFNNQKKGLKLALVEELEAHLHPQYQLRLIEYIASQQKNEQFILSTHSITLASKIKIANLIVLKGKDALPMSSEYTLMRPADYKFLERFLDATKANLFFAKGLIMVEGDAENLLIPAIAQLIGKNLYQYGVSVVNVGSTAYKRYVSIFKRKDGKSFGMPIAVVSDLDVRALEYYDDNCNDRKTPKYWLIETLRPELEEISQDVDYDAMPTVFRSKSAFEKEVRLHKTETFGPIVETINRMKAALTEDNKTVLNEEMLVQIRKEKTKQLENDINADRIKIFLPKAWTLEYEIAGSGLYRLLATAIKAAQKEVTDPEHEMTDEALMGLWSEVKTDYPDGHVPTKEEVYKIFAPLNEGIISKAIAAQYLAGMLAGELPPVSNGAVDRHEVKRIVETDEKLKYLVDAIKHVTEQF

SEQ ID NO: 65199 - protein, 716 aa, Bacteroides fragilis str. 3976T8
MPFATDEEIKIAHDILLKGKKPFDTHRIDIIKENSSCYVQASPGSGKTTALLAKLMILANKMPLYSGKGVCVLTHTNVAIDEIKAKLGQKANVLFQYPNFFGTIQTFLHKYITAAALHYFYGSQIAYVDDDVANAVLLKKYGRLTYENKLKGLIYARTISKEHLIEVDEIEALGGMDILTSAKVIKRKGKRVYKYDFQLGKYDWNKIPQNIKALIRTKRDRIIDSQGKDIILSFRIDWLNNKIITDFGSIGMCTEAGAEYVKLKEEMFTEGILSFDDAYDLAFRYIQEKDLNFNSFSDKRFQYLFVDEVQDCDNQQVELIKKIFADDKVVIQRFGDYCQAIYEGEENDGVENNELKGENVLYIHDSNRFGENIAKPLRTLCMENNLQLRGNEEVPSVKPIIITYENPLSVLPRYVELLNSTSIPAMNNLSVLEIANKERQKDPLHRVNVKACGWVGKKGANDRKRFIESYFPAFERKNGKQRMEGNSFDDFILKNPHGTVKDYAASIIQGILKLLDLCDIKNGSRRHTRTSLLEILMANNIEQKENFLKEVMNWSLLVVQSHSDNDIHNIIEAIYQYVVTNLLPLFGKGITPEASNFFNATNGGFQNGQVVEPGNIYNENGIDVEVATVHAVKGETHASTLYLETSYYGCHESERLSEQFKGIAYTGEDERTLRSLRVVYVGMSRPRYMLCVAIQKNRFDKMDCSELREIWDVVDA

SEQ ID NO: 65200 - protein, 691 aa, Bacteroides fragilis str. Korea 419; identical to SEQ ID NO: 62694

SEQ ID NO: 65201 - protein, 592 aa, Bacteroides fragilis str. Korea 419; identical to SEQ ID NO: 62695

SEQ ID NO: 65202 - protein, 608 aa, Bacteroides fragilis str. 1007-1-F #3; identical to SEQ ID NO: 64762

SEQ ID NO: 65203 - protein, 650 aa, Bacteroides fragilis str. 1007-1-F #3; identical to SEQ ID NO: 65151

SEQ ID NO: 65204 - protein, 681 aa, Bacteroides fragilis str. S24L34; identical to SEQ ID NO: 65168

SEQ ID NO: 65205 - protein, 515 aa, Bacteroides fragilis str. S24L34; identical to SEQ ID NO: 65169

SEQ ID NO: 65206 - protein, 610 aa, Bacteroides fragilis str. S36L12; identical to SEQ ID NO: 65148

SEQ ID NO: 65207 - protein, 614 aa, Bacteroides fragilis str. S36L12; identical to SEQ ID NO: 65149

SEQ ID NO: 65208 - protein, 732 aa, Bacteroides fragilis str. S38L5; identical to SEQ ID NO: 65170

SEQ ID NO: 65209 - protein, 617 aa, Bacteroides fragilis str. S38L5; identical to SEQ ID NO: 65145

SEQ ID NO: 65210 - protein, 681 aa, Bacteroides fragilis str. S38L5; identical to SEQ ID NO: 63490

SEQ ID NO: 65211 - protein, 553 aa, Bacteroides fragilis str. S38L5; identical to SEQ ID NO: 63491

SEQ ID NO: 65212 - protein, 594 aa, Escherichia coli; identical to SEQ ID NO: 64492

SEQ ID NO: 65213 - protein, 605 aa, Escherichia coli; identical to SEQ ID NO: 64493

SEQ ID NO: 65214 - protein, 608 aa, Bacteroides fragilis str. 1007-1-F #5; identical to SEQ ID NO: 64762

SEQ ID NO: 65215 - protein, 650 aa, Bacteroides fragilis str. 1007-1-F #5; identical to SEQ ID NO: 65151

SEQ ID NO: 65216 - protein, 608 aa, Bacteroides fragilis str. 1007-1-F #6; identical to SEQ ID NO: 64762

SEQ ID NO: 65217 - protein, 650 aa, Bacteroides fragilis str. 1007-1-F #6; identical to SEQ ID NO: 65151

SEQ ID NO: 65218 - protein, 734 aa, Bacteroides fragilis str. 3986 N3; identical to SEQ ID NO: 65156

SEQ ID NO: 65219 - protein, 632 aa, Bacteroides fragilis str. 3986 N3; identical to SEQ ID NO: 63697

SEQ ID NO: 65220 - protein, 660 aa, Escherichia coli 1-110-08_S3_C1
MKITQMEIKGFKSFDNVGQTININSFTSLIGGNGTGKTAVLLALTRMFGVKSSDRIVQVDDFYVPPGDEIDTQDERELSVRVKFEFADLQDGEDDSVADFFKHLVSNEADQIPYCIAKLKAKWTKTNLAEGDIDSDLVWEIGEYEKNITAYERSKIHVHYVPAYRDPAQQLKQTAGTIMHRLINAVEWSEQMSSTVDEVAESIGNQFQEEIGVQTITSSLGRNWKTLFSGGYFEQLKIQPVMNGIEDVLKHIDTVFMPTPVTQPLPTERLSDGMKSLFYLSLVKSAFDIEDEIINSGENELSISVEALDPPNLTIILIEEPENHLSPQYLGRIVKLCEDISENDRAQVVLTTHAPSLLNRVEPENIRYFRLHDNKNTVVKPILLPSEDEDDGDNVDTFTYVKEAVKAYPEIYFAKVVILGEGDSEEIVIPKIAQVNGIELDTSLITFAPLGGRYVNHFWKLLNELSIPHVTLLDYDFKRGGGGGWGRIKYAVKQLISIGADKNELLSITSGTLSDEELEKMHTWDEDQDNESAWINCLKDYNVYFSYPYDLDWLMLNKFFEDYKTFVPKNGGPRLPKDDDHEYDNKVKSAIAAVLKKEEKDIDISEFDDYEKYFWYRYLFLGRGKPLSHNYVLSKMEDDKLRDDSPEVLNEIIETVRGLL

SEQ ID NO: 65221 - protein, 615 aa, Escherichia coli 1-110-08_S3_C1
MPTIKDADWVLKDIQEVEDEAMRVIRNSTGHNLVLAGPGAGKTELLAQKACFLIETGKCSNKKIIALSFKKDAAKNLQDRVNSRLDTKYRHKFESTTFDAFCKSIVDRFKSTIPESYRPSNDYEIIFPNNNDLVEEIKREAVGFEGLTSEELNKLQPYNFEENYIVTPYNKALEHSVDGRIRRFVWLHLLKPKSRISFKMINFLANYIISRNQYLSNAINSTYDYAFIDEFQDTTYRQYEIFKSIFLGKKIKITAVGDTKQRIMGWAGAMHNAFDVFKKDFGIEQSNELVSNRRSLKNLINYQRMMEAFMNHADIKPDMMLIENEGSAKLLQFDESSIEGAYIALCIQQWIAEGVNERDICILLRNPAKQYTDDIISALQYLKIQCRLENEYQDLLNEAVVQLLLQMLMFVCNRKSIESWATTMELLCNIRGVSKRGDVTRLEKELSQFIKSHRVIKGEIVDYLYSLLSIFGVDKIKSYFPQYMSGNVLEYSIELLSRHLDKLDVKENTSEAIDLLLGNKTIPLMTIHKSKGLEFRKVIVVGLEPGAYFGKEEEQIENQKTVFVAFSRAIEEVLMTRCKIRNNSYGRGFKQNCNDIPLITNMITYCGIEAEDYQG

SEQ ID NO: 65222 - protein, 660 aa, Escherichia coli 1-110-08_S3_C2; identical to SEQ ID NO: 65220

SEQ ID NO: 65223 - protein, 615 aa, Escherichia coli 1-110-08_S3_C2
MPTIKDADWVLKDIQEVEDEAMRVIRNSTGHNLVLAGPGAGKTELLAQKACFLIETGKCSNKKIIALSFKKDAAKNLQDRVNSRLDTKYRHKFESTTFDAFCKSIVDRFKSTIPESYRPSNDYEIIFPNNNDLVEEIKREAVGFEGLTSEELNKLQPYNFEENYIVTPYNKALEHSVDGRIRRFVWLHLLKPKSRISFKMINFLANYIISRNQYLSNAINSTYDYAFIDEFQDTTYRQYEIFKSIFLGKKIKITAVGDTKQRIMGWAGAMHNAFDVFKKDFGIEQSNELVSNRRSLKNLINYQRMMEAFMNHADIKPDMMLIENEGSAKLLQFDESSIEGAYIALCIQQWIAEGVNERDICILLRNPAKQYTDDIISALQYLKIQCRLENEYQDLLNEAVVQLLLQMLMFVCNRKSIESWATTMELLCNIRGVSKRGDVTRLEKELSQFIKSHRVIKGEIVDYLYSLLSIFGVDKIKSYFPQYMSGNVLEYSIELLSRHLDKLDVKENTSEAIDLLLGNKTIPLMTIHKSKGLEFRKVIVVGLEPGAYFGKEEEQIENQKTVFVAFSRAIEEVLMTRCKIRNNSYGRSFKQNCNDIPLITNMITYCGIEAEDYQG

SEQ ID NO: 65224 - protein, 660 aa, Escherichia coli 1-110-08_S3_C3; identical to SEQ ID NO: 65220

SEQ ID NO: 65225 - protein, 615 aa, Escherichia coli 1-110-08_S3_C3
MPTIKDADWVLKDIQEVEDEAMRVIRNSTGHNLVLAGPGAGKTELLAQKACFLIETGKCSNKKIIALSFKKDAAKNLQDRVNSRLDTKYRHKFESTTFDAFCKSIVDRFKSTIPESYRPSNDYEIIFPNNNDLVEEIKREAVGFEGLTSEELNKLQPYNFEENYIVTPYNKALEHSVDGRIRRFVWLHLLKPKSRISFKMINFLANYIISRNQYLSNAINSTYDYAFIDEFQDTTYRQYEIFKSIFLGKKIKITAVGDTKQRIMGWAGAMHNAFDVFKKDFGIEQSNELVSNRRSLKNLINYQRMMEAFMNHADIKPDMMLIENEGSAKLLQFDESSIEGAYIALCIQQWIAEGVNERDICILLRNPAKQYTDDIISALQYLKIQCRLENEYQDLLNEAVVQLLLQMLMFVCNRKSIESWATTMELLCNIRGVSKRGDVTRLEKELSQFIKSHRVIKGEIVDYLYSLLSIFGVDKIKSYFPQYMSGNVLEYSIELLSRHLDKLDVKENTSEAIDLLLGNKTIPLMTIHKSKGLEFRKVIVVGLEPGAYFGKEEEQIENQKTVFVAFSRAIEEVLMTRCKIRNNSYGRAFKQNCNDIPLITNMITYCGIEAEDYQG

SEQ ID NO: 65226 - protein, 777 aa, Pseudomonas aeruginosa PA99
MHLKKLAVRNFRRLRNVVIDLASDISIFVGSNNSGKTSVGHALQLFTGSGRFNIHDFSAELWTDIVAFGEGEGEARLPTMEIDVWFEIGPDDVHRVIDLLPSLAWEGKLVGMRVAYVPSNPAATHARYVEVRQRVLDAVAKGEDGAPIFDPSPRNLREFLRDRLHDEYELRYFVLDPARFDAKMVAEDGYDPATLTGRDRSGREILNGLLHIDFLNAQRHLSDSPGGSRAEDLSRVLSRFYGRNLEQKGEDIEALRALAASEVSLNEHLERVFEPTLKSLSKLGYPGLSNPRMMIRSALDPAQIMSGRDGAIVHYALGADDGNPDPPTLPDRYNGLGFKNLIFMVVELLDLHAQWLAIEENRPPVHLIFIEEPEAHLHAQLQQAFIRKVMDILTLKGEDRTHYTSQVVVTTHSTHILYERGFRPIRYFRRSRAQNVSTSDVLNLSVFYDSTDPDIRSFLERYLKLAHCDLFFADGAVLVEGNVERLLLPQMIANAAPRLQSTYLTVLEIGGAFGYRFKALIEFLGLTTLIITDLDSVFGPLAKDGEGAAPAGQPEAAEPAAENAQAASADADADAEDVDDDEEDLPAAAEKPGKACIASHPGAATSNQTLLQWLPKCDTVAALWEATAEQKIQARTEDNDALVRVAYQCRTDVTWGGETLALAGRTLEEAFALENLQWCQDKNRKPLQLRIAKADEKNLTTLAERIHKRVQAKSFSKTDFALALLAEDPSSWSVPTYITEGLSWLETEIAPPEPDEDQPHENAPQGAPAAAGDEVAA

SEQ ID NO: 65227 - protein, 625 aa, Pseudomonas aeruginosa PA99
MTSRIGSPDTQADLDVRACLDRTPPRSFVMVAGAGSGKTTSLIKAIAHLAETRGPALRRAGQQIACITYTEVAVGEISADVGASPLFHISTIHSFLWSVIRPFHSDIAAWVATRIDEKIAERRAHYDKPRTQAKTKARLEQEIADLEAELAAIGEVEKFVYGTGSSYAEGILGHDDILKLTPACVAVHPLLRQLVAKRFPYIFVDESQDTNPEVVEALRHIAGEHPGLCVGFFGDPMQKIYMSGAGAVPLNDGWAEITKPENFRCPTSVLGVINAIRAPGDGLEQVRGRKITIDGIEQPVAGTSNLFILPADAERSARLAAIRQWLAAETGDGLWLSDVREGDVRLLVLVHRMAANRLGFPNLYAALNDRAPMSLSEGLSDGTAWPLRPLVQHILPLVVAARAGDRFTVISTLRSECPRLEPARLRGQATAPVLTALQQALDGLVGLLAAGSQATIRDVLTHVRDNELLHLDDRFAMHLVAEPVDDGSSGFENVQAYLACSVDELWAYRRYFTEESPFATHHGVKGAQFERVLVVIDDEEAGFRQYSYGKYLGYVPLSDKDEANIAAGEESVLDRTRRLFYVCCSRAMKDLAVVVFVPDVATARTAIVAQNLFPEAVIRGAEHLG

SEQ ID NO: 65228 - protein, 683 aa, Paenibacillus sabinae T27
MRLNKLRISNFRSYGPTETVIDFEDITTFIGANSSGKSAALQALTKLFGETNADRALEKSDFYVSHDEVLEDLERRELYIEANFSFPEIENDEGETHYAIPTYFDNFVVENTGEPPFLRIRLQASWEQSNTPDGIIESKVSYVSLSEDAEEVATKIPPSELSQIKIIYVPAIRNPSTLLRNATGTLLWRVLKSINWSTETKENIKDQLKRAEESLFEEAGLERVRDSLKDHWKKYHKDTRYSEANIRFNSTDLDQLIKKFEVDFMPSITQKAYSIDSLGDGLRSLFYLSLVDSFLEIEQQAMENSEDEDAPQFNIQIPALTILAIEEPENHVSPHLLGNIIVNLNRIASKNNSQVILTSHTPAIVKRVLPESIRYFNISVDEVVTKVKKIVLPRLQGSAENEEAYKYVKEAVRAYPEIYFSKLVILGEGDSEEIVIPKAIELETEDHLDSISVSVVPLGGRHVNHFWKLLNELEIPYVTLLDLDKERNGGGWGRIKYALSQLIKIGVDKSELLSLMGGSILSDEDLNDMHTWDESYVDNQMSWLQRLESYDIYFSSPLDLDFMMLEAFPDAYKRILRVNEGPRIDKVGKVLEIENDEPELPEYLERVSNATKHALKEGGSSGDTYTIEQKKLMVWYDYFFLQRGKPVTHRLAILNITDELFEERLPAPLKRLIASVKHKISGE

SEQ ID NO: 65229 - protein, 625 aa, Paenibacillus sabinae T27
MKIIDKNRWEPADGLMLEPAALQVVKSEDNALIIAGPGAGKTELLAQRACYLLETSTCKVPRKILAISFKRDAAKNLAERVEKRCGTELSKRFQSMTYDAFAKSLVDRFYLGIHEDYRPDSVYDIAVADRTQNDIRTAYEHAGFIPPAGMRPGDINNLLEKEIVRHSLPLPLDNKYPTRAAWSLLLKGEVTSTARLSFAMITRLATYLLVSNPQLRKALQLTYSHVFLDEFQDTTNIQYEFVKACFHNSNSVLTAVGDGKQRIMVWAGAMREIFPTFQSDFGATTYRLVMNHRSAPRLIEIQKMFFSRFNEQPISIQTNPKWQASDGRAYLHLFENHIQEAQAIGGIVQSYLADGSHKPNDICILVKQKIDVYCSEMITEFNKIGIQARNEGVYQDFLKEDFISLCIHTMIIAIRRNAGSWTYCRNIFLDLKNMDETSSKIHESQRELSDFIKKLKSDLRSISNENDLGNILKEICDFYSIDALKAYFPQYLRSNYIEKLRLQLAKYLWEEYIKAGSLDIAIDNLLGKNTVPIMTIHKSKGLEYKTIIFLGLEDAAFYKFADQREEHTATFFVALSRAKNNLHFTFSKVRPIGLYRDDQDRKIIMDFYHALRDSGVVEPVVHTIM

SEQ ID NO: 65230 - protein, 713 aa, Klebsiella quasipneumoniae
MHISELTLINYRNFKQSKFFFTKAINTVIGENGTGKSNLFRAIRLMLDDEMLFRAYKLDENDFSHELGDWKGHWIIISLKFSDISHDESVQSLFIHESGDVMNDEGEYIQSATYNLIFRPNISKRSELAEIPHGDFIELERVRSEIKISDYEVIFTGRSYADFYDKEIYKKIVGDFDKCIFPDKIDVKDVGWNLGRQISLSKDVSFTFIKALRDVVSDFSGSKRNPLLELLELKSESLNDEDYEKIIDDVISLNSEIELLPDVIQVSEGIHSTIKSTVGEAFSPTKLIIKSKLPEEPKELLKSLTLSVSEGSEYFDGSISDMSLGGANLLFLTLKILKYKYLINKGKVANFILIEEPEAHLHTHIQKALFKNLNFDNTQIIYSTHSTQISESSKISRVNIISKKEKANDVDVCQPSTGLTPQEISKLERYLDAKRGNLLFAKKVVLVEGDAEEIMIPAMFFKHFGISLDELGVTIVNVGSTGFKNIASIFHESRLRKRCAIITDLDKSIYSSIKKTDGKILHAKKRKAERSEKLGKERKKILDDFCKGNDYVKAFFAEQTFEVEFINFFQNETYLKSVVSEVYSNENKILTVNKDLSSPSIEICGDRVLSVAKYMGKGWLALMLADKIDHNVVIPPYILDALSFSIGKFNRVILISVLKYKRSKLGAYETKDIAPGIDEILDKLNGKELLQRQEIRNLISKVFGIDDALVRMI

SEQ ID NO: 65231 - protein, 480 aa, Klebsiella quasipneumoniae
MNELTLKGFLSDEQIKSVLHEGNAVVMACPGSGKTRTLSYKIAYELSKGKVNRFIIALTYTNSAADEIKKRIMELGVSIDNLWIGTLHSFCLKWIIKPYSALCDETRYGFKIIDPHDSEDLKLQLCSKYSRDYFKTDFGWCEYGLREKDKHGKEVVEKYYECLRDSGFVDFEQIVYLSYKVVSNNHFVAKNLSNIFEVVMVDEYQDTQVLQYELLFSLLKVKRNSCRLFFVGDPNQAIFNSMGGVALDFDLFSSRTGVKFDLLQLKDNYRSSQQIVDYFTNFRTVTGEAFEACGEFRNYKSSITFDNSCLMEDLDSNISKFIAEAIVEGISVNEICVIAPWWYHLSEITRRLMAIMPDVAFNGPGITPISHNRESLWYKFAKIALISPSPYNYRHRISTAGEIFEQLIDAGFFIDLKLCSPKLFLKHCNAVKVNEIGGVEYLSAFFEKACLYFDFDVLSSNEFADSYDAFFLQLKKEKKN

SEQ ID NO: 65232 - protein, 250 aa, Acidomonas methanolica NBRC 104435
MLAGFSGQKIITTHSGDLLAAVPLKALRRLRRVDGDVKAFQIADGAIDELELKRLDHHVRRHRGGFLFAKVWILVEGETDETVFQECARILGHDLFGEGICCFKFVELGVAPFIRLADQLGISWIVVADGDAAGGKYVATARGLLNGRNVDEHIVQLPTYDIETLLCLHGYGHLYAASVSPQKLAANPNPHTHGTEQYWEHVVNKLQPEKGKPTRILPVIDALEDAGPPAVPQVIKSVIDQALIAAKEGA

SEQ ID NO: 65233 - protein, 637 aa, Acidomonas methanolica NBRC 104435
MMVDLSTLNDRQLEAVRWNGGPLLVLAGPGSGKTTVLTKRIACLLEQSSSDHFRILALTFTNKAASEMRNRIEAFVPGSGNRVLLTTFHSFAGDLLRQHGHLIGLRPDFTILAQDGERIAVLDDAISRVTDVDVSQYSGERILPLIGRITENDVSPDVLQNVLTSLPEDRRDAIGLIYQQYRRCLIATNSLDFPSLIGEALKLVRDNPAVCKQVKRIYKYVCVDEFQDTNLSQYAFMKLLVGDNDRNLFVVADDDQIIYQWNGASPERLLGLRNDFGMSVVQLPANYRCPPAVIDLANNLIAHNVSRSTNKDRLLALKTGATDQAIRVFRFSDFDDELAWVASDIASKPEVEKARCVVLARTRKALEKAVEKLAAKGVSAYLAMRKDEFVSAPLRWLHAALRLANSPQDREQIQRLTKAFYILEGLQIDAAAVAANAQAFEGSSLRAFVDLALKHDNLSDATRTYIEHSLSPLIDRLDFRTFCKGSFPWFDLVQNIAPDMEGHFADYADERSTWHSLVDEIEQQFGATATTLNVLLQELNMRSKTPPPPKGAVPCFTIHASKGMEFGHVYLIAMVEDQLPSWAAVKKGPQSKEMQEERRNCFVAITRTEESLTMTFSDRMLGWNKARSRFLTEMGVA

SEQ ID NO: 65234 - protein, 607 aa, Escherichia coli O15:H18 str. K1516; identical to SEQ ID NO: 62590

SEQ ID NO: 65235 - protein, 630 aa, Escherichia coli O15:H18 str. K1516; identical to SEQ ID NO: 62591

SEQ ID NO: 65236 - protein, 597 aa, Acinetobacter baumannii R1B; identical to SEQ ID NO: 62720

SEQ ID NO: 65237 - protein, 593 aa, Acinetobacter baumannii R1B; identical to SEQ ID NO: 62631

SEQ ID NO: 65238 - protein, 654 aa, Draconibacterium orientale
MYINKIIVQNFRLLKNSILDLENQEDKDLSILIGRNNSGKTSFIMLFDKFLKKSSSFNFDDFPVSLRQSIFEINEETDINDISIRLIIEITYTDKDNLENLSEFILDLNPSENKVHILFECSIDKKRLLKEIESVKPESRKRFIKKNLCNYINTNIYTFDTYDNLKAENRNKLIEKDKKSIDNLINYQVIHAKRSVASSEAGESSKKVLSNLATKYYDKKTENQLSSDDLDVINTSLLEMDKTLEGKYEEFFDNFLNKSKDFLAMTELRVVSDLESKEIISNHSKIVYGSEDESLPEHLNGLGYMNILYLLLQLEIKKEFLIEGNKDINLLFVEEPEAHTHPQMQTVFIEKVRTILEDIPALQTFITTHSSHIVKNSNFKDIRYFYNDLGNRIVTIKNFYTELQKKYEKEEDEFKFLNQYLSIASAELFFAEKIIFIEGLTEKLLLPYFIQQYDKTNTDEVLLSSQNISLLEIGANAKAFSHFIDFLGIKALIITDIDTTKKNANGRYSAEPVKNATHISNATIKHFYKAPDFSQIKEWSDWFINLKEDKHHKEDSNIKLSFQLEEKGYHGRSFEESFISINVDNLKANISEVKGLKDDADESLNSIDDIDELTKSILEKKSDFASSLLWLALTKDVDWNMPSYIKKGLVWIAK

SEQ ID NO: 65239 - protein, 655 aa, Draconibacterium orientale
MDSKITALEQVFNCIREEQNFVLQGGAGSGKTESLKRVIEHISKNYPGKKIACITHTNLAVDEIKSRVDDDYTICTIHSFLNDLIKDYKKNLHEVIGEIFKLKKVDNGEHKDYKKCYEKYASTLHSVLKETVPKVVGKREYDKEPDRFYNELNANIEKLNSEIEVLIKEIDFNEVRYNETRFDSFRDLSFGHDSLLVMASLLFDNYSLLTKILQDKYDFIFVDEYQDTNKAIVDIFLNKIPSDSKTIIGLFGDSMQGIYDDGIGDVEEYIANGLLKKVEKEDNYRCSEQVIEFINQLRDDGLKQEVAFKTKNGEVETKIDRQGAVKLYYSIYDGSRTASGNPQNKEEYLQHLNSVIKHVDDNNYGYKKLMLTNKSIASEVGFENLYNVFNDRYVDVKEEIEKDLTRLQLLDLAELSKAYSTKDYNFIITELKKAGFLITTIEDKKKISSILDKIVASEHGAIELLELAFENRLLKKSDSYSSYIDRKDSFLTDIKDDEFYPTFKTYYEGGQNTFTKMAKEVDGLNEEVFKEFQRLYKKERFYNDLFSSKIKFKEILNYFSYLNEETNYITMHKTKGSGIENVMVVLDEYFWYQKYKFKTIFDESEIDTTKRLYNQKLFYVACSRAIDNLICIRLIAPDEKDDLLGYFSNYEEIKI

SEQ ID NO: 65240 - protein, 798 aa, Pseudomonas aeruginosa PA96; identical to SEQ ID NO: 64594

SEQ ID NO: 65241 - protein, 643 aa, Pseudomonas aeruginosa PA96; identical to SEQ ID NO: 64595

SEQ ID NO: 65242 - protein, 712 aa, Pseudomonas aeruginosa BWH036; identical to SEQ ID NO: 64606

SEQ ID NO: 65243 - protein, 593 aa, Pseudomonas aeruginosa BWH036; identical to SEQ ID NO: 64607

SEQ ID NO: 65244 - protein, 616 aa, Pseudomonas aeruginosa BWH035
MQVARIHIENFRGVKDATLDFTKHVVLLGDNNTGKTTVLEALDLVLGPDRLNRTPPIDEHDFYHGRYVAKTKKSVPGDQGEGGMQEPGAENDVAGALEDGAGAEAPAEDQALQIKVDVTIIDLSEEQRNRFGDYIEFWDSKEKKLYQEAVPEGIDADVISPALRISFIGQYDSEEDDFEGKTFYTQTLADGGTPQAFSKKDKQVCGFLYLRSVRTGSRALSLERGSLLDIILRLKEVRPQMWEDAIGRISEFSVAEDPTLGISGVLQSINNALKKYVPKEWGVEPHLKISNLTREHLRKVITAFIATGDGAHAAPFYRQGTGTINMLVLAMLSQIAEDKQNVIFAMEEPETAIPPYAQKRIIHEVRNLASQTLFTSHSPYVLEEFSLDETAILSRDSVGVIKQSRVSLPESVKLKRYRQEFRTRFCEGLLARRVLVAEGATEASAFPVACRRLAELDPAKYASLEALGICVVDAGGEGSIPDMARLYREIGKRTFALCDLQDAAAQAQIQVQVEHMYMHNEKGIENLILKNTPQAAMERFCDLLQWPADLAAKFPNPKADVVNALMAYFAKKKGDFGIAEYVAQCSEAEIPQWIREACMHLKELSMLPPAPAAVAK

SEQ ID NO: 65245 - protein, 601 aa, Pseudomonas aeruginosa BWH035
MKLSEKQKEVLVAEGHLLVIGGPGAGKTTISILKAAKLAATLQPGQEVLFLSFARATISRVIEAIENEHDIPKAIKSRIRVETYHSFFWRILQTHGYLLGLPRPLTILTPANEAIALSAVRSEYKAEGKLSEADKAEKKAKEQAERLRQAKVEGRVCFDLFACHVAELLERSKRLRELIAARYPVIILDEFQDTNADQWRVVQQLGCEGVLVALADPEQRIYDWIGADPARLDQFCATFEHTEIVLQGENHRSAGTEILLFGDEVLTGRFSKKKYLGIELETYPANENEAFTALITQTYAARKRLVDSKKKDWSLAILVPTKKMTRAVSNVFRQPLAKMPPIRHSAAVDLNAAILGAEIVSFMLQPLCLFHLDGVIDLLCNYFQGKGGDSPAKSDLQQAASIRKAFALYAEKKAADKPVPKNSLMVPLLQTYEQLRAIPFTGDPDEDWRAVRKTMENGACLRLREVAIEVKNIRLLERGTQLRQALSEDWRTFGRYENALDITRQAFVREHFATQSNPENGVVVMNMHKAKGKQFDEVIIFEGWPRCVKKKIVANPDRIVRANLRENIDDQARQNLRVSITRGKQRTTILTPREDPCVIFV

SEQ ID NO: 65246 - protein, 623 aa, Pseudomonas aeruginosa BWH033
MHLVRVRVRNFRGIAYGEVHLNGHTAFIGDNNAGKSTLLEAVDLVLGPERLSRRPVIDEHDFYAGTYVDPAKNEVVPIQVEVIVAGLSDEQLRHFRDHIEWWDTQTKSLLVGAPPEGTDAPHVGAAIRVFFNGWYDVDEDDFAGDTYYATPEMPDGSYPRFSAPDKRKCGFLYLRTLRTGARALSLERGSLLDVILRLKETRLTMWEDLLDQLRALPVGETEDIGELLVAVQDAVRHYVPSDWAEQPHMRVSDLTRDMLRRTLTVFMGTGAKRPDGSVYSAPYQHQGTGTINTLVLALLSIIAELKQSVIFAMEEPEIALPPHTQKRIINSLRQKSAQAIFTSHSPYVLEEFEPAQVVVLKRTAGIMTGVPATYPPAVKPKAYRTEFKARFCEALLARYVLVLEGRTEFDALPAAARRLAELDPTRFKSLENLGVAIVDARGETNVAPLGAFFRSLGKVVFAVFDKQTPEALATITASVDHAYESATKGFENLVLYGASEVALRSYAAVVVVGGDWPQHLAAYTPTPATPLANLQVALSHYFGWAKGGGDAGDLLASCPTANDMPEYVRATLAAIKNVIEPPQPPPLPPQLAGVPPLPEAAAKPPPLAAAYGKFQPSPPQPLA

SEQ ID NO: 65247 - protein, 570 aa, Pseudomonas aeruginosa BWH033
MTEVWSDQKRGFLASAGHTLALGGPGAGKTHVALVKARDEIRSGLLKPGQKILFLSFARPTVARIIEKASELISREDLKQLEVSTYHGFAWSILRSHAYLLNGRPSLQLLPPPEAAAHLADIDKAQHENEKRRLFEHEGRLHFDLFASLVSELLSRSDRLSAIFSDAYPVIILDEFQDTNCDEWALIQQLGKRSRLIALADPEQRIYEFRGADPRRVGDFLEIFGAAHFDFAGENHRSSGTDITTYGNDLLTGANKGKVYQQVKISRYGFMHGKSLHFNAKAAVLSALDRLKAIPDKSIAILVPSKRLMLELSDYLSSAADGLPELHHDVAMDAEPPALAAGVIATLLEGGTAGDVASRMLNALHSHIRGRRGGKPTPQSELDLAGALSGFLSSGKIRGAKRQLIVSEVQRIAELRQQLQLTGDPAEDWLQLRGLLQASAAVALKQVATDARYLRLLHRGSVLRANLGALWRAQGEYKGAEEAVRSALMQEHFAAGQKDWRGIHLMTIHKSKGKEFDEVIIYDGLFQRIAKAPQDPKICAQDLLVLRVGVTRAIRRTTILTPKRDTCPFL

SEQ ID NO: 65248 - protein, 712 aa, Pseudomonas aeruginosa BWH031; identical to SEQ ID NO: 64606

SEQ ID NO: 65249 - protein, 593 aa, Pseudomonas aeruginosa BWH031; identical to SEQ ID NO: 64607

SEQ ID NO: 65250 - protein, 634 aa, Pseudomonas aeruginosa BWH030; identical to SEQ ID NO: 63582

SEQ ID NO: 65251 - protein, 516 aa, Pseudomonas aeruginosa BWH030; identical to SEQ ID NO: 64587

SEQ ID NO: 65252 - protein, 652 aa, Pseudomonas aeruginosa 3577; identical to SEQ ID NO: 64578

SEQ ID NO: 65253 - protein, 631 aa, Pseudomonas aeruginosa 3577; identical to SEQ ID NO: 64579

SEQ ID NO: 65254 - protein, 704 aa, Pseudomonas aeruginosa PAO1-GFP; identical to SEQ ID NO: 63366

SEQ ID NO: 65255 - protein, 142 aa, Pseudomonas aeruginosa PAO1-GFP; identical to SEQ ID NO: 63365

SEQ ID NO: 65256 - protein, 807 aa, Pseudomonas aeruginosa BWH058; identical to SEQ ID NO: 62542

SEQ ID NO: 65257 - protein, 643 aa, Pseudomonas aeruginosa BWH058; identical to SEQ ID NO: 62543

SEQ ID NO: 65258 - protein, 784 aa, Pseudomonas aeruginosa BWH057
MTTDQISASSLTDSPPLIPAGPSPKAAVAIDTPPLRLACLEVCNFRRLAKTRLELDEVTTILVGANNSGKTSLLTVLRNFLSESPGFRAFDISLSQWAKLREVCHRWEALDEDPTTDSKDAESWEAEYQELQACMPFIDLWFDAKEGAYSHVAPFITSLKWSGGAVGVRVRLEPVADANELRNLAWRYREARAPVRELPKDGHAWPIDLLDYWLRHSADLRRIAAYRLDPVKGPLADKSRRDLQELPLGSQPIELQHLRKLIRVDFVPAQRGLGAEEDEMRSESASSRPGLFSSQLMKFARQHLNVAPSGHGHREDLVKAVANAQADLDKSIYKALKPAMEDVEILGYPGLHDPHQFHFRTRIQTADLLAHSTAVQYLLDKTAVDESLPEHSIGLGYQNLQSLSFMLVSFRAARLNPPQGSPAAVHLVMVEEPEAHLHVQVQRNFSKNAHELIRPKEHVHSYLRSQLLISTHSSHLAHGDNFTRLRYVRRVASTGLGAKPSTQVVNLGDAFGEDAPTRTFAERYFQVQHTDLLFADAAIFVEGTAERMLVPLFIERDFPKLAKKYVSFLDIGGSHAHRLKPLVERLGIPTIVITDLDPVLPTRTDKGRLVRAAVHIAGQEKLECGNDTLTSWHPMLAEFQAFGKPTPAQLVWTSDTGAQVRFAWQLPVAAASEQWPSSFEDSLVLSNIDWFKALEEEVDPITAAKVKHRGTLAKVIGLVLDYPDHAELLKELHAMLRGSFSKGDFAATLFERLNAGQDLKCPAYITDALTWLSGQLNVTAGETP

SEQ ID NO: 65259 - protein, 650 aa, Pseudomonas aeruginosa BWH057
MSTALPSFGNDRDAHVVEDICGYITTTPPRSFFLFAGAGSGKTRTLIEVLRRVTGVIKHEAGAHYAERLRSRGQSVRVITYTKNATAVVNGRLGENYLTEVSTIHSFCWELIQGFDDDIREALLAFNAEDLVAAKAHAMGKKRGESDTDRRKYAEIEAEAEELRKTDEFRYSPDRNTFGPGALSHTNVLDVTAWLIVKRPTLQRILEDRHPLILIDESQDTMKGVLDALFELSKNRPDRITLGLLGDHRQRIYPDGHHDLPSHVPEDWARPALQMNHRSQKRIVELINKIWGSDIQGRTQPKTGVPQHPRTEKNGGTVRIFVGDAKTDSAEKIRRETECALAMSAETALSAWQERGRGYKTLALEHKLAAKRGNFYEAYRSIELLDKDAAVPKSNGERTGPTMVRPLLGPMVELAECLQPNGSVNEFAVMDVLRRHGALANVPESRAERQAALDKAHAAVMRFATAAAKPGITVREVLEPIIEASLFEADSRLVEAYGDSSPPPPEPKTRSKEAKEDRRKRGWHALFGTPWQEIARYHAYLGGETELATHQVVKGSEFKHVMVIMDDEEAGGTWFSYDKLFGAEELSPTDLENVDGGKETTIDRTLRLLYVTCSRAEESLALVLWAKNPATALDAIKQSEWFTENELTAL

SEQ ID NO: 65260 - protein, 784 aa, Pseudomonas aeruginosa BWH056; identical to SEQ ID NO: 65258

SEQ ID NO: 65261 - protein, 650 aa, Pseudomonas aeruginosa BWH056; identical to SEQ ID NO: 65259

SEQ ID NO: 65262 - protein, 767 aa, Pseudomonas aeruginosa BWH055
MRIKFVEISNFRKLKSTHLDLDKNTTILVGANNSGKTSAMLALRIFLLSPTRLNLRDVTIANWTKIDLLGSEWEAGAEPTVDLDSLLPSLDVWLDVPLREIQHVVDILPTLDWSGGLLGVRLAFRIKNLDKLKSEYIAQRTAARDAAIVGPNGESIKIAVWPRNLTEFLERRLRAHLELLAYPLDPAAVVPPGRSGLATPQRLPATALAFEHPPFKKLIKIDEIAAQRDFADASSSDGGEDKGEANNRRFKRRLSDQLRSYYDRHLDPTKTPSDKDYEALGAIQAAERSFDARLEEGFSAAFQELEDLGYPGMSNPKLKISTLLRGTDGLKHGSSVQYQVADPSGDGSNTLQLPEDYSGLGYQNLIAMVFMLMGFRDEWMRVEKAGILEGADVSHEIQPLHLVLVEEPEAHLHAQVQQVFINKAYTLLRKHADLGVAENYCTQLIVSTHSSHVAHEADFANLRYFRRRPAASMGETPTTTVANLSYIFGDGDETKRFVKRYLKATHCDLFFADGVIFVEGQAERILVPHFIRHHFPELSRRYVTLLELGGSHVHSFRNLVDALGIATLIIGDLDATTAVKIIDKNMRETTRWKSARPEQGKAQQTANSVLKDWHPGKKLIDELVALPPDGHISTAGGDYELYVAYQKPVNVKGASEDSDLIIPRTFEDALILENLAVAGKIEGSITSAKVRGIVAQDLSGDELEDELFELLKTAEKAAFALDCLMLEDPKALKPPGYIAAGLKWFEGAVGKDIAQSEIQGAEDQHDH

SEQ ID NO: 65263 - protein, 636 aa, Pseudomonas aeruginosa BWH055
MIIETAAPDFDESADVQIRACLNPAAPQSFFLYAGAGSGKTRSLKRALDTFREDHGATFRRTGKKIAVITYTNVAADEIAERVGEDPLFPISTIHSFCWRHIEAYHRDIQAWLLNRLPVELADLREKQAKGRSGTKAAQDRERAIASTMQRIEWLSVPRRFTYSPNGDNFGQDSLSHAEVLKITAAFIETKPSMQAILVNRFPFLLIDESQDTNRGLIEAFFALAAAHKGKFAIGLFGDTMQRIFLDGHPELERLVPADWARPAKRLNHRSPQRVIALGNVLREPVDGQYQVAREDSEIGIVRLFVSPSDVLDKPALERRARDRMADLCNDLQWREEAAVKALTLEHHMAASRRGFLEMFQALNQDSRLSTGLRTGDLAGLRLFTDRVAPLIAAARMKDDFAVMAQLRATSPLLQRAAIARLAHTDDPLLPIRAAVEALLTLDTDGQETTFLAVLECVAKHRLFEIPDALRPFVANGAEENDVELAGDESAPGEEDAPEERSPASLEAWRAFLETPYRQSIPFAEYVSDKGPLGTHQGVKGLEFERVLVILDDSDARGFLFSYDKLFEVTPATGASRKTPADTAEEGTVRTRRLLYVTCTRAQKSLALVAYTKDPEALIAAALRNNWFKAEEIERL

SEQ ID NO: 65264 - protein, 712 aa, Pseudomonas aeruginosa BWH051; identical to SEQ ID NO: 64606

SEQ ID NO: 65265 - protein, 593 aa, Pseudomonas aeruginosa BWH051; identical to SEQ ID NO: 64607

SEQ ID NO: 65266 - protein, 763 aa, Pseudomonas aeruginosa BWH049; identical to SEQ ID NO: 64796

SEQ ID NO: 65267 - protein, 636 aa, Pseudomonas aeruginosa BWH049
MIIETAAPDFDESADAQIRACLNPAAPQSFFLYAGAGSGKTRSLKRALDTFREDHGATFRRTGKKIAVITYTNVAADEIAERVGEDPLFPISTIHSFCWRHIEAYHRDIQAWLLNRLPVELADLREKQAKGRSGTKAAQDRERAIASTMQRIEWLSVPRRFTYSPNGDNFGQDSLSHAEVLKITAAFIETKPSMQAILVNRFPFLLIDESQDTNRGLIEAFFALAAAHKGKFAIGLFGDTMQRIFLDGHPKLERLVPADWARPAKRLNHRSPQRVIALGNVLREPVDGQYQVAREDSEIGIVRLFVSPSDVLDKPALERRARDRMADLCNDLQWREEAAVKALTLEHHMAASRRGFLEMFQALNQDSRLSTGLRTGDLAGLRLFTDRVAPLIAAARMKDDFAVMAQLRATSPLLQRAAIARLAHTDDPLLPIRAAVEALLTLDTDGQETTFLAVLECVAKHRLFEIPDALRPFVANGAEENDVELAGDESAPGEEDAPEERSPASLEAWRAFLETPYRQSIPFAEYVSDKGPLGTHQGVKGLEFERVLVILDDSDARGFLFSYDKLFEATPATGASRKTPADTAEEDTVRTRRLLYVTCTRAQKSLALVAYTKDPEALIAAALRNNWFRAEEIERL

SEQ ID NO: 65268 - protein, 712 aa, Pseudomonas sp. RIT288
MKVVRIEVNNFRLLKRFSLDLESNLSLVLGKNNSGKTSLLSALEKFINSSEKHKIVFDDFNVDLKAALIKLVSGADPIGPENAYIPLGITLKLYVEYDDVDNLSPVSQLIMSLDPDDNHIVLGFEYLVSYSQLTAMRNDYNAVKEKYDNDSSLFLKENQHIYFDQVRKKSFSYSDPDVFTDLTKENISLADVISFRSIGAKRSVTNKDNDKTLSSQTAIIYKKTSENQEQQEAVEGFKKQLRSTDKELSEIYQDMFSGLLGKVAKFGGSRLSETHIKIASTLQHRELLDGNTTVMYTHDTHDLPEHFNGLGYMNLISMIFEIEMLMSSFRRSSKENPAAINLLFIEEPEAHTHPQMQYTFIKNIKSLLKESRVREDGVEIHLQTIISTHSSHIVAECDFDDIKYLRKSPLANSVDAKNLKALKSEYSSDDVDDNAQAELYYKFLKQYLTLNRAELFFADKAILIEGDTEKILLPAMMRKFDQEVPDVGAIPLLSQNISIVEVGAHAQIFEKFIHFIGIKALILTDIDSGIKELLFEKDGVTPQLYKKGTQKIETIKCRPDDPAADHTANGSLIFYHGKVREDLDYFTSLSVEGKALSKVGGEWKVDVDGCIFLAYQTKDDGYHGRSFEDAFFSLNKALLGTDSEKFPSLTPKWFNKYINGECDAFEFAEKAVGKKPSLAIEVLLNSIPDEKSDFSNWKTPHYIQEGLEWLRK

SEQ ID NO: 65269 - protein, 641 aa, Pseudomonas sp. RIT288
MAAQMKSIEEVSEETKKILDTISEGKSFLLSGGAGSGKTYSLVEVITKLVTLKPLARVACITYTNAAVREIEGRASHPNLHVSTIHDFLWGVIKHFQVELKEVLLTLINDDEISGFKVLDSNGESEKLDTIEGDVRYKEYVKFREGVISHDEVIVLANEMFKRYDKLCRILKDCYPYIMVDEYQDTQVEVVDILLTQLARVGDPNVVGFFGDAMQAIYDEGIGDLDSYKGEGVGQVREIKKEENRRNPQNVIDLANKLRNDGLFQVPSKDLNAPNMTGEGGVKSGHIQFIYSSNDDINVVKEYLGWEFSEPSGAKELNLTHNLIAAKAGFSELMRIYDGDKILEYVRRVKNYIKKNEPAFNSEGKTFGEVLAELKYKKTGKALKEVDPTDGMAIYIAEHQAIYDSALGFPYGELASLYIDKDQLIDDQKSDRSELGRGGGNRDDLIKHLFKIQKNVQLYLDGIFNEFLRVTEHAVKSKNDKVRLKERVINLSKVDDKTVQQVIDEANESGLVRIDDRLQSFMESKRYIYSQVAALPFSQFQKLFEYLEGFTPFSTQHKTKGREFPDVLVVLNNGRWNSYNFDYLFTDRVDKESVVNRTRKILYVCCTRAKSNLALFYHSPSEAVIEKARAWFGHENVKNLD

SEQ ID NO: 65270 - protein, 418 aa, Acinetobacter sp. Ver3
MGSIDSTELSKVSIDLEAANTKIIEQPSIQELNKSLGEKILGLSGKGHDLKTSLRFSNADPLRLFRAIGMYIDEGKRSITEASLGSANVMLMALKLEEFSWRKAKNERNYSLLCIEEPEAHLHPQLQRTVFKNIFKEKDDSQALIITSHSPTLASIVPLRSIISLRYVKTSTKAFSLADLPIEEDEKDDIERYLIATRSEILFAKGVIFVEGDAEETLIPSFAEILDYDLDGLGITVCNVSGNNFNPYIKLAEGLGIPIVVITDWDPLDGTKPALGRARCVGIWDSRCEVNTELNILTEKNREWAETADFDEFSSSFSKVGIFLNNETFEVAIAQTPNLSSVLLEILDEQGFGSTRTKRINEWKTDSSKIDSTQLLAMVKDIGKGRLSGKLKKKISGGKLIQVPKYIQDAIEYMVKNV

SEQ ID NO: 65271 - protein, 591 aa, Acinetobacter sp. Ver3
MSNYTLQKALAELEKNKEQFEAVHCKTHCVVLAGPGSGKTKTLTTAIARTLKEEVIAPRAIACITYNNECAIELETRLSKLGIETTGANFIGTVHSFALTQIIMPYSRCVECNIPQEFKVAGSKECRIAIEDAYKKIYQDSGDPHKQWEFAKEKRNRELDRTHQSWKGHNKELAEFIEEYEQELRKKELIDFDDMPLIAFRMIKENPWIRKALEARFPILFVDEYQDLGHGLHELVQLLCFTGNVRLFAVGDADQSIYGFTGANPELLQSLTVRQDVQTFQLRFNYRSGTKIVKASSAALNENRYYESPEDAPEGEIIFNSVNGGIEGQAYFIVNKLLSQLNTQGFKNENIAILYRAAWLGDKLVEALEANQLPYHRTDGNSLIKRSSKFSRFIEDCAKWVTGGWKDAEPPFRELYNKALIIVYGHHYTQNEEQQLGLQLINFLQNSKSITETANEWLLRFNQELVKPWKTICRNNLQEWEICSELLEKTSPASNKDMSLDLFSGKTEGTGRLTLTTFHSSKGREFDAVILFGLNDDVIPNWRDKKSPKQLKEARRLFYVAVTRPKKILHLVFQESNHSEFLVDFYRRSTE

SEQ ID NO: 65272 - protein, 696 aa, Peptoclostridium difficile; identical to SEQ ID NO: 64400

SEQ ID NO: 65273 - protein, 635 aa, Peptoclostridium difficile; identical to SEQ ID NO: 64401

SEQ ID NO: 65274 - protein, 598 aa, Sphingobium lucknowense F2; identical to SEQ ID NO: 64314

SEQ ID NO: 65275 - protein, 608 aa, Sphingobium lucknowense F2; identical to SEQ ID NO: 64315

SEQ ID NO: 65276 - protein, 641 aa, Salmonella enterica subsp. enterica serovar Typhimurium; identical to SEQ ID NO: 62984

SEQ ID NO: 65277 - protein, 553 aa, Salmonella enterica subsp. enterica serovar Typhimurium; identical to SEQ ID NO: 62985

SEQ ID NO: 65278 - protein, 600 aa, Pseudomonas aeruginosa ID4365; identical to SEQ ID NO: 62594

SEQ ID NO: 65279 - protein, 573 aa, Pseudomonas aeruginosa ID4365
MTVEQDWTPQKRDFLQSTGHVLAMGGPGSGKTHVALVKARDEIRSAKLLSGQRILFLSFARPTVARVLEKAKELITADDLRLLDVNTYHGFAWSVLRSHGYLLSNGKPLQLLPPPEGSARLAHFAKEQHHQEKLRLFHEEGLLHFDLFAQLTAELLRRSRRLAGIYTATYPILVVDEFQDTNADEWAMVRELGRGCRIIALADPDQRIYEFRGADPQRLKEFVDQFDPLPVEFEGENHRSAGTDIATYGSDLLTGKNKGAVYANVSVVEYGVYYGRGPHFHAKAQLIQAIKRLRKEPAWSIAVLVPSKAFMLQVSDYLSAESDGMPNLRHEVAMDAESPALAANVIATLMEGGPSELLAARLLSALHTHIRGRSGTKRPAQAELDMADAIDQYLVSGKIRGKNRQALISECARLAALRQDVVFTGHPEEDWLTARGLLATSAVGQLSRVAADAKYLRLLHKGSNLRASLSELWRSQGQYVGAIEAVRGALLQEHFTAAAKEWRGVHLMTIHKAKGKEFDEVLIYEGRYAGRIVPANADTSRQSQALLALRVAVTRAMKRATILTPSGDRSIFL

SEQ ID NO: 65280 - protein, 641 aa, Salmonella enterica; identical to SEQ ID NO: 62984
  subsp. enterica serovar Typhimurium str. 95799

SEQ ID NO: 65281 - protein, 553 aa, Salmonella enterica; identical to SEQ ID NO: 62985
  subsp. enterica serovar Typhimurium str. 95799

SEQ ID NO: 65282 - protein, 641 aa, Salmonella enterica; identical to SEQ ID NO: 62984
  subsp. enterica serovar Typhimurium str. 98346

SEQ ID NO: 65283 - protein, 553 aa, Salmonella enterica; identical to SEQ ID NO: 62985
  subsp. enterica serovar Typhimurium str. 98346

SEQ ID NO: 65284 - protein, 641 aa, Salmonella enterica; identical to SEQ ID NO: 62984
  subsp. enterica serovar Typhimurium str. 116045

SEQ ID NO: 65285 - protein, 553 aa, Salmonella enterica; identical to SEQ ID NO: 62985
  subsp. enterica serovar Typhimurium str. 116045

SEQ ID NO: 65286 - protein, 641 aa, Salmonella enterica; identical to SEQ ID NO: 62984
  subsp. enterica serovar Typhimurium str. 104772

SEQ ID NO: 65287 - protein, 553 aa, Salmonella enterica; identical to SEQ ID NO: 62985
  subsp. enterica serovar Typhimurium str. 104772

SEQ ID NO: 65288 - protein, 641 aa, Salmonella enterica; identical to SEQ ID NO: 62984
  subsp. enterica serovar Typhimurium str. 108402

SEQ ID NO: 65289 - protein, 553 aa, Salmonella enterica; identical to SEQ ID NO: 62985
  subsp. enterica serovar Typhimurium str. 108402

SEQ ID NO: 65290 - protein, 361 aa, Pseudomonas syringae pv. actinidiae ICMP 18884; identical to SEQ ID NO: 64290

SEQ ID NO: 65291 - protein, 560 aa, Pseudomonas syringae pv. actinidiae ICMP 18884; identical to SEQ ID NO: 64291

SEQ ID NO: 65292 - protein, 634 aa, Pseudomonas syringae pv. actinidiae ICMP 18884; identical to SEQ ID NO: 64288

SEQ ID NO: 65293 - protein, 600 aa, Pseudomonas syringae pv. actinidiae ICMP 18884; identical to SEQ ID NO: 64289

SEQ ID NO: 65294 - protein, 668 aa, Bordetella hinzii OH87 BAL007II
MRAWAQKAEHASKSFLLLSRELVASKPGLQGNKTAAGNCAITAIANNRCGDGGYMRVRRLKIENFRCVSQGSVDFAGHTLLVGGNNIGKSTVCEALDLVLGPERIFRRPVVDEHDFHCGRYLNAEGAPVEIRIEAILVDLSEEAQRRFGGHLRRWDDLAGAFIDEEQDGLGKADGPAVIWALPLLFVGRYDPEEDDFVGNTFFDHPTKEVDALDEETEVKLGQGRVPFTRVHKRLCGFVFLRTLRTGSRALSLQRGSLLDSVLKLGGAGAVEMWRDTLARLQALDPAIGEIEQLKHIRSELRSRMGRFVNLAPGDDATAFFASDLTREHLREVVRLFIAAQPGQHLVPFGRLGTGSINLLVFALLTFIAELKDKQSVIFAMEEPEIALPPHTQRRVTRFVLAEMGQSIVTSHSPYVIEQFDHEQIVILNRNETGALTGQPIDGQAIKSKTFRVERRQFAEAILSRAVLVVEGSTEAALFPVASSIMEASLNPEDYTHLDLAGVSIFNAGGDGSVPRHGPVFSALGKLAFGFYDKPNAPLNQDAMDKLKSYTQVWESPEKGIEELLVKETPIAVVRRFLNEVKDRPDYPSVGVYDPAAGDGEVTALATKVLKARKGDAYGYAAMMISQCQHADQLPATIREILETIHKALSAVSEDVAAPPPDDLEDLF

SEQ ID NO: 65295 - protein, 568 aa, Bordetella hinzii OH87 BAL007II
MKLELCEKRKAVIAQGGHLLVLGGPGSGKTTIALLKAQRQSATLKPGQGILFLSFSRAAIRQVLLRCKEILTPAERRAVTVQTYHAFCMEILEAHGRLLHGRPIRFLYPGEERLQKSAFDGDWMVERRRLASEQGLYCFDLFAAGAADLLEGCAALRDLIADRFPMIIVDEFQDTDDNQWRIVRALAEVTDVFCLADPEQRIFDYRDDIDPRRLDILREDIQVTEFDLGGENHRSPNAGILQFADAVLHNHSPLPATPDIKQVSYWQNTFAATVHAAVIWTFSALRKKGVEHPSVAVLSRSNSLIADLSVILSETHTYNKQTLPIIEHDVVWDAELSAAAAVVVASILEWPTGPAEETLARTLRVIAGYYKLKNAEEPTNAAAEHARKYDEAAAKVATGEGPRINAAKALVAVYKAGIDLVGEPVADWKAARWVLHDIPALNELFREARLVRLFRATDALASGLGERWLALSSYAGASELVKRILEQERLVAAERDPQGCILMNMHKAKGKEFDGVVLVEGAFKSSFFDERNEQPPFERSRRLLRVGLTRARTLVTIVRPQNARPLVD

SEQ ID NO: 65296 - protein, 620 aa, Bordetella hinzii 5132
MRGRRIYARQRLKIENFRCVSQGSVDFAGHTLLVGGNNIGKSTVCEALDLVLGPERIFRRPVVDEHDFHCGRYLNAEGAPVEIRIEAILVDLSEEAQRRFGGHLRRWDDLAGTFIDEEQDGLGKADGPAVIWALPLLFVGRYDPEEDDFVGNTFFDHPTKEVDALDEETEVKLGQGRVPFTRVHKRLCGFVFLRTLRTGSRALSLQRGSLLDSVLKLGGAGAVEMWRDTLARLQALDPAIGEIEQLKHIRSELRSRMGRFVNLAPGDDATAFFASDLTREHLREVVRLFIAAQPGQHLVPFGRLGTGSINLLVFALLTFIAELKDKQSVIFAMEEPEIALPPHTQRRVTRFVLAEMGQSIVTSHSPYVIEQFDHEQIVILNRNETGALTGQPIDGQAIKSKTFRVERRQFAEAILSRAVLVVEGSTEAALFPVASSIMEASLNPEDYTHLDLAGVSIFNAGGDGSVPRHGPVFSALGKLAFGFYDKPNAPLNQDAMDKLKSYTQVWESPEKGIEELLVKETPIAVVRRFLNEVKDRPDYPSVGVYDPAAGDGEVTALATKVLKARKGDAYGYAAMMISQCQHADQLPATIREILETIHKALSAVSEDVAAPPPDDLEDLF

SEQ ID NO: 65297 - protein, 568 aa, Bordetella hinzii 5132
MKLELCEKRKAVIAQGGHLLVLGGPGSGKTTIALLKAQRQSATLKPGQGILFLSFSRAAIRQVLLRCKEILTPAERRAVTVQTYHAFCMEILEAHGRLLHGRPIRFLYPGEERLQKSAFDGDWMVERRRLASEQGLYCFDLFAAGAADLLEGCAALRDLIADRFPMIIVDEFQDTDDNQWRIVRALAEVTDVFCLADPEQRIFDYRDDIDPRRLDILREDIQVTEFDLGGENHRSPNAGILQFADAVLHNHSPLPATPDIKQVSYWQNTFAATVHAAVIWTFSALRKKGVEHPSVAVLSRSNSLIADLSVILSETHTYNKQTLPVIEHDVVWDAELSAAAAVVVASILEWPTGPAEETLARTLRVIAGYYKLKNAEEPTNAAAEHARKYDEAAAKVATGEGPRINAAKALVAVYKAGIDLVGEPVADWKAARWVLHDIPALNELFREARLVRLFRATDALASGLGERWLALSSYAGASELVKRILEQERLVAAERDPQGCILMNMHKAKGKEFDGVVLVEGAFKSSFFDERNEQPPFERSRRLLRVGLTRARTLVTIVRPQNARPLVD

SEQ ID NO: 65298 - protein, 668 aa, Bordetella hinzii CA90 BAL1384
MRAWAQKAEHASKSFLLLSRELVASKPGLQGNKTVAGNCAITAIANNRCGDGGYMRVRRLKIENFRCVSQGSVDFAGHTLLVGGNNIGKSTVCEALDLVLGPERIFRRPVVDEHDFHCGRYLNAEGAPVEIRIEAILVDLSEEAQRRFGGHLRRWDDLAGTFIDEEQDGLGKADGPAVIWALPLLFVGRYDPEEDDFVGNTFFDHPTKEVDALDEETEVKLGQGRVPFTRVHKRLCGFVFLRTLRTGSRALSLQRGSLLDSVLKLGGAGAVEMWRDTLARLQALDPAIGEIEQLKHIRSELRSRMGRFVNLAPGDDATAFFASDLTREHLREVVRLFIAAQPGQHLVPFGRLGTGSINLLVFALLTFIAELKDKQSVIFAMEEPEIALPPHTQRRVTRFVLAEMGQSIVTSHSPYVIEQFDHEQIVILNRNETGALTGQPIDGQAVKSKTFRVERRQFAEAILSRAVLVVEGSTEAALFPVASSIMEASLNPEDYTHLDLAGVSIFNAGGDGSVPRHGPVFSALGKLAFGFYDKPNAPLNQDAMDKLKSYTQVWESPEKGIEELLVKETPIAVVRRFLNEVKDRPDYPSVGVYDPAAGDGEVTALATKVLKARKGDAYGYAAMMISQCQHADQLPATIREILETIHKALSAVSEDVAAPPPDDLEDLF

SEQ ID NO: 65299 - protein, 568 aa, Bordetella hinzii CA90 BAL1384
MKLELCEKRKAVIAQGGHLLVLGGPGSGKTTIALLKAQRQSATLKPGQGILFLSFSRAAIRQVLLRCKEILTPAERRAVTVQTYHAFCMEILEAHGRLLHGRPIRFLYPGEERLQKSAFDGDWMVERRRLASEQGLYCFDLFAAGAADLLEGCAALRELIADRFPMIIVDEFQDTDDNQWRIVRALAEVTDVFCLADPEQRIFDYRDDIDPRRLDILREDIQVTEFDLGGENHRSPNAGILQFADAVLHNHSPLPATPDIKQVSYWQNTFAATVHAAVIWTFSALRKKGVEHPSVAVLSRSNSLIADLSVILSETHTYNKQTLPVIEHDVVWDAELSAAAAVVVASILEWPTGPAEETLARTLRVIAGYYKLKNAEEPTNAAAEHARKYDEAAAKVATGEGPRINAAKALVAVYKAGIDLVGEPVADWKAARWVLHDIPALNELFREARLVRLFRATDSLASGLGERWLALSSYAGASELVKRTLEQERLVAAERDPQGCILMNMHKAKGKEFDGVVLVEGAFKSSFFDERNEQPPFERSRRLLRVGLTRARTLVAIVRPQNARPLVD

SEQ ID NO: 65300 - protein, 680 aa, Mycobacterium tuberculosis TKK-01-0051
MHVESIKLTNFQCFGAEPTKIDLNQQLTTFVGANGSGKTAVCTALMRLFGISQEQRSVQADDFHVPPEENQPATTRTLSIEVVLAFPELNDAVSNSPRDETTADAETASPDDGDPTAGADDSPTVPQPQTSARAEHDAIPEFFHQMAATVDGELKCRIVLEATWTDDGSIDGLIEDQRRVVYTFDDDYGDRWVPLRGGDRNRIQVIYVPASRDGARYVTTFLRGRLWRASTWSQELELHVAEASDQLTRLFRAEQAVSTVEQTLTQRWRELHQADTDAEPSLEPANRTAKELAARAELMFQPSHTGRQRQAAALSDGQRSLLQLALTAATLDIEKRLSEGPVDGFELPGAALPRLTLLVVEEPENNLSPFFLSRVVHQMNSMAQGLRSQAILSSHSAGALSRIAPDRVRHFRLDHPTARAVVSNVLLPDDQTEAGKYIREAVRAYPELYFARYVVLAEGDSEEIVLPTIAKARGVPIDRSFVAVVPLGGRHTNHFWRLLEDLRIPYLTLLDLDYGRYGGGSGRIKDACERLIAVGVDPFADIEGYNSIDDVRELTTPQISAWIAHLRTWNIYFCTPLDLDMALLSHHFAAYTTLEAGALGPKKHDDPTTTVLGEHRPQTPYWESESSVERLRWYRYLFLTKSKPSTHLRVMSAMTRTQLANAPAVIVELLDQIKNDLQLT

SEQ ID NO: 65301 - protein, 632 aa, Mycobacterium tuberculosis TKK-01-0051
MTASTPPTWQPQGIDDLEPAAWDALRHNGNACVTAGPGGGKTEFLAQRASYLLETGICRSPRRILSISFKRDSAANLERRVDSRTPEHADRFVSMTFDAFTKSIVDRFRELLPPYWKLQGSYSIRYPTSKEVRNFLDTLSESADDEHRSALYRVPRNTFLSTVVGSYNLPASFSEPTSAGEYAIQQWWKQTYLGREDPAIDFITINRLAELAIRSNPGLRTALRWTYPYVFIDEFQDTTFAQYSFLRSVFDDAALACQITVVGDNKQRIMGWAGALSDAFAEFSSDFTTARFELTWNFRSSDALVALQHRVAQILDPSARLAISKALADIDDQPAQLWSFRDQRHEAQTIAAWIAADIEASGRQSAQYALVARQTVAEFENDLRSALATHGLQLRNDDAEVGELKLQILLKDRLSRLLHGLLKLAAPRTGRAGLPTVWRDVSSTIARLRLGEVSDVTATAVDDELSALLRPLRTWLHDTPCGPDAVDVLIEQLIKLLDEVTLGNYTTICDRTEDSSISQAAIARRLKDVITPGYGWWDAAQQYDAPNAVPLLTIHRSKGLEYHTVFFLGLEDQQWWAHSQDVAASISTFFVGLSRAAQRVVFTRCNARGDTDNITEFYDILDDAGISIQTFS

SEQ ID NO: 65302 - protein, 598 aa, Bordetella bronchiseptica 99-R-0433
MKIVQVRITNFRGIAEGTVHFDGHSVLVGDNNAGKSTLLEAIDLVLGPERLSRRPVVDEHDFYAGQYLSADERPIPLTVEVIVADLNDEQLRHFREHLEWWDTNAKAVLAGPPPENTDAAGVGPALRVFFRGAYDADEDDFLGNTFFALPAPIGAAEYQTFRASDKRKCGFLYLRTVRTGSRALSLERGSLLDVILRLQDSRLKMWEELLRSLRILPVADKPELGVTALLSAVQDSIKRFVPSDWVEDPHMRVSDLTRETLRRTLTVFMGTGAKRPDGSTYAAPYQHQGTGTINTLVLALLSIIAELKQNVIFAMEEPETALPPHTQKRIVNSVREKSAQALFTSHSPYVLEEFEPAQIKVLKRARGVMTSVSASLPPTIKPKSYKAEFRARFCEALLAKYVLIVEGRTEFDALPAAARTLSQTDSQYFKSLEALGVAVIDAKTDSQVAPLGNFFKALGKTVFAVFDKQDETQLALIRAAVDFPYESHMKGFESLVLQGTSEDAIRRYALGVVEDGDWPQHLVHMTPSAESDLAALKDALSEYFAWGKGSGQTADLLACCTGWKEMPEYIASCLHGIFRVIEPPPPEPPTLSVEPTAA

SEQ ID NO: 65303 - protein, 567 aa, Bordetella bronchiseptica 99-R-0433
MSPQKLAFLACPGHALALAGPGAGKTHVALIKAQQQIASGTLKPGQKVLFLSFARPTVARILEKAAELISPDELKHLEINTYHGFAWSILRSHGYLLNTARAITLLPPPEAAAHFADIDASVREQEMLRLFEEEGRLHFDLFARLVVQLLQRSDRLARIYCDAYPTVILDEFQDTNADEWALVHLLGRHSRLIALGDPDQRIYEFRGADPRRLGDFVEVFQPSSFDFSGENHRSSGTDITIFGNDLLTDRNRGREYTHVKIVRYGFRRNQSPHFRAKAEVLAALRRLRDQPTASVSVLVPSKAFMLQFSQYLSSDQDGLSALRHDVAMDAESPSLAANVIAVLLGGGSTAQLASRLVATLHTHIRGRGGNKAPAQAEMGLAGAIGTYMSTGKIRGKNRELIIKECQRIAAVRADFRLSGNPQEDWAVMQQLIATSTAPQVARVAEDARFLRLLHRGSALRTALSEMWRTRGDYAGAEAALRDALLQEHFAAAQKDWRGLHLMTIHKAKGKEFDEVVIYEGSFSGRILAANADSRRIAQSRLALRVAVTRAIRRTTIVTPQRDGCPFL

SEQ ID NO: 65304 - protein, 582 aa, Bordetella bronchiseptica 7E71
MYLARLTISNFRKLQKAELEFQSGLNVLVGANNVGKTAIVDALRALLAGHDDPYPRLDADDIHRPHGATPTGDITFQYVFRDLDEDDEADFLPALKIDAAGKAEAHISIRYAEADKVGRLRAKRWCGDHEDVGLTADMMENLRGVYLPPLRDASQSLKPSRSSQLARLFHLLSDDAGRNDINEALKKLDEELKKHAPITNTHTAIKGRHDTMLGPQLAQLLELGLSGSDFQRLASRLSLMVDAFEIEQNGLGFNNLIFMAVVLSELAKNPESSYRGLIVEEPEAHLHPQLQAVLLSYLETLKATDGEKPVQLFVTSHSPNFASIAHISSLTCLIDTGSAVETFFPRDIAFGKGKREKLERYLDVTRAEIFFARRVIFVEGAAELMLVSVLAEKSGYKLREHGVSLISVEGLNFDSFLPLFGEQALKMPVAVITDADPVDTPADGSEPQALYPALGAVVKVSDNTTKMKESEDAFVKVFHGVKTLEYDLALHEANRSAMLKALKELHPKIGETVEASVNAASDDAEKARILFSGMFERKQNNVQKGRFGQALAQVLADGETCVVPEYIQKAIKHACQKTPACP

SEQ ID NO: 65305 - protein, 579 aa, Bordetella bronchiseptica 7E71
MKKPSPEQLAIISAPLAPMSVIACAGSGKTHTAVRRLAEMRRLLGSHRGRVALLSFSNVAVDTFRQSYQSLTLEMSVGPSGHRVDIDTLDGFITRHVLHPHAHRTMQATQAAFLVTGGESFLSGFTFKPGNYPVSITSMQVGWRDSGIYFYYANNDQVVELNHGYASAIVHRLGKASAYTHNLGRYWCYRTLREQPVILRALARRYPHILIDEAQDIGTLHQAILEQLINAGVQVSLIGDPNQGIYEFAGANGRFLSQYGSRTGVTGLKLTRNYRSVPPILELANKLSARSDDPDRIVPETAHGAYFIPYKTADRDNLIHAFKATVIAAGLKAERSAVLCRGRDLANKLAGNDSSAGQGTVKGFAQAAIARDKKQDYVEAFKVVAICIAGLLIDLPKGWVATVTQPARYSEAQPLRRLIWRFTRNPDAGLPSASLQADTEWHLLLLTRVKALLATLEKDHGLKPVDNIGRKLAKTKLPNTPLFAAADLAAPNAARIRVDTVHQAKGESLDAVLYMTTKEHVTAMLDGVASEVGRIGYVAVTRARDLLWLAVPANSLSELRTKLVAHGFQEIGMPAAPTS

SEQ ID NO: 65306 - protein, 623 aa, Acinetobacter baumannii 25977_9; identical to SEQ ID NO: 64504

SEQ ID NO: 65307 - protein, 539 aa, Acinetobacter baumannii 25977_9; identical to SEQ ID NO: 64089

SEQ ID NO: 65308 - protein, 640 aa, Acinetobacter baumannii 1598530
MKLDTLRISNFQSFGKEPTEILLEDISYLIGPNGSGKTSTLQAISRLFCFDPSLRRIQKTDFHIDPNEEIPPPQRELWIEANFSFPELLEDGEHSTIPEFFNQMRLDQEEEIPRVRYRLIASMGIDGDIEENLYYILDVDENNEPISKTIVPRSDRNQIQAHYLPARRDPSNHISFGTNALLGRLLRAINWSSERADINSLSEQINSCITGNSSISSLCKKLDQSWKYLHTGKFFTNPKISFGNSEVEALLKHMSISFSPGHGETNVDYSRLSDGQKSMLYLSLVLSSITLNRAVISGEEIAFDIDKLNPPVFSLILIEEPENSLSPHYLGRISNILKKLLGKDTQALIATHAPSILRRVDPQKIRYLRLDSTSRYTTIKTIILPNKSDEAHKFVREAVQAFPEVYFARLVVLGEGDSEEIVLPKLFEALGIPVDESAICITPLGGRHVNHFWRLLSSLEIPYITLLDLDIARHGGGWGRINTVNEQLKKFNPSLVLPESWPTFPKWNDPTCLIRTHNCIENTSIFKVLEERNIFFSEPLDLDFSMLLAFPDAYNVTKETPDEKTIKSVLGKSHFNADQYSMDEKQFFDTYHSHFKVGSKPAAHIDGLSNIKDEDLLLNMPKTYLNLAIKVQEMLENISE

SEQ ID NO: 65309 - protein, 547 aa, Acinetobacter baumannii 1598530
MIKPDLWVPSDNLTLEPNALLAAKEQTCSLALTAGPGAGKTEMLAQKADFLLRTSACPYPKRILAISFKKDASKNLKERVQLRCGANLSRRFDSFTFHAFAKRIIDKYRVLLTGLDELEPNYSIGTQRIHKTQIDFESLVPLAIQIVNSSSIVRNSILQTYSDVFLDEFQDCTEKQYKLIKAIFHNSNIRLTAVGDTKQKIMSWAGALEGIFLSFTADFNAKPLNMYRNFRSKPKLLRLQNEIIRYLDPSSVMRDDLIIGNDGSLSHKTFPNSLEEAEYLSNLIQKWIIEENIPPSEIAILVSKQIEHYAVDLISALRAKQIPFRNEQRMQDIASEKVAKLIINYLLCLYSQRNPHAWTKVNEILLPFETDEELKSSFLRDFNNFFKEQKRFFLISNKHPPIETWQQAISNLLTKLGIATLATLSPEYESETYLYTVIADLIIRIQEQIDLNGDLLLSLNSFGHDNTVKILTIHKSKGLEFHSVILLGVENEAFWGNDARSVFFVGVSRAKDRLVLTESKKRPLDSPPYRWKENTTTHEEFFNYRVD

SEQ ID NO: 65310 - protein, 623 aa, Acinetobacter baumannii 796380-1375; identical to SEQ ID NO: 64504

SEQ ID NO: 65311 - protein, 539 aa, Acinetobacter baumannii 796380-1375; identical to SEQ ID NO: 64089

SEQ ID NO: 65312 - protein, 594 aa, Escherichia coli 2-005-03_S3_C2; identical to SEQ ID NO: 64492

SEQ ID NO: 65313 - protein, 605 aa, Escherichia coli 2-005-03_S3_C2; identical to SEQ ID NO: 64493

SEQ ID NO: 65314 - protein, 771 aa, Klebsiella pneumoniae MGH 63; identical to SEQ ID NO: 64244

SEQ ID NO: 65315 - protein, 625 aa, Klebsiella pneumoniae MGH 63; identical to SEQ ID NO: 64245

SEQ ID NO: 65316 - protein, 771 aa, Klebsiella pneumoniae MGH 75; identical to SEQ ID NO: 64244

SEQ ID NO: 65317 - protein, 625 aa, Klebsiella pneumoniae MGH 75; identical to SEQ ID NO: 64245

SEQ ID NO: 65318 - protein, 641 aa, Salmonella enterica subsp. enterica serovar Aqua str. NVSL2001; identical to SEQ ID NO: 62984

SEQ ID NO: 65319 - protein, 553 aa, Salmonella enterica subsp. enterica serovar Aqua str. NVSL2001; identical to SEQ ID NO: 62985

SEQ ID NO: 65320 - protein, 649 aa, Mycobacterium triplex
MYIERLQLSNFRCFGPAGAAVNLDPRLTALIGGNGAGKTAVCEALLRMFGTQEQRRVQLDDFHVSSAETEPPSARSLQVEVILAFPELENVDEDDPESLAAADSVPEFFQQMAATEDGHLKCRFVLRATWIDDGSVDGNIGEERRVVHTFDEDYGDRWSSFREVDRNRIQMLYLPAARDGARQLAAFMRGRLWRASRWSSDLSEHLAGAADDLLEKFQSESVVTAISQALSKRWQQLHHADTEARPSFEPLQRNVGELFRNVALLFEPSPTGRKRAATALSDGQRSLLHLALSAATLDLESDFVAGKLSDQFELSLSSLPALTLLALEEPENHLSPFFLSRVVAQLTELAEQTPTQSILASHSASALARVEPDQVRHICHDRVTATSSITPIELPADVTEASKYIREAVRAHPELYFSRYVVLCEGDSEELVIPLLAQARGVPIDRSFVAVVPLGGRHTNYFWQLLSSLNVPYATLLDLDWGRDGGGVGRIKTVCQELLKLGEDPFADIQGYAQIEDLEADLDYNELIAWTEHLRRFNVFFSEPLDLDMSLLETYFDYYSADLDEGAKGPDFDSDPTPAVLGRADPVIDYWKAPERKQYLSWYRYLFANKSKPASHLRALTTVPTDKLAQPPTVLADLIDTIEKEVGLG

SEQ ID NO: 65321 - protein, 630 aa, Mycobacterium triplex
MSLVAPDSWRPSGIDDLEPAAWQALRDDRSTCVTAGPGAGKSEFLAQRASYLLLTGLCPAPRRILAISFKRDAASNLERRVGLRAPEHAHRFTSMTFDAFTKHIVDRFGTLLPGRWKMAGDYKIQFSSDRQVEDVLTEASANAPAGLKTAIDAIPRGTFMTSILGTYALPIKPVSPPKAVDYAVEEWWRRSYLELPTPVVEFVMLNRLAELIIRTSPQLQRAINLTYPYVFVDEFQDTTFAQYTFLRSLFRRTATVTAVGDRKQRIMGWAGALTDAFSEFQRDFAAAPYALRWNFRSTEALVNLQHRFARLLDSNATTAAAQAISDIDGEAATMWSFGTARLEARTIAAYIAADTESTGRSPADYALIARQRVADFEPEFRDALSEYDIVVRNDDASVGKMKLQDLLKDNLAQLLLGVLKLAATSRGEEGSPQAWAGVSSSIANLRSGDDQSVFGSVRTDDELAARLRIVRQWMRDHACNQDAVDAVVDLVTEMISVITDGRIYNLADTADDFQVRQDAFRMRLKTACADAGSWRAAVTAYEARDAVPLLTIHRSKGLEYHTVFFLGLDDDQWWAHQRDLEASIATFFVGLSRAAQRVVFTQCDTRGGRRNIADLYEILDQAGVPVTRFG

SEQ ID NO: 65322 - protein, 700 aa, Pseudomonas knackmussii B13
MRIEKVRVEGFRLLQDVEILLESTSTVIVGRNNSGKTSLTEIFDRFTGENGPRFRLEDFSASARGKFFDAKALRLKEASSEAVLAALPKIALTLTFAYDAAAPNLGPLAPFVIDLDVSSTKAIVRVEYAPTLATLHTLLDVQPPPKDADPSAHFLRSLRETLPKAYAVHVCAIDPTDDTNRRDFDGTAALTALIQCNFVRAQRTLDHAKHGDTDVIGKLLSTLFKTATAPTAAAADQELASKLKASVEGIERSVQGDFDVMLKKLLPAMEVMGFPSLNDTELRPETALNVEALLSDHTRIVYTGSDGVHLPEGYNGLGTRNLIYMLLQLESYHKAYRAKVTRPVTHLIFIEEPEAHLHPQMQEVFINQLNAAIGKLSASYPDEPAWKVQFVITTHSPHVANAASFEAVRYFLHESPNKTGNRQTKVKDFKKGMTSISSDDQYFLHQYMTLTKCDLYFADKAIMVEGTTERLLMPRLCEIADKSLDEKNKLARQYVTCVEVGGAHAHIFYPLLDFLELKTLIITDLDSTKAVERKNKKGTMVKKWEKCPVAEGERISNAAIKEWFRPHDKKDKDSWQITPSELASKNTKEKLRGCRRIAYQIPENADSDVCARSYEDALVLANPDRFDWSKELDEATEAWEIAQGLDKADTALRFAIREKDWTVPRYIREGLVWLSEPFSAPTAEHSVETPKEASTGEEMA

SEQ ID NO: 65323 - protein, 578 aa, Pseudomonas knackmussii B13
MTKPVENPALVAAKEAQRKIDEALDAGRSFRLEAGAGAGKTYSLVAALKRLITERGQALVQAGQKVACITYTEVARNEIAQEIEDHPAILVDTIHAFSWAFLRQFQKALRNFIESMDDRREKIEQGGGVGSKPVVYDLGFFGVDASHITLGHDDIPAIMAKFISQEKFRQLFTKQFPIIFIDEYQDTDRQFMEAITENFLKVGNGPLIGLFGDHWQTIYRSEYELADYPMEEIGKGSNFRSAPAIVNVLNKLRPELTQAVRDPNAFGEARFFHANAYTGPRTDDIHSKQDLPAELAKSTREDLINRLQTEGWDLNKTKILMLTHNVLAAEQGYPSIAKIFSGRTELFAKKEDPAIKFFAEIVEPMCAAYNASRYGEMFRIFGSGPAIMKHTDKIAWREDMDTLQKLRIEGTIGEVIDHLKSAGRPLLPDRLLRRDEELIALNGDPIPEDATALQRYSKLRNVHYKEVSELVKFIERQTPFATQHSVKGAEFENVLVVLGGGWNHYNWPQLLELIKSKSLTNKNIKGYYRARNLFYVSISRPMTRLAVLATQSMSETALETAKYLFGNDYVEELAISNQ

SEQ ID NO: 65324 - protein, 650 aa, Pseudomonas aeruginosa MH38
MILKQMRVCGFQSFGAKPVTIDFRKLTFLIGPNGSGKTATLQALCRLFSIDPNQRRLRKSDFFVAHDEEERPDERTLWIEADFYFPEIADETKEHPTIPCNFGHMRLDSIRGVPRVRYRLDATLGLDDEIEQSLRYVSEVDEDGNPIATSPVPRDERNQIQVHYLPARRDPAEHITYGTNALLGRLLRAVNWTEQREKISQLSADISASLSTNQSVINLGDGIANAWGKLHKGKFFKDPSLTFVSHEIEALLRHLSVSFTPGHGEQQVDFSRLSDGQKSMLYLTLVLTSQAIGRAVLKGDDDSFDLDKLKPAVFTLVALEEPENSLSPHYLGRIVSSLKALVLGKDAYDAQAMIATHAPSMLRRVEPEQIRYLRLDDSRCTAVTKITMPPKAGEAYKFVREAVQAFPEIYFSRLVVLGEGDSEEIVLPRLLAAEGLMVDEAAVCIAPLGGRHVNHFWRLLSGLKIPYVTLLDLDVARHGGGWGRINYVATQLNLHCPNQGYMPDDQLAKLPSWDNPKYKILKVEKSREWRNYIAELEPFDVFFSSPMDLDFSMLCAFPQAFGVEAKDLVAPKIGQLRSVLGDSFFDEKQYTVTERKHFAAYHRLFKVDSKPKSHIEALSNLSDDDLREGMPPSLKRLVKHVIKMARELHE

SEQ ID NO: 65325 - protein, 555 aa, Pseudomonas aeruginosa MH38
MIKVDAWKPSAGIKLEPNAEIAATEQQRSVALTAGPGSGKSELLAQRADFLLTTGVCRYPKRILAIAFKIDASNNLKERVWRRCGAAYAGRFDSYTFHGLAKRIIERFRPVLAGADALNPDFKIVAKGKAHPVQTEFKELIPLAIKILDAYPAAVNAIRQTYSDVFLDEFQDCTDEQYELVTKLFKGSGRRVTAVGDVKQKIMGWAGALEGVFASFVDDFEAQHLNIYRNFRSQPHLLRLQNDIIKVLDPDSEMPAHLLAGEGGEVHVLSYADCQDEATDLAKRIASWINVEGIAPAKIAVLPRNQPEAYCIRLMAELDNWGISYRNENKAQDISTEPIAQVIVDYLLCIYGLREPKAWTRLTRRIIQVEDDAESELKTNWSRYIKEARKSAAADLATKTFDQRWTLLEEFLKMVGPALLAGLSHDYESWVHLREQIESVKKYIDEALAKEPDLLKALAQLSDDQSIRILTVHKSKGLEFDTVVLLGVENQAYFGKDHHEVQCTFFVGVSRAERRLVVTTASHRQNLAQLEYWRSARTVQAEFLAYVNLWKTHSN

SEQ ID NO: 65326 - protein, 813 aa, Bordetella bronchiseptica OSU095
MSSVSCTSTHNNRRSIDDNKSSDMKTHEIPAAAESARIAVPVAFPEAPGTATAATSAAGFASSPVRLACIEVCNFRRLSRTRLDLDEETTILVGANNSGKTSLLTVLRNFLSETSAFRAYDLSLSNWAKLRDLSKAWEVLADDPTTETKDEEAWAAQLQKLLACMPFVDLWFDVKEGAYNYVAPFITSLKWAGGAVGVRVRLEPVSTTKDLRKLAGAYRAARAPVKALPKNGHAWPVDIIDYWLGNPADLRRVSAYRLDPAKGPLAVKKDVTLQDLAAGATQVEISHLRKLIRVDFVAAQRGLGAEEDEAKSETANSRPGLFSSQLLKFARQHLNVSTSSYGNGEELIAAIAKAQAELDKSVYNALQPAMEDVEVLGYPGLHDPQQFHFRTRIKTTDLLAHSTAVQYSADKTVLDEALPEHSIGLGYQNLQSLSFMLVSFRTARLNPPEGAPAAVHIVMVEEPEAHLHVQVQRNFSSNALGLIKPKGEPHSSLKSQLLISTHSSHLAHGDSFTRLRYVKRIPGTATGAKPSTEVVNLGDAFGDDIETRTFAERYFQVQHTDLLFADAAIFVEGTAERMLVPLFIERDFPRLAKKYLSFLDIGGSHAHRLKPLVERLGIPTAVVTDLDPVIPKINKKGRLVRAAVHIAGQAELECGNDTLTKWHPNLPSFNDYGKPTAAHLEWVSPTGLKVRFAWQAPVTAASNQWPSSFEDSLILTNIDWFKKLDNEKDVDGKKVKHVGTLGKVLGLVLDHPDHAELLEELHDMLHGSFSKGDFAATLFERLNAGTNLKCPDYIADALTWLSAQLKVTEGETP

SEQ ID NO: 65327 - protein, 651 aa, Bordetella bronchiseptica OSU095
MSADVEPRGNERDAYVVEDICGYVTAAAPRSFFLFAGAGSGKTRTLVEVLRRITGVVEHQAGSEFAKRLRSRGQTVRVITYTKNATAVVGGRLGENRLTVVSTIHSFCWELIQGFDGDIQDALLALNANALAEAKAAAAAKKRGETETDRRKYAEIEEKADEIRGITKFLYHPDKTTHGMGALSHTSVLSVAAWLISNRPTLRRILEDRHPLVLIDESQDTMKGILDALLGVAKERPGRFHLGLLGDHRQRIYPDGHRDLPSHVPDTWAVPALKMNHRSQKRIVDLINAIWDADVVGRTQPKTGFAQHPRTEKTGGIVRIFIGNANEVTESKMEKEAGCARVMAQVTGQNAWSDAEKGYKTLALEHKLAAKRGRFLDAYSAMQLLDKDAANPKSNGERSGPNMVRPLLGSVLDLAECVDIAGQLDEFSSMEVLRQAAALANLPDDVVEKRAALDKLSSAIAEFATLTRKPGSTVRDVMRPLLEAGVFEVDARFVTAFNDESEPPPAPVGRGKEDKEVRRRRGWCALFDTEWEEIGRYRQYLRGETELATHQVVKGSEFPHVMVVMDDLEAKGSGFSYERVFGVEALNDSDLESIEEGDETSVDRTLRLLYVTCSRAEESLALVLWSKNPQAAREAVLKTGWFEGEEIGILA

SEQ ID NO: 65328 - protein, 662 aa, Pseudoalteromonas citrea; identical to SEQ ID NO: 63772

SEQ ID NO: 65329 - protein, 675 aa, Pseudoalteromonas citrea
MDSQITPQQQIQKCIAESMSFVLQGGAGSGKTETLKHTLQFLSQDYSKNRVACITHTNLAVNEIIDRVGDGYKVSTIHSFLAALIKNHTKAIQQVIHEIFIVSNVEFETEENSDLAGNELKKANHDNYKRTYKKYAKLKYIVKGETSAKEIGKREYDKAPTEHNYELNLKIAELNAEVCNVIKDKDHRNIKYNDSRFDRFKDLSFGHDSLLKVAALLFKRFPKLGRILSDKYDFVLIDEYQDTNEEIIEVFLKYLPKERKTTVGLFGDSMQSIYSDGIGDVRAYIDSDQIVEIAKEDNFRCSEQVIDFVNYLRIDALNQKLAFKIKQDGIKEILKDRQGHVSLLYAVWDNVKPHSKSSPETKQAYLDFIDKLIDFADGEERSHKKLMLTNKSIAGKVGFAGLYKVFSDRYTDVKDEIEKVLSSIQVLDLAELCNAYSGSEKRYNFILSELKKSGFVLKTLREKERIVAAFEKITRGNLSINKTLEVAFKENILAKSEAHLAYVDRKEAFLSELKNDEEYQQLKMIFNAGSNSLTKMVKQVPELTEEAFNEFHSNFKRERFYHDLFSEEISFSEINRYYKYLNEECDFITMHKTKGSGIENVLVVLDEYFWNKYSFKFSDDSTETSSVFTPPNMKLFYVACSRTIKNLTVVKVVTKEEKEHLLKVFPEFEEVPINE

SEQ ID NO: 65330 - protein, 813 aa, Bordetella bronchiseptica CA90 BB1334; identical to SEQ ID NO: 65326

SEQ ID NO: 65331 - protein, 651 aa, Bordetella bronchiseptica CA90 BB1334; identical to SEQ ID NO: 65327

SEQ ID NO: 65332 - protein, 651 aa, Pseudomonas putida
MKLKYIRVCGFQSFGVKPVTIDLESLTFLIGPNGSGKTATLQALCRLFSFDPNQRRLRRSDFFVPHDEEDVPAERALWIEADFHFPELTDGGNEHPTIPCHFGHMRLDDLDGVPRVRYRLDASIGLEDEIEQSLRYVLDVDESGIPIETVPVPRDERTQIQVHYLPARRDPAEHITYGANALLGRLLRAVNWTDQREKISQLTTDISQSLRDNRSVVSLGAGITNAWKALHKGKFFKDPSLTFVATEIESLLRHLSVSFTPGHGEQQVDFSRLSDGQKSMLYLTLVLSSQAIGRSVLGGDDESFDIEKLRPAVFTIIALEEPENSLSPHYLGRIVSSLKTLVGDPHAFDAQALIATHAPSMLRRVEPTDIRYLRLDDARCTVVSTITMPPDTKGESYKFVREAVQAFPELYFSRLVILGEGDSEEIVLPRLLAAKRLMVDEAAVTIAPLGGRHVNHFWRLLSGLNIPYVTLLDLDVGRHGGGWGRIKYVATELMKHRPTVAYLTEDQVSKLPKWDNPTYPLLDVEKNPQYKNYVQDLEPLGVFFSSPMDLDFSMLVAFPKAFGLSPTDLALPKVNQVKSVLGESCFKPTQYTPLQRKHFIAYHKLFKLDSKPKSHLEALSKLTDEELLKAMPASLSRLVDHVIMRVEALHE

SEQ ID NO: 65333 - protein, 565 aa, Pseudomonas putida
MIKPEEWRSSEGIVLEPNAEMTVREFQRCVALTAGPGSGKSELLAQRADFLLTTGACRYPKRILAIAFKVDASNNLRERVFSRCGADYAGRFDSYTFHAFAKRIVDRFRPVLTGEDALNVGYKLVVKGKAHPEQTEFSALIPLAIKILDAYPLAVTAIRQTYSDVFLDEFQDCTDEQYALLHRLFAGSGRRVTAVGDEKQKIMGWAGALDGVFGRFEHDFSALHLNIYRNFRSQPQLLRLQSEIVKVLDPGSEMPPDMLTGDGGEVHVQAYQSCEDEALSLAGQIVTWINADGIAPASIAILVRNQPEAYTVRLAAALDSWGIGYRNESQLQDIATEPMALVVVDYLLCVYGVREPMAWTRLMRRLIPSEDDADGALRTNWGRFIKEARKLAASDLASKCYDQRWALLKEFLSMVGVSLLTGLSHDYESRERLKEVIRDVKKYIDEALAREPDLLKALAQLSDDQSIRILTVHKSKGLEFDTVVLLGVEDQAYWGRDQREVRCTFFVGVSRAVRRLVVTTTEHRANLLNLSTWREQRTGHREFLDYVCRWQNCPKTPGELCGPEH

SEQ ID NO: 65334 - protein, 608 aa, Bdellovibrio bacteriovorus
MYLQKVEVKNFRNLKSFSVNFSKGLNVIIGENNVGKTNLFDAIKLALGYQSTSDPLKVSKDDFSQALDGTSSDEPITVNLEFAELSPDEQAEFLEILNFNPVDRTQTTASIHWQCSWSKINDRAETKRWGGAKESTEGGVPDDLLQSIQATFLIALRDAVSSLAPGRGSRLGKLLAARATSDDKDLIKEIFKKANEEIADKDLITAVEDQLNSALKGATGEHMSQNVAIRASDPEFEQIVRSLRIVLKTAGVGGDFSRELRSNGLGYNNLLFIATVLAELEGLKSASLPLFLVEEPEAHLHPQLQVVLTKFLQEGLFETSKNRRVQTFLSTHSPTIASCIPLNTLIVMHRGADGFVKSFALKDAGLADVEQRKIRRMLDVTKSSLLFSRGTIFVEGVCEGLLVPVLARRLNINLEDRHISVVPICGVDFESLTKLFGPDKLDLKVSVVTDGDPKIIAGADGQWRQDIPAGFAEQNIVACDRAVALRTALADSTVVKPFISQVTLEYDLAEANIVNSVVMKTAWESLFSSGSSDVMRDEDFVDVTEKRILALAIWRGICRSSTSKSKADFADVLAEKLLKKNDQGLLEVPDGNFAVPLYIKEAIEHVIS

SEQ ID NO: 65335 - protein, 580 aa, Bdellovibrio bacteriovorus
MSFPNEEQAAILASDSRITLVQASPGSGKTKVFSEFIRTKINDFVDKKGGLAALSFTNSASEEISERLGIDVSSPHFVGTLDSFMYKFVLKPFAHCFGLPKAGLMILPSPTERIFGRDEVQVGVQARDKTNLFAVTFNGGTVRNPILKYQDGYNTSVEVHQSKVAEVLSKKWDKWKSQGVLTHSDCQYLAAYMLSDPSLGPKIIDILSLKFPWILVDEYQDTGKFLATGLLKILGNANIKALVVGDPDQSVFEFSGASPSNFTDIGALSGANIYPLNTTQRCARNIAAASSMLSSTSVTVRPREDSVPGSLFIVPHRHTDPRFDERVVDVMQSLGDDLGSIMVVSRRNKDLRALDGNYVENAFKGTSAIGKGLNYSIELLRMGDVKKAFLVASVHLSKVLFGAEILKKADAEAKDIYWSKWRSEVLNMIFRLEKIEQGESWNTWLQRAKAEFENIATTFGATVDRLGTKFRTHNDGLQSRELTQGAQFVHPLLKNAKYKNIHEAKGREADTVVIYIPKTNSARCISNVWFPTQGQSQEEQRVGFVALSRAKKNVILCIHQSNLTKLQELRASFVDLFVVR

SEQ ID NO: 65336 - protein, 754 aa, Enterobacter cloacae MGH 54; identical to SEQ ID NO: 63938

SEQ ID NO: 65337 - protein, 612 aa, Enterobacter cloacae MGH 54; identical to SEQ ID NO: 62517

SEQ ID NO: 65338 - protein, 634 aa, Enterobacter cloacae MGH 54
MKLEAIRLSGFQSFGYEATELSLEDITYIIGPNGSGKTAVLQALCRLFAFDPALRRIQRSDFHVPYDEENVPLERQLWIEADFLFPELEEDEDNSTVAPHFSHMRLDEPDGVPHVRFRLTATMGIDGDIEEALVYVLEVDEDDAPLNTAQVPRSERNHIHVHYLPARRDPADHIAYGANALLGRLLRAVRWDDERETIKNLTDQISVSLAANPSVNAFSESLKTTWIKLHRGKFFADPKITFVASEIESLLRHLSVSFTPSHDGSFVDFSRLSDGQKSMLYLSLVLSSQAIGRAVLAEEDISFDPDKLRPPVFTLVALEEPENSLSPHYLGRIVSSLSAMVGNLDAQALIATHAPTMLRRVAPELIRYLRLNESRETQVTCIKLPDETDEAHKFVREAVQAFPEIYFSRLVVLGEGDSEEIVLPRLLQAKGAPVDESAITVAPLGGRHVNHFWRLLTALKIPFFTLLDLDVARHGAGWGRIKYVNDQFSKRQRRNKLPKPYGIPKWDDEKHKIRDYENYLDMLEERGVFFSYPMDLDFAMLLAYPEAYNVWEEKPDDATIKAVLGKSHYDSSQYRDDELVLFNTYHQRFKLGSKPAAHIEALTQLNDADLLKNMPDSLDRLADAVIAKLTELPE

SEQ ID NO: 65339 - protein, 554 aa, Enterobacter cloacae MGH 54
MITVEEWQPADGLTLEPNAKRAAKARKRCLALTAGPGAGKTEMLAQRADFLLRTGTCRYPKRILAISFKVDASRNLTERVERRCGRYLASRFDSFTFHAFAKRIIDRFRPVLTGEYALDAGYTIVDKKSGASRHEIAFGDLVPYAIKILQTSKIARNAIRQTYSDIFLDEFQDCTNLQYDLVKLAFKGTKIRLTAVGDTKQKIMAWAGALDGIFQSFTKDFNAVPLNIYRNFRSKPTLLRVQNEIIRKLDPDSVMPDAQLEGDEGEVFACKFEDSQTEAIYLADLIYEWINTEKLPPAEIAVLISKQPDLYADDLFRELEQRGIPYRNEQQMQDITVEPVARLIVDYLSCLYGHREPKAWIRLMNQLVPFADEEIQTNVRKDLDHLIKKHRMGVSEAKKTDNPFSEWWTFSRSFLKHIGLQMLVALSPEYESHDRLKQVVRDVEARIKDLLKIESDLPLALKRFSDDQAVRILTIHKSKGLEFDSVVIMAIENEIFFGDEEENRCAFFVGVSRAKRRLILTHTNKRDEPANARYWKVFRTARVEYLDYVLPFVR

SEQ ID NO: 65340 - protein, 566 aa, Escherichia coli CHS 69
MRIETVYIKGFRNYCDAVINFNETNLIIGANDVGKTNLLYAIRLLLDKSLSELDLEPKSNDFHVNSTGEQVENIEITIKFTDVSEDAVISKLGGYVSDEGETYIKYLASSLTMDYKILLSHEHNNFDEVPNRFYLKCLSLRYINSQRDLEKYIKIEKKHLLRLAQEVRSEKDTENDGAVFTELNKLLTEVNEKVKGISYVASATEELNEELRKLSYTHDRLTVQLDTGAIGIDQFIEKLELSANTNGKKLMLGGDGFNNQILLALWKAKSVREHDVESEVVIYCIEEPEAHLFPHQQRKLAAYLIDKLPGQAIVTSHSPQIAVNFKPDSIIKLYYDDGETLAASNGCSDCISSAWDGMGYRMSIIPAEAFFANVVFLVEGPSEVIFYTELAKALSIDLDYYNISILSVDGIQFEVYRKILTALNINWIVRTDNDASKVPHKNEWQYAGVNRALALCGENKEPNSSIPIDSKALHAKWGTISPIINPNGVYISFFDLEGDLANDFSKHVLDYASKDNLDDAADYLRGKKAIRMRELIKEKKAFLTELKSKDIARPLIHALKIARGEL

SEQ ID NO: 65341 - protein, 540 aa, Escherichia coli CHS 69
MKLTKEQLDAIDYEGNLVITACPGSGKTTILVHKIAACLSHSKDYQGVVALSYTNKSSEELKARCRKLGAELNSSFFGTIDKFFINEIILPFVRQVWGRNESALEVVKYIDLSQELKDKTNKYFDRVDFYSNTSFEGMGSLRDIYLKGMLILDFLPHLAFYIVRTSYSCQRYLMAKYIGFFVDEYQDTGYFTHQVFKFIPTLGMPLIIVGDLDQSIYLYSHRSSDSLKDFMNDSGFCHKEITVNHRCHPSIVNYANRIKDFECQLAPCDEIFVYRKCVDGNQIDIAKWIGEVLDNVKNKFSISDNKEIAILVRSNACAELVSDNLVVSNRAYLDNDLTKAGGKVSGLVNDLLCYRYNLNKTAQSILEGVLGSSVKRSEATRIRKAIKQVRSVTDAFLIDVINKIVVTLLGTEIEQHHKSALSEILVTPRMQNNYLDVRSDEVQIMTLHKSKGLEFDFVFHLDLYDWILPKRVFIEGSYDVVFENEQQCINLHYVGITRARKGIMLMHSTKRYNGSGDLKNGAPSQFLLKPGLDGLYKKIN

SEQ ID NO: 65342 - protein, 771 aa, Klebsiella pneumoniae MGH 65; identical to SEQ ID NO: 64244

SEQ ID NO: 65343 - protein, 625 aa, Klebsiella pneumoniae MGH 65; identical to SEQ ID NO: 64245

SEQ ID NO: 65344 - protein, 610 aa, Klebsiella pneumoniae MGH 72
MGVLSKSGLLYNICNVYLISLCLKGVNVYINEVKIKNYRCFEIFITKLNPFTLIIGENNSGKTNFLKALSLPLTMGNLDFSQKRLVIADFNSVSVENCLKQAFNYYRLTAEEQIEEKNLHPLIDSIPIIEVEVNFCCPQNSYELALINSFLTEKDQKPAFTIKYIYEPKDLNILERIKELVLSIDKIEELKWQLFPIDSYEYDIVTTSNDKSVSYEKLKNLVANIIGAERDDFSDSPAMRSNNILTKLLINELSTKEKEIINLAYNDFFTKVESAGTFQRLLNSDAAFDNIKEHLKDIGCIPNLPNLKNILSNITLSYGNEFLYQKGLGERNLVFIFLFFTYFKKNNSEFNLCCVEEPEAHLGVNKLRLTIDFLEKSVNESNSLLQTIVTTHNPAIINKLKISNVVAFSGNKAVSLSSFGDELNDYLRKRPNFDILRLIYADKLILVEGPSEEMLIRTHIHLNQDNLYDVEVISVNQKGYKSFLDIWLLVNAHNHNKKIAVIRDFDDQENAQKEHESYRGKHPHITVETTICYTLEDDLVHHGNNIHIIAESFKIALGDDDSSDGEIISMFLKDDKTGGMLTLCDAMLSNEKPLVIELPPHINNVLGAMQ

SEQ ID NO: 65345 - protein, 477 aa, Klebsiella pneumoniae MGH 72
MITVQIAGAGAGKTHGLASQIAAKLAEAETDKKIHALTYTNTARDKIKSALKMHTDGARVNVDTVHSFLLNEIIFPYAYYILGEKYKSISLEQLPENPRYKNNRITTLKRRGIIHVENVYILAKQILDKTNAKNKSKTSKGKVDFVHGLLKNLISSIFIDEVQDLDEDCLRVFHVLGSIGIYVYMIGDPKQAIKHPNSLNNYIEEFKKEDSNVVFENINNVTRRVPNSSLRISNYFCYADQQQTNITDFEGSVHYIYNDTMNFENAIQQCILNDKLVIINQKNNFYCTNLERDNIIPYELATILEDGPKRNNRDPKIYINSIVIDLVERIKQFPDTPNNQAANHIIKIHDLSALLRGFKNGFALFYAFSESLANKGTTTNYLVKSIEAVKGLDSDIVFFILSNSFTQYLCDENIDKKNRFNKEWKKLYVALTRSKDKLVFVLDKRLINAENLEKYETFFNSKNINMINDGSECLNWL

SEQ ID NO: 65346 - protein, 676 aa, Klebsiella pneumoniae UCI 56
MRLKKIFISGFKSISNQHPQTIELEKDLTTFIGHNGTGKSTVMEALNKLFSVDHSLRFLSINDFNSSYDCKDEKNKNLIIEAWFSFDKPKDSELVIPPLIEHLTIDKEDGGILFRVRLEGSLTYDSNPMGDIDEDIWVVNTSDMIVEDDNKQKLPAAIRNSIQVNYVPANRDPLLQLKYSSKAVLGRLLKAIEWVEDSQKAIEEQAAHLNVLTKSNPALNEIASAINASWASIYRGRYLSQASLNFPHANIDEILKLIQLQFNPDELGNTISVERLSDGQKSLVYFSLVKAMFDIDQKTRELLSSGNKSNFNPDKMRLPIFSMISLEEPENHLSPHYLGRIIKLVKDYAKNELCQVIISSHSSSILSRVEPEHIRHFRLDSDSKSTIVNALSLPDKTDDLSKFVKEAVKAYPEIYFSKLVIFGEGDSEEIVIPKVLELYSTEVDSHSISIVPLGGRHVNHFWRLLRTLQIPFITLLDFDIDRSGGGFGRIKYAIEQLVSFGDSGSKYISDKIISKIPRWNSETDPTTFSIRYTDGAEKNIVRELEKCNVYFSSPLDIDYAMIEAFPDVFCEKDVVYGERGPSAIKFDVAEDLDELIKAVLKKGNSGVRYAFSENYMKYFLWYRYRFLSNKSKPASHVRMFTKIEELYSPDEIRDKLPPELIKVAKKTIKLLKEVIE

SEQ ID NO: 65347 - protein, 557 aa, Klebsiella pneumoniae UCI 56
MMTEWQPSAGIEATDELMEIILCDGHISVLAGAGAGKTELLAQKADYLLQTGKCMWPKKILCLSYKKEAQENIKERVMSRCGSKGERFDSYTFDAFCKSIVDRFKDVLPDSKRPSNSYDLVFDNKESNGRDKVSFDLIRYLALVIFKEREDISDLFSMTYSHVFIDEFQDTRTDQYELIKLLFKNKGNSLLSVGDINQSIMLWAGAKRTVFDDYIKDFNATKKLLVKNFRASDEIQEVLRCFIHYVQNDTNFSPIAKDINNCTIHFYNDEISEAEDLSDIIKGLIGSGISENEICVLTKQQSEKYTEQLRHSLTKKNIRNLEMSELQDLLKEPLGELFSACFKLYTSRSLSGYTDLCQLYLGMYRISSGDAKEELLIKSLSNEIARHRAELGNQPNADSLLTCIKETVEFFCIDRIKGRWGQYKSAGYWVKVWNGLEQHLRYTISSTGSLNDAVQLFGADNSVQVMNIHKCKGLEYKVVILLGLEDQAFWTYHSQKFENDCALYVALSRAKEKVIISTANFRSHRINSRYDNRTSLYNMLNPVYEFLRTHCKFKVVT

SEQ ID NO: 65348 - protein, 710 aa, Klebsiella pneumoniae UCI 56
MFIKTLSVRNFRNFKAASLSFKKECVNTIVGENSSGKTNIFEAMRLILDDTLPYYKRYLVENDFHRGLGTAFGHWVIISLEFDEIGGDEESELLCQLNTTVNGGGTGRITYIYRPQLYIREQLFNLNDIEDVDARRSAYNILKEQYSIDKTTYESLVLCQGTADFSDDGLYSHVVGDFNDYLFPDPKLERIDLIGNRQRGYNIQDNISCTYARALRDVVSELKNNRFNPFQKLLEYVSKGIDNDDALSENIKNVNNRISSIEEVKRLSEGILLSITNAVGTTYSPVLNVTSELPCELKELVKVLQLKAGDSLCEGYVSELSEMSLGGANLIYLALKLYEYEEGISKNLLANFLIIEEPEAHIHTHIQKSLFSNLKNNKTQVFISTHSTHISSVSNISTTNVLVKNGLETISCSPSNGLEKERINRIERFLDAIRTDILFAKNVILIEGDAEEILIPHLVKNSFGITLDELGISLISVRGTGFELLSSLFHSDRIKKKCAILTDDDINLYGDNKPDYLSQDDYNKAVNSAESGVARKVILDEIVRNNAFIRAYFSKYTFEIDLVLSGAVRYFDAIAAESFEKRAYYTPYQEAFQSSDRQKIGCYALKLANKHKKGWFAMMLVDKLDADFPISKALCQSLGFTGDFNKFTLAKMVRYRSEVIKNRDGSDLLNNILGQDDLSFIIDNIDAALDIFKTHYPNDPLTSLLEVHHG

SEQ ID NO: 65349 - protein, 558 aa, Klebsiella pneumoniae UCI 56
MDNQKRQLINIKDNLLVSACPGAGKTKLLIGMLEDNLYRNEGFRWHIVLTHTNAAADEISSRIDNLSIEVDRVWCGTIHSFLLEWVVKKYAGAISRLKDGFSLLSEYKQRKIIQSIESDKKLGVRIRYNCDEQGNAFVEPYCHSLDDKHKELLVIQEYNTFKQNNRLIDFDDIIKLGVEFLENNQNICEHLSKLIGNIYLDESQDTSLIQLKALSYITRYNRTSVFIVGDNDQAIYQDLGVSIKDKYIIKSVLQLSELKHETLSGCYRSSELLVKYYKKYSSSRNDVTSLREFEGKPPIIKDISQDELPQRVFNLINQYQTKYNSVSGIAIIGPDKYYLMALINALYDLSENFVYDFQSTTPLYCARNTVFYELISLVLLDVNVINYQRRSSLARKIVDSVPELSHLTPLQLKRDLKEFQSVKNNFILWLRELYDFLEMKYQKSIKLETDYKICNAAASVAKIRAGMGAISKMINKDKNVVSVSTIHGSKGEEYDYVISIGYHEQVVPHQSSFEKGNEYARDIANRLMYVAFSRAKDYMNIFIDDRRKVSPFFIREPD

SEQ ID NO: 65350 - protein, 154 aa, Vibrio sp. JCM 18904
MSLDEVLELESDKKVKGHVRAAYQCGIQVNWKVGEEYIQKEAIPYTFEDAISLTNLDLFKGFSKSVGMVKKMSQAANKESLEECCQEMFDALKGEKAKMALDLLFEVDPEKLLVPEYIKEGLDWLEKQLDAVNQEFHWQPELATQLPDGESVDA

SEQ ID NO: 65351 - protein, 620 aa, Vibrio sp. JCM 18904
MHESLTLTGVDKEIYNYLDLNNPKSFLLFAGGAGSGKTRTLVNVLQAVRGNNIQEFVRKGGQRVAVITYTNAACNEIQHRLAYDPIFAVSTIHSFVWELIQPFTQDIKAWLRVELQREIDDLEYKLSRARDLQGKTALQNARRKKSKEKRLSQLDDIKQFTYSPITHRVDLGSLTHSEVIKIATYFLMSSTLFRSVLVNKFPILLIDESQDTEKALLEAFIFTQSLNDKVFSLGLFGDLMQRIYSGGKEDLGQPLPEGWMAPIKESNFRSPKRIVSLINTIRKDGDGHQQVPDDNAEEGFIRLFIVESSCSKKPEIEASVRNRMKELTNDAAWTQRDGVKVLTLEHAMAASRGQFDAFFTPLSKVDSLRDPLLNGTSGVFTFLSDQLLALSDAVLAENNFAVMAILKRHSKLVSASYNIEFSNDPLLVLKQTNDAVDRLKSLLMEEEPNIRDVLKFVHDNSLLVLPEILSALLVEGKDDDEEEKAPQIAAWELAILAPINQLKSYSLYINEKLGYGTHQGVKGLEFDRVMAIIDDEDANGFLFSYEKLFGAKPLSSTDSRNESTGTESVLSRTRRLLYVICSRAEKSLAVVAYTQNPSMVKKTSIDAGWFREDEIEEFLE

SEQ ID NO: 65352 - protein, 710 aa, Streptomyces albulus
MSASRPEPSEQSQTEPRVRPPRVTKADVKNFRLLRDVSIAFDKDVTVCVGRNNTGKTSLAEVLSRFLRPGDIRLRVEDFSTEAYSEFSQAYKAFTTGDEEAARKLLPEISLTVFISYDKETTEYGSLGSLIVDLDPDCTEAVVTVRYALKPGAMKDLFRDGPDELVEGWGDSLLLSLIGPRIPHLFDRSAIAVDPADPTNFRNVSMSEVARAIKVDFVRAQRGLDDETERPKEPIGRVFESLFIGASKADENSPLRNFADDAETALGEIFSSLDGKIQEMYDRMAPTVSGFGYPGLGGRDFSTRTTLDAKRLLSNFTSIRYPGSAGIELPESYSGLGSRNLLLILLTLFSYYRDYATQRNQPCIHLVFIEEPEAHLHPQMQEVFIHQLGVFKKNFPAADQGLDSWNAQFLVTTHSAHIANRVGFPAVRYFRLDTHGELDGATSSQVLNLADAPGVSKEFLHKYLTLTRADLFFADKAILIEGTSERLFIPAAIARLDQTGGEVRESLASQYVTVMEVGGAYAHLFYPFLDFLGLPTLVITDLDAVKPDSAKKLKGCCATEGTTTSNEGIKKWFNNDGITLAELAKSAADEMPVIERRGLAYQVPEIPGGACGRTFEDAFILANPEIFELQDFGSKSVAEQEQQARELAKGQKKSNFALRLAVVEENWMTPRYIRRGLEWLLRQTPMPAEANMPEPNAEPGESPEGQVAVR

SEQ ID NO: 65353 - protein, 594 aa, Streptomyces albulus
MKVSTFQDGATADQESRHALREILASLDSRRNFKLEAGAGAGKTHSLIDTLRHILENRPEYLPREGQQVACVTYTNVARDEIVSRTDASTYIFAGTIHGFLWEIISGFQKTLSQEIGALPGWKQLLAEEGSIDGFSVSYDLGFRRIRDGVAWLHHDDVPALAIRLFERKKFRSLAADRFPIIFVDEYQDTPSGLAEAMIGNTASPPTGSTYGFFGDHWQQIYDRTCGKIDHLPVTAIDKRANWRSSPAVVSFLNHMRPELPQAPVPGRETGSVVVYQTNSWTGPRGARSKKGQIPDLALKETLRHVAADARKRNPISQGEPLKTLMLTHSSIASELGFGQINEVFRYNDDYVRKQDDVMAFLLETLEPACEFFHTKRFGLMLETLKRSRPRMRNRSDKTGWVDLFHRIDETRGIGTVGDVLDIVLEQKYFSPSRAIHDRQRKWTEALSSLRPGEVLSEPRQIVEYGKLRDVPYSQIIALRDYVDERTPFSTQHGVKGEEYPSVLAVFGGWTRYNFPKMLADFPRSQSLSDEDRKRFERSRNLFYVACSRAQENLAMLFTTELSEEALKTLEEWVGPSNIIAVDYSPDGTPRITV

SEQ ID NO: 65354 - protein, 759 aa, Snodgrassella alvi
MYLQSFTIKNFRKFGENDNEVMFVNSKEICHNNSGQDSPPLVSPSSTLIIGKNNTGKTTITHALTMLTNNKLSIKSSDFNLSYLNNLIDTYIAAYQNEDESPQPDLKTPLETPKLEFELKIKLDNPADEYIHNLSQFMLIGNDYGKAIIIKAIYELKEEANFFAAVKTLVQQKRQEPSDKNSETPNDEKVDKRTLLEEILKLLDDKNQTEFKLSYKNKIDQEVKNFSLDKLLEINCIKANRHLNKNVLTGVFKRIVISLFSNEESDGLFNQELKDINDIITEKVEQKNKSISEILREIEQINHIDMKLSGNVTKDDILDNLIKYSFSDGDSYIPEDQFGLGYINLVNIIGEIIDYINSYEENSHRSRINLLLIEEPEAFMHPQMQEFFIKRIDLAVNKAIQQKSTDGTPAIPATQSLKCQIVITTHSSHIVNSKIHSSNSFDNINYLTTENRCSKVIPLYDKLLTESSQPSNSKSSKKSDAKSDSNNSSLDYKLDSNDLLFLKKHIKYKVSELFFSDAIILVEGRTEEMLLNYFLENDKDLKKYYISIFGIGGAYGKVYFRLIQQLKIPCLIITDIDIERFNCEKNKRCKKSCPKCKGETSKSKNIKQITSLLDRKTTNDTLKYLHKSYDLHENMQYTERDNVYFVFQKDQIEGQYATSLEEAIILTNYDNKIILKLLTKFFPKKSKNFIIDNKIKCESSYEIQQQISKNCGKTEFASMLLYNMIISDAESLCIRLPSYIDDGLKWLKNQLANYYGEKK

SEQ ID NO: 65355 - protein, 743 aa, Snodgrassella alvi
MSLQENIRNEERQLKDIFTAIDGGKSFIVHAGAGAGKTYTLIESIKYILNHKLNTLRKHNQKIICITYTNVAVDEIRHRLGESQFVQVSTIHEMLWQQINLYQQHELVELHKNKLEKEIENTKLEITELAKDSANLADINTEENKELFRQFVQENKDEFFKLEKRGAKANKFREKMIGLAQEDLKSALTKALKNISDFKNFFRLINRLRSYTHALEDINQTDKNKKPSIEYDSNSNSDRLASLKFSHDTLLEYSLKLVKEYDVFKKLLTDQYPYIFIDEYQDTNESVIRLMAYLQQYAHPEQWLVGYFGDNKQNIYDSGVGNHIENIYREISAEGKKEIKLKKIVKDFNRRSQIQIINLINKIRNDDLAQKPIDPDRTNGKVEFYCLKAGAAERDKDETIINQFIKQLAPSPPNNELQINCLLLLNRSVASMCGFAQLYNAIEKAKFIKWDNLNSMLLSRILNKLHPAVLRLYQLVTAYNSLNNPHTTLYDLFGNTQRSVTFAEAGELVKILKQQQPPTTLNEFIQNISTGLNQLAKNKNKSESDAIQFWLKNCFGINYPKDIKQNNAGLADLSFADYYIDFLLYEDMYGSINHAETEVEETDDVVATNQQHISDILDIDLSQWLSWVAFIDDHAKEQQVIYHTYHGTKGEEYDNVVIIMENDFGRKQINKFKNYFSSLSADANIQVKDEEDKELENTRNLFYTACSRARKNLWILYLDDITEIKDKIELLFGTVKTFEPAIE

SEQ ID NO: 65356 - protein, 756 aa, Snodgrassella alvi
MYLQSFTIKNFRKFGEHDNEVMFVNSKEICHNNSGQDTPPLVSPSSTLIIGKNNTGKTTITHALTMLTNNKLSIKSSDFNLSYLNNLIDTYIAAYQNKDESPQPDLETPKLEFELKIKLDNPDDEYIHNLSQFMLIGNNYEEAIIIKAIYEVKEEANFFAAVKTLVQQKRQESSGKNSETPNDEKVDKRTLQEEIFKLLDDKNQTEFKLSYKNKMDQEVKNFSLDKLLEINCIKANRHLNKNVLTGVFKRIVISLFNDEESGGLFNQELKDINDIITEKVEQKNKSISEILREIEQINHIDMKLSGNVTKDDILDNLIKYSFSEGDSYIPEDQFGLGYINLVNIIGEIIDYINSYEENSHRSRINLLLIEEPEAFMHPQMQEFFIKRIDLAVNKAIQQKSTDGTPAIPATQSLKCQIVITTHSSHIVNSKIHSSNSFDNINYLTTENRCSKVIPLYDKLLTESSQPSNSKSSKKSDAKSDSNNSSLDYKLDSNDLLFLKKHIKYKVSELFFSDAIILVEGRTEEILLNYFLENDKDLKKYYITIFGIDGAYGKVYFRLIQQLKIPCLIITDIDIKRYDCEKNKKCKNSKCPTCQGQSSELQGFKQITCLNNRETTNETLKCLFENNILKNNMQYKEQKNIYIVFQKDQIEGQYATSLEEAIILTNHDNDIIIKLLSKFFPRKSKNFIIDNKIKCESSYEIQQQISQNCGKTEFASTLLYNMIISDAKSPCIQLPSYIDDGLKWLKNQLANHHGEKK

SEQ ID NO: 65357 - protein, 744 aa, Snodgrassella alvi
MSLQENIHNEERQLKEIFTAIDDGKSFIVHAGAGAGKTYTLIESINYILNHKLNTLRKHNQKIICITYTNVAVDEIRHRLGESQFVQVSTIHEMLWQQIKLYQQYELVELHKNKLEKEIENTKLEITKLARDFANLADINTEENKELFKQFVQENKNEFFKLENEKAQADKFRTRMLELVQPDDLKNALENALRNINNFKKIFKLTSRLNSYTQALAKINHPEEHKRISVEYDSNSNSDRLASLKFSHDTLLEYSLELVKQYDVFKKLLTDQYPYIFIDEYQDTNESVIRLMAYLQQYAHPERWLVGYFGDSKQNIYDSGVGNHIENIYQEISAEGKREIKLEKIVKEFNRRSQIQIINLINKIRNDELAQKPIDPDRTNGKVEFYCLKAEAAEGDKNEAIIDQFIAHLVPSLPRNEQINCLLLLNRSVASMSGFKQLYNAIEKAKFIQWDNLNSMLLSRILNKLHPAVLRLYQLVTAYNSLNNPHTTLYDLFGNTQRSVTFAEAGKLVQILKQQQPPATLNEFIQNISTRLNQLAENKNKSVNDAIKFWLKNCFGINYPKDIKQNNAGLVDLSFADYYINFLLYEEMYGSIDHADTEVEETDDVVATNQQHIRDILDIKLSQWLSWVAFINDEHDKEQQVIYHTYHGTKGEEYDNVVIIMENDFGKNKKNKFKNYFSSLSADENIQVRDEEDKELENTRNLFYTACSRARKNLWILYLDDINEIKDEIELLFGTVNTFEPAIE

SEQ ID NO: 65358 - protein, 765 aa, Serratia sp. FS14
MRIKHIEIANFRKLKAVHIDFSEETTIFVGANNSGKTSAMIALRRFLVDRSGFSINDLTLSYWPQIDAAAMQWEAAPDAQEPIQWERFSPFLDVWLDVPPNELHHVQKILPTLDWDGESIGVRLRFEPKDPDALQHEYLTAKRAAAEVMAQAKEFGEQAGSTTAFALWPRSMMEFLAQRMRSTFEIRAYLLDPSKLNMPEKGRASPQTLPENSDPIDGGDPFNGLIRIDEISAQRGFGHSDQTGYTQGNESREDITEPRMGKKLSSQLRNYYSQHLDPFDTPEPKDLQALMALHEAQTAFGTRLADCFSDALTELENIGYPGVTDPKLTITTNIRPIDGLNHPSAVQYEVPTHVTGSFGAHRLPEDSNGLGYQNLVSIVFALMAFRDNWMKVGKAGKSKGAEETLIPPLHLVLIEEPEAHLHAQVQQVFIKQAYGVLRKHDKLEDSPHLQTQLIISTHSSHLTHEAEFSSLRYFRRLPALAQSGAVPLTSVINLSEVFDGKDKTERFVKRYLKATHCDLFFADGAILVEGPAERILVPHFVREREAYAYLKRSYITWLEIGGSHAHRLKNLIEHLGINTLIITDIDAKDGTTNTAVVPKRGMGQRARNETVKTWLPKEESFDALLDMKSERKVLAEPSGYAIRVAYQTPIFMPFKSAEVLEAVANTFEDALVYENPALFSNLDGHGLIAKFREALKESADLSELATRIFEALKNGTKAEFALDVLFSEEIDRLKVPQYIDEGLVWLAEQLKRKEHDVLGKAEVGE

SEQ ID NO: 65359 - protein, 624 aa, Serratia sp. FS14
MSRLEVIIPDDEIDMSADAEIRKCLDLSSPKSFFLFAGAGSGKTRSLVSALQYVRDTFGDELRLKGQRVAVITYTNAASEEIQRRLDFDPTIDVSTIHSFAWSLIEGLNRDIREWLRAKITTDITKLEAEEAKGRKGTEASRTRLKKIASRTKRLQSLDNVKRFVYSPTGENLGRDSLNHAEVIHLTAYFLTTKPTMQNILIGRNPILLIDESQDTNKLLIDALFAVQAQHKETFVLGLIGDMMQRIYSDGKDGLDNNLPADWATPGKQMNHRCPKRIVKLINAVRSAVDKQVQRPRTNSLEGSVRLFVLPSHTVDKPAAERKIAMHMAEVADDEQWRNLALCKCLTLEHHMAASRLGFLELFAPLYSVKSWRTNLLDGSLPCVRFFTDEMLPLIQAKFAEDRFAIARILKKRSSLVSPDALQYATDQRSQLKLASAALERLMTLFAQGADPSLGDVLRFVADSALLPIPESLLLSVTSDNTPSNVTPHVDESDADHQTERTAAIGEFLLAPFSQVEKFASYVSGKAPFDTHQGVKGLEFERVMVIMDDEEARGFMFKYENLFGAKSVADPSVEAVRRLFYVTCSRAQQSLALVAYATSPEQVRQFVINQDWFNAGEIVIGIPE

SEQ ID NO: 65360 - protein, 630 aa, Pseudomonas sp. P482
MYLKQLEIEGFKSFGRRFTVEFHAGLNVLVGENGAGKTGVINALRQLFQDSESGKRSVAERDFHKSFELDAVPASSFAIKAIFGDLSIFEKVALNSWCGEQDEAVLNLTVLNREMRGRYSQDLWGGAIRTGVFNQQTLDLIHCIYLPPLRDAEQKLREGRQSRLSRLMKALCKDQLQVCAKTGTLHPLEVKVADFNSQLAAEQDIKRANALISSSLRAALGERLSQNTTIQFSESNFTRIVEGLRLLYFPNASPAELSQFRSLDENSLGYNNLLYIASILAELIVEDGEGPGERTLHKLLLIEEPEAHLHPQLQIRLLKHLQEVALNKNIQVVITTHSTVISSAVSIDNIIHINGGVEPLAVPARFCGLSEPSRRFIDRWLDVTKSNLLFSKGVILVEGVAEAIALPELAKIVLATRGKGLDTLDDYGVSVINLNGIYFAHFMQLFCEVEGQMRSRNLPIPCAGLTDKDPVKTQKVRVQDQLVDVIVKPHAGNLADGTNPALGLIPNIAMSQYGRLFSGELKTFEYDLAMTASNLQLMLQVAYNNWPTDGPIKASFNDMLAADFGAMSEAQKAEYAYELLERIDSNSMGKGLYAQLLADKLEQGDCAFAVPYYIQQAIFWACAIAEEAVQ

SEQ ID NO: 65361 - protein, 585 aa, Pseudomonas sp. P482
MTFPSEEQRRYLGSSIDDNVYLEACPGSGKTEVIAAKVAREIEDWQGYPGGIALLSFANSAADELRSRLIAHRQRAPVAYPHWVSTIDSFILNCLVGPVAHRLTGYAGKDGDFRLRLVDASSTVYVKTKYAIERIHVPANQYDFDLATGRFVFRTGEPGLDRKLNAMDLADWQLRDLREAKTRFKAAGFATYRDVEHLAIQILKEPKLLDFCARLALRYPFLVIDECQDLSVEQLTVLEGLLGLGVKMHIVGDLNQSIYGFRHADPLRVVQFIRDHGFIRLLLRQNFRSSQSIVNLCSELVPGNKTHGNPTIQPVMPVIVEYDDCPSEAMPLFMRLSDSYANRVIVSRGHSTLNRFFSGANDLNNTERLALACSLTGNDSAFAIQKSLALFGEWLSSKLDYSAKPNSFHCPVDVESELEWRLFLHQALAFITSAGASVAGQNWSRWCRVAKARLNELPMQAFVIADIAVAIAPLATLGLRSPAGLGEQLVTQRLSLVTLHQRRIRLATIHEIKGETHEATMLVSASRRGDQSHWADWISDKNLEAARLAYVASSRPKNLLVWAVKKLKAAERITLQRIGFEIANQ

SEQ ID NO: 65362 - protein, 683 aa, Brevundimonas sp. EAKA
MYIDQLRVWNFRSFGAAASEAADALGSSATIVSLDEGASVFIGRNGAGKSSLVQALLRLFGETREERTVQPADFFVPPTERLESHSQRRLFIEASIRFPELETDDTAAEKTVPPAFRHMIIEKAGEVPQIRIRLEATWQLAGTLDGIVEDGLYWILSDDAAPFGDVDPALKKKLSAAERGHVLVRYIPASRDITALTQLTVKSLGRSLMRSIRWEKKAEIDALIAKAAETLDAEGALTRVNAAINACWSQLNTAETGTTASLSILAPDLQQIVRTATVMLTPSATGRLMTLEDLSDGQRSLFHFALVKALLDLKLDLEGEIDDDPPSPFQPEFARAPALTLFAFEEPENHLSPFFLSRLLSELEKLTKTARVQAVLTSHAPAIVGRVDPSAIRHVRRVQATGVSHVAALAMPQGDADASKFLREAVRAHPEIYFARHAIFGEGPSEEIVLPRLAEALGVPIDRSFVAIVPIGGRHIQHFWRLVEQLGIPHTTLLDVDMGRSTGDYQQFRSAAAALMDSRRPLQGPALQDVDTALRMVRPAPAPGTPIDAVTISKWAQAFESEGIFMSGPLDLDMLMLSAFPRAYKTLPPGATGPQSPDDPARKLSAARRVLGDDGLGPAAYVGLAEADLFPWYAYLFLGTRGKPAVHLAALGEIDDLDIELCCPPVLSRLIGHVKASLEAPLA

SEQ ID NO: 65363 - protein, 642 aa, Brevundimonas sp. EAKA
MIPAEDWAPIGVAGLEPTALAAVGAPTSMLVVAGPGTGKTELLGQKAAFLLQTGGCRHPRRILAISFKRDAATNLRERVERRCGSTLARRLDSMTFDAFAKQLLDRFWRALPDHLALLGPYEIAPFIKRIEFEDLRRSATFGLDDPNHSAHWAKTMIGKNPTTAGIQGVGLDAFTKAAQGMNLHPLAIADHAQFLQLVQLRAALIQHTPRFGFAMIGLLARAVIHANPAIRRAICATYSHVFLDEFQDTTSVQYGLIAEIFKGSAARLTAVGDNKQRIMGWAGARSDVFAAYEADFLTDSPASGRVSLTRNYRSNERIVQVLNTLKSNLAPSEPDFVAVRPAPDLPTIDICAILVAADEDAEAVAIADKVATALASGSSPRSIGLLVRQKAGDWETRLKNAFASREIAFRNEDRDVGGASIQDLMTETYPRIILDMLDLLTRRHGGVLWSAAVGHLAAVRGVVIDDEPSIETELATELDAFHRANRFSARASPSPGDVAAKVAVIEGFLGVAALRAVAPQYAAGDLFDRVRKATVAFLIESAEGSADWSTVLNRFSGVGQTPLLTITKSKGLEYDLVMLLGLNDQEWWSFDKDPNEGHSNFFVAASRARERLLMTRCGTDRSHKIKSVFDLLSAAGVSEISV

SEQ ID NO: 65364 - protein, 634 aa, Pseudomonas sp. WCS374
MYLRRLDVSGFKCFGEPFTIEFNDGLNVLVGENGAGKTGVISAVRQLFNDSESGKRMISERDFHRGFDAGAVASEQIHIQATFSDLDANDAVAFEDWCGHHDEAKLTFEARNQESRGRFKHHSYGGHEYTNPLQTETLDLIHCIYLPPLRDAETKLREGRQSRLARLLKALCRKDLDAARKSQELHPLEKRVGEFNRELAESDEFAIKLANQRIGESLKAALGLHLSQGTVIQFSEVSFSRIVEGLRLLYFPDLTQVDPAQFRSLEENSLGYNNLLYIASILAELILEEDERQGEKTFLRLLLIEEPEAHLHPQLQLRLLRHLKTVAERRGIQVIITTHSTVLSAAVSVNHILHISNEGRPRAVSLQGCGLPDPSRRFVDRWLDATKSNLLFSKGAILVEGIAEAIVVPELARFVLRQYGEGKDSLDDYGVSVINLGGIYFKHFMQLFCDVTGEQPGENVPIRCAGLTDNDPPKSIVSIDDGKGGKKDVPYQPHADDYQLGENPALGLQAVINESEFGRLFAGKYKTFEYDIALEGNNLQWMMPVAANLWPVADGPVVRALNSDAELDFNSMKPETKAPYAHALLGRIDTDEIGKGVYAQAFADKLETLEGEFVVPDYIRQAVLWVCGLQERVE

SEQ ID NO: 65365 - protein, 583 aa, Pseudomonas sp. WCS374
MNFTREQLDYLDAPLDRHAYLKACPGSGKTEVVAAMVSKVVSEWSHFPSGIAVLTFSNSATDELKARVHKHLREPIGYPHIISTFDSFVFTRLVGKIARDLTGYKGKEGDYRIRILEKSAKIIPTRNPICGRRIPACRYNYDLDSARFVFSTGERALDQQLNGVNIDEPTRKDLIATKRRLWEAGFATYGDIDMLALIALREGKYDAYFTRVARRFPLVIVDECQDLSEEQLRIVEKLHDRGVKFHFVGDLNQSIYGFRRSNPERVEKLMARLDFKPYELTANWRSGQAIVDLCSNLLGIGRIKGNPKIASIPPQILEYQQCPSELLPTIRDLTRQYQRVVLVARGHNTLQRLRSGDAFEGIEVLAVSFISASTGSLKDIKESLRTFAKWLTGKLEMQVSRAGPYCPVAMESKLAWRQFIYESLKFMAANGAADPAMTWSAWARNAKLALRQLPDQAFVPAEIREDLEGLRELNISARAGEGQNQVSVRLMSHERQEYHPDSLRYETIHQVKGETHDVTVLVSSQQPGVHLSHWRDWLRDRSTEAARFAYVASSRPQHRLFWAVKKLKPKEREALTQMGFELP

SEQ ID NO: 65366 - protein, 622 aa, Rhodococcus qingshengii
MHLSECHIEGFRSCYDVTIPFGPSVTLLVGENNAGKSNVIEALRLATVPLSGRRSRYFETDDLARNHSGPITVTTTFSGLSRYQKAQFIGALDLSNGTATYTTRFEPDSGSAHRGRIEYLTGHVPGPDPEPEKRDQINHVYLAPLRDAQRELDSASGNRLALIMSHLLTSEEQESFVETARAGLDELRIHPAITTIQNRIQHHLTPLTDPAREQSMGIGFDAPELRRLARSLRLKMADVDVDLADLAASGLGYTNLLFLATVILELQNAQESELTLFLVEEPEAHLHPQLQAVLLDFLRDQAEQSACDDSNRPAGRIQVIATTHSPNLASAVGTENVVVLRSSTGERVDDCRTVAVSATVALPLRGLDLTPSERRKIDQYLDVTRSELLFARRIVLVEGIAEAVLVPALAHHSVFGDDSDQARKSRRMFRGASIISVGSVDFAPYIKLLLSKVGKHRLADLLIVITDGDPPVPRKPSKSSSSSTSNDVIESDASDDDSGPSYNRALTLEALGRQLDADDVLHVAEAPHTLEADLLVAGSDNHEVLGKAYIAQHPKSAHRWTEIVMSADPAAEFHKRLQWNKKLISKGQFAHDLAQSIADGSSFTCPDYLRAAITITTGIDSQ

SEQ ID NO: 65367 - protein, 573 aa, Rhodococcus qingshengii
MREAITFTDAQRALIEATSSTYVSACPGAGKTQAIVQRFVERPAIVPRLGIALLSFANAAVDEAISRCAGKPELLHSPNFVGTIDAFINRFIVGPVFLQRRGIRPQFSSSWAHVTNTLVSAKGVRLQAPLDWFTFTIDGSAVLDRAPWDKKTMVEKLTPPHREKLENRAGQRWASYTRLGIFDSAAARLVMAFYLDLPEVQATLVDLLSARFCEVIVDEVQDCSAEDVKLLKFLLSADIRLVMVGDRDQAIYGFRGSSPEALNDLVEGVAVGQRLNGNFRSSPAICSAVDSLRFGTDRDVPVGTNASDVSPVQLVAFDKPVDLHAKIGDILDATGHLKENVVFLAHGTSTARTHAGESTLTKPGNGKLARFAAAVHTVQDASSTNRARAEGLRRLEMIVLEFAGFSEDRDIDDYLRPRGLTARSFRESCLRLAMTLDDPYRSTPATFKEALKQQTSSRKLLSWNLDGIPARSDAWPTRSTVAKTTNYVHSTVHGYKGLQAPGVVLVIPKPSPSMADNEHGVTQWSCSEQGEARRVLYVGASRAEQLLIIAAHTAVHDAVAKNLTDDDVNFVQS

SEQ ID NO: 65368 - protein, 598 aa, Rhizobium etli bv. mimosae str. IE4771
MRIVRVHIENFRGIKLADVYLEGTTVLLGDNNTGKSTVFEAIELAIGADRLARTQAIDEHDFYGGDYRAVENQPPKAIVVEVVIAGLDEQHCTKFRNNLEFWRVADRSLLGAGAIGGAGQAGTEPAVRVRFEGAYDAENDEFVAKTWFAVPRQDDGTPISECRSGDKREFGFLHLRALRTGNRALSMERGSLLDVILKTHEVRTRMWEGLLGRLRGLDVVGEEDAEFGRILTAIRDAMREIVPGEWADAPHLRVSELTREDLRRVLKSFLATGVPGYAAPFQHQGSGTINALVLAMLGLIAQRRNGRVIFAMEEPELSLPPHVQKRVVDKVRELAAQALFTSHSPYVIEQFTPEQMTVLTRDNAGMLTATSVVLPDNLKLKIFRDGFRTRFCEALLARRVIVVEGKTELVAYSAVARRAAELAPAQYKRLDALGWVPFDAGGQTAVAPFASFFRGLGKTVATIFDQQQPDARAAIVAACHAPFEQPYAGFEHMLLAEVSPAMQAWFVQWFAAAGEWPPALAHVIPPVGSPEAAYRAPFLSLFTHKKGDDYLTVFLDQCQVGHFPQTMLGILTALKNMVAPPAPPAPPPAAQQPPGVFG

SEQ ID NO: 65369 - protein, 568 aa, Rhizobium etli bv. mimosae str. IE4771
MALVLCDQRRRLLETDGSILVRGGAGSGKTTIALAKACADLAADRLGNAGKALFLSFARATVARVAEQATASIPHEQLARIEINTYHGFAWTILKSHAYLLCARPGVSLLLPAQARGSLAGLDGEARATRQRELFDQEGLIAFDLFPTLLTELFARVPLLAQAYARAYPLIIVDEFQDTNTAEWQMVAQLGQHSRLIALGDPKQRIYDFKGADPRRFDEFIEAFRPTQFDFLGENRRSPETQITDFADDMIDGVFNATAYAGVSISRYGGQSLRPLKQEILRAVGRLRRANEWSLAVLVPANALAVGVFDYMARADHGLPRYPVEILVSAEGPMLAAAMVALLLEPRDHADHLGALVLDGLAAFELGRNEAASAGVITKAARLRTIARSLRAQGDGGFGARGIGPDVRALLENVAAHRLSGDPMTDWRSIRAIFGASPRAELQAVAKEARHMRLLRRGAQIESRFAEAWRSHGAYRDARSLLSAAVVEDQFAATTRPHHGVTVMTIHKAKGKEFDEVIVFEGAYQRYLQPRGADAERSARFNLHVAVTRARRAVTIMTPQANPCPLLP

SEQ ID NO: 65370 - protein, 355 aa, Vibrio sp. JCM 19052
MAYHHADYSVQLDTGAIEVNDFIDKLQLGAMTNGSHVMLGGDGRNNQILLALWKAKSIVEQDIEHEVIFYVVEEPEAHLHPHQQRKLAKYLVNELPGQTILSSHSPQIASNFSPESIIRLLPKGKSTIAASNGCSQCIVNGWEEMSYRMSILPAEAFFSNGVFLVEGPSEMLFYNELARYLGLDLDYLNLSILSVDGISFAVYISILDALEIPWVMRTDNDISKIKGKEEWQYAGINRCLRAAGLTTFSHSNQKLFPIDAYNNGTWKMISDKVNGKGIYLSKVDLETDLVKELPAPILKALNKESEASAVKYLQGKKALRMRSLLAEIKAELVSISSGDLAEPLYKLAEKAKANS

SEQ ID NO: 65371 - protein, 224 aa, Vibrio sp. JCM 19052
MNTFKPTPQQLSAIEYTKSMIITACPGSGKTTVMKEKVRNTTLSLPSHKGVIAITFTKKASAELKKKCTANAHDTKQSFFGTIDSFCLKEIILPFISRVWGKPEVELKTIKKLQTPHVHYLQQKYTSPTCEDIAADSGFKKLYDEGVLWMNSFAALALYVLKHSKSAQRYISARYSHVFIDEYQDSSLAQHQLFFSLFEQGLIATAVGDVWQSIYEFRGGTPSY

SEQ ID NO: 65372 - protein, 522 aa, Bacteroides fragilis str. 3725 D9 ii
MGDFDNVIFKFDIDELKYGGRIPHQLSISREVSFTFIKALRDVVSDFQDNRKNPLLTLLKNKSEDIKEEDFKPISTKVDDLNKSIEELDDIQMITNNISETIKEAVGTTYSPSSLSIKSNLPSEAEKLLQSLKLFIGEPGEDYEGGIHELSLGGANLIFLTLKLLEYKYRKEKDKIANFLLIEEPEAHIHTHIQKALFDKLNYTDTQIIYSTHSTHISEVSNISNMNILGKFRNYSEVYQPFIGLKEEEIVKTQRFLDAIRSNLLFAKSVILVEGDAEEILIPIMVKQTLGVSLDELGISIINIRSTGFENLAQLFHNQRIKKKCAIITDLDTSITGQKTEASKRGKTRKEKLDALKKRNKWIGVFYAPYTFEIDFLKANNKDEVLSTIKDVYVDKTAIQKSEKDINSKDIKKYGKRILTMANYIGKGWYAILLSNYITPTTCIPNYILDAILFVKPEYSEELLLQIFSYVVSRYEQSDKIKSLNKNILKCKKGELPLTDLIKELYEKLEKEEPILYILNRL

SEQ ID NO: 65373 - protein, 589 aa, Bacteroides fragilis str. 3725 D9 ii
MFVWKNGELNPEQESAIFNENSVLLIACPGSGKTRTLTYKIAYELSNLKSNKQYIIAITYTNRAADEIKERIELLGIDTKQLWIGTIHSFCAEWILKPYHMYIEELKYGYTIINAHDTESYLTSLCIPYASAKPKITYWDCQCFYFTSRGLVIKCTNSQKTESVISIIKSYYQNLKEKKEIDFELILYYSYLLLRDNKSICKTLSHIFPFILVDEYQDTKELQYMILGAILETGNSSKAFIVGDPNQSIFSNLGGFPMTKVDLEKNTGLHFDELSLTKNYRSSSRIISYFNYFKTYNNTIEAVGKDKDYQSIIRYNKRVSINDLEDEIIRIIQFNIDECGISPNEICILAPWWIHLSGLTRNLMARLPQYSFDGPGMAPFARDIDNFWYKLSRIILTDATPSLYIRRLRWANEIKTDFSSIGIDRNLSAKKILCICNSILVNEQDGLEYLKKFFFLFLHELNIDIHQYNYLEMHYNAFFESSIKRIERLRKEGSEFISHIDTFRKVFRQKEGITISTNHGVKGAEFDTVIAFGLLEDYVPHFSDPNKVENAKRILYVIASRARKNLYLISEQDRGKIPTIILNNYKYKY

SEQ ID NO: 65374 - protein, 636 aa, Bacteroides vulgatus str. 3775 SL(B) 10 (iv)
MYLKTIYIKNFRGIKELKVSFNQKINVIIGSNGSYKTTLIDAIRLFYGWGDTNSNLEIGVEDFHRELIKDDNEENYEYTNNQITIEYTFDEMSDAQKGAFSDYIFMDSDKSILGRVTIEYHLDEKERVSRNYYSGIYEAQQKADYESFQLFKSYYLSALRDSTRDLMNVRNNILGRVIKRKIENNNTTESIKNIIKIANDELLKQKEVVETENGINNNLQNIFYKQPQQVGLQISQSRLEYIINVIKPYLPRTKGNGVNCSIWENSLGYNNLIYIATVLSDISDFQEDETNSICALFIEEPEAHLHPQIQINLYNFLKNAGLHVNTQVFVTTHSPTLTSRVPLENLILLNGDAYNLANCFVDREQENIVIEAKSKKKIKNNQVMYYKNMLSRYIDVTRSQLFFSKGALFVEGISEGLLMNAFSNILGKSLIENEIELVNVEGTAFGQFIMLFNSNDRMKRLPIKAAFITDGDQFTDSKKSKYNLDKLIENNYSLLNELRINIYASSETARVENMKAMSNKQKDITVKTGVKTLEYQIALSNVFNTKKQTQESIFYKYLRNDDVNLTNVEDYINTIESETLSVEEQRNIAILLWKCMPGKSDFAQQFACYLDSLPKTEREKFIVPEYIKEAITFLIP

SEQ ID NO: 65375 - protein, 591 aa, Bacteroides vulgatus str. 3775 SL(B) 10 (iv)
MKYEITEECEKYINARGNTILMACPGSGKTTSIVYKLRIITKEIEKNYGSGQGVLCLSFTNKACDEIRMMYKLMHNELLHYPHIVSTIDSFITQHIVLPFWYLCEYCKQRPIVVNDETLLHNLYWKKSNSGSEYIVNELKDFSQKGYKYLPEKIQKEGCGYRYDNTLIDKEHHTDLLSYCRAIFEYRLSNGVITSNDALWIACNILKNNSFVATALSNRFPYIIIDEAQDTSELQYYVFEALRKAAVKSMEFIGDLNQSIYEWRNAKPEMLNIYTKKSDWKLLNLTCNRRSVQHIIDFYSRLKPKGLPTFVSHGVNNKNIKIHIYRYDNEVEEKVLEHFNTVCENHQLKERLVLVRAKEDILGKKQETPKIWKNPLAQQIIDSQILYYKNKIKDAIHSFKWVLACCIYPNDFLARKKYYNDEKDKIGKHSMIISMLKELPKLTNSIEEWEKQVVRYIKDKLEIESEINLNRKCKLDGYKMAELIKQPMNNYFGIDQNNYIISQTIHSVKGASVDAVLLFLDDKKSSQGLSIQDIPANNNGIVNPKEKHRLIYVACSRAKQFLSLAVPSSVSEEQISRQFQGLEIDIVHITK

SEQ ID NO: 65376 - protein, 522 aa, Bacteroides ovatus str. 3725 D1 iv; identical to SEQ ID NO: 65372

SEQ ID NO: 65377 - protein, 280 aa, Bacteroides ovatus str. 3725 D1 iv
MFVWKNGELNPEQESAIFNENSVLLIACPGSGKTRTLTYKIAYELSNLKSNKQYIIAITYTNRAADEIKERIELLGIDTKQLWIGTIHSFCAEWILKPYHMYIEELKYGYTIINAHDTESYLTSLCIPYASAKPKITYWDCQCFYFTSRGLVIKCTNSQKTESVISIIKSYYQNLKEKKEIDFELILYYSYLLLRDNKSICKTLSHIFPFILVDEYQDTKELQYMILGAILETGNSSKAFIVGDPNQSIFSNLGGFPMTKVDLEKNTGLHFDELSLTKNY

SEQ ID NO: 65378 - protein, 636 aa, Bacteroides vulgatus str. 3775 SR(B) 19; identical to SEQ ID NO: 65374

SEQ ID NO: 65379 - protein, 591 aa, Bacteroides vulgatus str. 3775 SR(B) 19; identical to SEQ ID NO: 65375

SEQ ID NO: 65380 - protein, 653 aa, Escherichia coli O78:H12 str. 00-3279; identical to SEQ ID NO: 63058

SEQ ID NO: 65381 - protein, 621 aa, Escherichia coli O78:H12 str. 00-3279; identical to SEQ ID NO: 63059

SEQ ID NO: 65382 - protein, 634 aa, Escherichia coli 2-222-05_S1_C1
MKLETIRLFGFQSFGHESTELSLTDITYIIGPNGSGKTAVLQALCRLFAFDPALRRIQRSDFHVPFDEEEVPLERQLWIEADFLFPELEDDEDNSTVAPHFSHMRLDEPDGVPRVRFRLNATIGLDGDIEDTLVYVLDVDEDDLPLNVAQVPRAERNHIQVHYLPARRDPADHITYGANALLGRLLRAVRWEAERETIQGLTEQISDSLAANPSVNAFSESLKATWATLHKGKFFADPKITFVASEIESLLRHLSVSFTPSHDGSFVDFSRLSDGQKSMLYLSLVLSSQAIGRAVLAEEDVSFDPDKLRPPVFTLVALEEPENSLSPHYLGRIVSSLNVMTKNLDAQALIATHAPTMLRRVAPELIRYLRLDESRETQVTCIKLPDETDEAHKFVREAVQAFPEIYFSRLVVLGEGDSEEIVLPRLLQVKGAPVDESAITVAPLGGRHVNHFWRLLTALKIPFFTLLDLDVARHGAGWGRIKYVNDQFSKRQRRNKLPERYGIPKWDDEKQKIRDYEHYLDMLEKRGVFFSYPMDLDFAMLLAYPEAYNVEEEKPDDATIKAVLGKSHYDSSQYRDDELALFNTYHQRFKLGSKPAAHIEALTQLNDADLLKNMPDSLDRLADAVIAKLTELPE

SEQ ID NO: 65383 - protein, 554 aa, Escherichia coli 2-222-05_S1_C1
MITVEEWQPADGLTLEPNAKRAAKASKRCLALTAGPGAGKTEMLAQRADFLLRTGTCRYPKRILAISFKVDASRNLTERVERRCGRYLASRFDSFTFHAFAKRIIDRFRPVLTGEYALDAGYTIVDKKSGASRHEIAFGDLVPYAIKILQTSKIARNAIRQTYSDIFLDEFQDCTNLQYDLVKLAFQGTKIRLTAVGDTKQKIMAWAGALDGIFQSFTKDFNAVPLNMYRNFRSKPTLLRVQNEIIRKLDPDSVMPDAQLEGDDGEVFAWKFEDSQTEAIYLADLIYEWINTEKLPPAEIAVLISKQPDLYADHLFKELEQRGIPYRNEQQMQDITVEPVARLIVDYLSCLYGHREPKAWIRLMNQLVPFADEEIQTSVRKDLDHLIKKHRKGVSEAKKTDAPFSEWWTFSRAFLKHIGLQTLVALSPDYESHDRLKQVMRDAKARIKDLLEIESDLPLALKRFSDDQAVRILTIHKSKGLEFDSVVIMAIENEIFFGDEEENRCAFFVGVSRAKRRLILTHTNKRDEPANARHWKVFRTARVEYFDYVLPFVR

SEQ ID NO: 65384 - protein, 634 aa, Escherichia coli 2-222-05_S1_C2; identical to SEQ ID NO: 65382

SEQ ID NO: 65385 - protein, 554 aa, Escherichia coli 2-222-05_S1_C2; identical to SEQ ID NO: 65383

SEQ ID NO: 65386 - protein, 634 aa, Escherichia coli 2-222-05_S1_C3; identical to SEQ ID NO: 65382

SEQ ID NO: 65387 - protein, 554 aa, Escherichia coli 2-222-05_S1_C3; identical to SEQ ID NO: 65383

SEQ ID NO: 65388 - protein, 623 aa, Pseudomonas aeruginosa C2773C
MHLVRVRVRNFRGIAYGEVHLNGHTAFIGDNNAGKSTLLEAVDLVLGPERLSRRPVIDEHDFYAGTYVDPAKNEVVPIQVEVIVAGLSDEQLRHFRDHIEWWDTQTKSLLVGAPPEGTDAPHVGAAIRVFFNGWYDVDEDDFAGDTYYATPEMPDGSYPRFSAPDKRKCGFLYLRTLRTGARALSLERGSLLDVILRLKETRLTMWEDLLDQLRALPVGETEDIGELLVAVQDAVRHYVPSDWAEQPHMRVSDLTRDMLRRTLTVFMGTGAKRPDGSVYSAPYQHQGTGTINTLVLALLSIIAELKQSVIFAMEEPEIALPPHTQKRIINSLRQKSAQAIFTSHSPYVLEEFEPAQVVVLKRTAGVMTGVPATYPPAVKPKAYRTEFKARFCEALLARYVLVLEGRTEFDALPAAARRLAELDPTRFKSLENLGVAIVDARGETNVAPLGAFFRSLGKVVFAVFDKQTPEALATITASVDHAYESATKGFENLVLYGASEVALRSYAAVVVVGGDWPQHLAAYTPTPATPLANLQVALSHYFGWAKGGGDAGDLLASCPTANDMPEYVRTTLAAIKNVIEPPQPPPLPHQLAGVPPLPEAAAKPPPLAAAYGKFQPSPPQPLA

SEQ ID NO: 65389 - protein, 570 aa, Pseudomonas aeruginosa C2773C
MTEVWSDQKRGFLACAGHTLALGGPGAGKTHVALVKARDEIRSGVLKPGQKILFLSFARPTVARIIEKASELISREDLKQLEVSTYHGFAWSILRSHAYLLNGRPSLQLLPPPEAAAHLADIDKAQHENEKRRLFEHEGRLHFDLFASLVSELLSRSDRLSAIFSDAYPIIILDEFQDTNCDEWALIQQLGKRSRLIALADPEQRIYEFRGADPRRVGDFLEIFGAVHFDFAGENHRSSGTDITTYGNDLLTGANKGKVYQQVKITRYGFMYGKSLHFNAKAAVLSALDRLKAIPDKSIAILVPSKRLMLELSDYLSSAADGLPELHHDVAMDAEPPALAAGVIATLLEGGTAGDLASRMLGALHSHIRGRRGGKPTPQSELDLAGALSGFLSSGKIRGAKRQLIVSEVQRIAELRQQLQLTGDPAEDWLQLRGLLQSSAAVALKQVATDARYLRLLHRGSVLRANLGALWRAQGEYKGAEEAVRSALMQEHFAAAQKDWRGIHLMTIHKSKGKEFDEVIIYDGLFQRIAKAPQDPKICAQDLLVLRVGVTRAIRRTTILTPKRDTCPFL

SEQ ID NO: 65390 - protein, 550 aa, Pseudomonas aeruginosa
NNVGKTAVVDALRALLAGHEESYPRFSVDDRHRPKVGQPDGDITFHYVFRGLDANDEADFLAALQPGNDGKLEAHVWIRYSDADKGGRFRIKRWCGAHEDVGLTSDMMENLRGVYLQPLRDASQGLRPSRNSQLSRLLQLLADEAGRAGINEALRRLDDELKAHAPIVRTQDAISTRHSSMLGKQLAQLLEVGLSASDFQRLSSRLSLTVDSFEIEQNGLGFNNLIFMAVVLSELAKNPEATYRGLVVEEPEAHLHPQLQAVLLRYLESIQIIDGEKPVQLFVTSHSPNFASIANLDCLTCLVETGEGVETFFPRTIKFGKGKREKLERYLDVTRAELFFARRVIFVEGAAELMLIDALATKAGHNLREHGVSLISVEGLNFDSFLPLFGEQALKIPTALITDADPVAEAADGEEPEALYPGADDVVQVSDNTAKMKALEDKFVQVRHGVKTLEYDLALYADNRDAMLKALAEMHPKIAVAVKAAVDAAGSDAEKARALFSGMFERPQNNVQKGRFGQELAQVLKDGAACVVPAYIREAIEHVCQVRVAP

SEQ ID NO: 65391 - protein, 578 aa, Pseudomonas aeruginosa
MNELSPEQRAIVDAPMAPLAVIACAGSGKTGTAVHRVVEMRRRLGERRGRVALLSFSNVAVETFRKGYQSLAQVLPADAGRSRVDIDTLDGFITANVLRPHAYRTMGATQSAFLVVGSEPFLNGFTYWTGQYPLPVTKVQVAFHGGAPIFYYDVFGNPELLNQAVARQLVDRLGRVGAYTHDLGRYWVYRTLQEQPAILRALARRYPHIVVDESQDIGTAHQAILDLLAAAGVQISLIGDPNQGIYEFAGADGTFLREYHARAGVAEYALTHNYRSLPSILDLANRLSGRDDTPERRPEEGAGGAYFIGYAKAELPQLMDAFHAEVANLRLRPEKSAVLCRGRAQADELAGVDAPAGQGVVKGFASAAVLRDKQRDYHSAFKLVASSVVALMDNPPNGLLSKLAKPAQFPEVKGLHRLIWAFTRNAGTGLPSSELVAAKEWHAALLERIRNLLDRVQAEFGFLPADNLGRKLAKRGLPETPLALAEDLAAERGARIRVDTVHQAKGESIDAVLYVATKEHALAMLGGVGTELGRIGYVAITRARNLLWIGVPANALKELRPALLAAGLQEAGAVAKPE

SEQ ID NO: 65392 - protein, 634 aa, Mangrovibacter sp. MFB070
MKLATVRLCGFQSFGKEPIELNLEDITYIIGPNGSGKTAVLQALCRLFAFDPTLRRVQRSDFHIPFDEEEVPSERHLWIEADFLFPELAQDEDNSTVAPHFSHMRLDEPEGVPRIRFRLIATMGLDGDIDEGLVYVLDIDADGSPLSVAQVPRAERNHIQVHYLPARRDPADHITYGANALLGRLLRAVRWDAERVTIKGLTDQISESLASNPSVNAFSESLKTTWAALHKGKFFADPKITFVASEIESLLRHLSVSFTPGHDGSFVDFSRLSDGQKSMLYLSLVLSSQAIGRAVLADEDKSFDPDKLRPPVFTLVALEEPENSLSPHYLGRIVNSLNTMTKNVDAQALIATHAPTMLRRVAPELIRYLRLNESRKTQVTSIKLPDKTDEAHKFVREGVQAFPEIYFSRLVVLGEGDSEEIVLPRLLQAKGAPVDESAITIAPLGGRHVNHFWRLLAALKIPYFTLLDLDVGRYAAGWGRIKYVNDQFAIHEPLKTLPDDHLIPDWNDETHKIRNFANYLDVLEERGVFFSYPMDLDFSMLLAYPEAYDVDKEEPDEAIIKAVLGKSHHDSSQYNKDELALFGTYHQRFKLGSKPAAHIEALTQLTDAELLDDMPHALDKLAEAVIAKLAEQPE

SEQ ID NO: 65393 - protein, 554 aa, Mangrovibacter sp. MFB070
MITVEEWQPADGLTLEPNAKLAAKARKRCLALTAGPGAGKTEMLAQRADFLLRTGTCRYPKRILAISFKVDASRNLKKRVERRCGMDLASRFDSYTFHAFAKRIIDRFRPILSGEYALDAGYTIVEEKKGPSRTEIEFSDLVPLAIQILKRSKIARNAIRQTYSDIFLDEFQDCTNLQYDLVKLAFQGTTIRLTAVGDTKQKIMAWAGALDGIFQNFVQDFNAVPLNMYRNFRSKPQLLRVQNEIIRKLDPASVMPDEQLKGNEGEVYAWRFDDSRIEACSLADLISGWINNEGIPPAEIAVLVSKQLDLYADHLMAELQARGIPYRNEQQLQDISVEPAACLVVDYLSCLYGQREPEAWIRLMNQLVPFADEEAQASARKDLDQLIRNQRRKVSEAKKTDSPFSGMWVFVGGFLKHIGMQTLVALSPDYESQERLKQVIRDTRARIENLMGGESDLSGALKRFSNDQSVRILTIHKSKGLEFDSVVMMAIENEIFFGNEAENRCAFFVGVSRAKRRLVLTHADKREQPVDAKRWKVVRTAQSEYFSYVVPFVT

SEQ ID NO: 65394 - protein, 768 aa, Burkholderia cenocepacia
MADASPVSSVSGDIKLRFLEICQFRRLGKVQMDVDTKTTILVGANNSGKTSILAALRHFLADGAPFGAFDISLSQWPKLRALGKSWEALTEDPSTVAATDDLWEEQRQTLLAAMPTLDLWFDAEAGMYHYVKPFLSKFSWNGGAVGVRLRLEPATSVDELKNLAWAYCTARSPVKEMGTDSLAWPIDLLDFWLREPSKLGQVRAYKLDADNNPMTGLTSYVTQVLPAGVGSIERKHLSNLIRVDFVAAQRGLGSEEADSRSTSGTHRVGMFSNQLLKFARQHLNVASTGHGHRTDLVKAVAEAQRDLDKKIHEAIADSVAEVKKLGYPGLHDPQEMRFRTRIQTADLLDHGTAVQYSMQKESHEELLPEYSIGLGYQNLQSLSYQLVSFKAARLKPEKGSPAPVHLVMIEEPEAHLHVQVQRIFPDKAYKLINPTEKDASTLQSQLLISTHSSHLAHAEDFDRLRYVRRVAKNATSGMPTTEVVNLGQVFGDDTKTRQFAERYFRVQHTDLLFANAAIFVEGVAERMLVPLFIERDFEELNSRYVSFLDIGGSHAHRLKPLVERLRIPTVVITDIDPCEEKEGKAKKNGEPTKKLVAVANTGQAGLHCGNPTLRGWHPKLQTLDEFKNPTDDQLVWNESGCLVRFAWQLPVAEADGKWPSTFEDSLILTNIGWFKGLMDEKDDDDDTENEAPTGALGSVAKTVAKAGTVAELLGALHVLMHDSFKKGDFAASIFEKVSAKAPVTCPKYIADALVWLTKQLEPNQELMG

SEQ ID NO: 65395 - protein, 652 aa, Burkholderia cenocepacia
MNTVPMIADNNRDAGVVEEICGYLTEEPARSYFLFAGAGSGKTRTLVEVLRRLTGVVEHEKGGQLARRLRMYGRSIRVVTYTQNAVSVINGRLGDNDLVNVSTIHAFCWELIGGFNEDIRAALIAVTQAKLEKETEEALAKPRGITKAKQRDLDEIKADIEEFRSTDVFVYHPDRNTYGAGALAHNHVLEATAWLLQNKPTLRTILKDSHPIILIDESQDTMKGMLHALIDIAEPRGNGLTLGLLGDHRQRIYTDGHSNLPSLVPPSWATPELQMNHRSQRRIVTLINKIWEAKLEGRTQPANGVAQHPRTEKAGGVVRLYVGNTSLTPEEKVRGERWCADQMRHASGAAAWSDGKFQLLALEHKLVATRGSFLEAFDAMLLLDPNTAAPSGSGENKGPAAAQVLLNELAQLEACVGADGAVDESKVTEVFRRYGRLDDMPEDAALRACRVDEIRQAVTAFATVCTDPKSTVSDVLATVLSANLFEVDDRLLVAYADKSPPPPAPGRGEEESKQDRMRRGWCKLFAAPWNQLQKYRKYLEGNSTLATHQVVKGSEFRHVMVVMDDKVANGNQISYDKIFGGSKLSSRDWENVDSGKETTIDRSLRLLYVTCSRAQESLALVLWSSDPTAALAQIKNSDWFVNGEFEVIPPLT

SEQ ID NO: 65396 - protein, 663 aa, Vibrio parahaemolyticus; identical to SEQ ID NO: 63134

SEQ ID NO: 65397 - protein, 583 aa, Vibrio parahaemolyticus; identical to SEQ ID NO: 63135

SEQ ID NO: 65398 - protein, 663 aa, Vibrio parahaemolyticus; identical to SEQ ID NO: 63134

SEQ ID NO: 65399 - protein, 583 aa, Vibrio parahaemolyticus; identical to SEQ ID NO: 63135

SEQ ID NO: 65400 - protein, 663 aa, Vibrio parahaemolyticus; identical to SEQ ID NO: 63134

SEQ ID NO: 65401 - protein, 583 aa, Vibrio parahaemolyticus; identical to SEQ ID NO: 63135

SEQ ID NO: 65402 - protein, 663 aa, Vibrio parahaemolyticus; identical to SEQ ID NO: 63134

SEQ ID NO: 65403 - protein, 583 aa, Vibrio parahaemolyticus; identical to SEQ ID NO: 63135

SEQ ID NO: 65404 - protein, 663 aa, Vibrio parahaemolyticus; identical to SEQ ID NO: 63134

SEQ ID NO: 65405 - protein, 583 aa, Vibrio parahaemolyticus; identical to SEQ ID NO: 63135

SEQ ID NO: 65406 - protein, 324 aa, Vibrio parahaemolyticus
GLSDEQIGFVQRYLDAIRSNLLFARSVVLVEGDAEEILIPILLKKVLGLSLDEIGISLVNIRSTGFENIAMLFNNERIKKRCSIITDLDETFFDTTIYPTDSDADRKKKEKALGSEETGFARKGRLDDFCQNNPWISIFYAKHTFEVDFIQSSNSDYLKMIVRDVYTQPATVNAATTELSSTDIAISGSRALTMANYQGKGWFALTLSKVIDFKVAIPEYIFDAIKFAHGDFNAELTFKILKHRYESVIEHVKDGLDIIERLDEEGNVSLKQEWEAYLAPYESGLATFTPKWEAFNPLGGDINVLKAQLMNDLPTENNDILTRI

SEQ ID NO: 65407 - protein, 596 aa, Vibrio parahaemolyticus
MFVWDEEDLNDEQVAAISEPNNVFLVACPGSGKTRTLTYKIALELSRLDTINKWVVAITYTHRAADEIRERIETLGVDTSQLWIGTIHAFCLEWILKPYSLYHDKLKHGFKIINSYDSEEIISRICSNIRTERIRYGECSHYYTPRGLELTCAGNKTSLVRQVLGDYHLHLEDNSQIDFEQILYFSYEILASNSAIAKIIANLFSYVLIDEYQDTKEIQYSIVASVIKASRGGVKTFIVGDPNQAIYGSLGGYAITQQELEQITEVSFTPMALDKNYRSSSRIIDYYSNYNVIPSATVAEGKYKDHLSVITYDQVTHKDYLVEQVSRHIEHSVENLGILEKEICVIAPWWMHLAALTRNLVNRLPQYSFDGPGLVPFSRDIDNFWFKLTQIILTEPSPNMYVKRLRWASDILFDMELAQVDVNSITSKQLLKTINSISIDEDDGLTYLRSFFDELLHALGIDFALYPMLKEHHDSFFNSTQNRIERLRNESALFATDIEAFRRAFKPRTGIKVSTIHGVKGGEYDVVISFGLLQGLVPNFNDSSVESSKKLLYVIGSRARKNLHLISEKGRMFGFGRYRSERQPTEVLCNLVYTYD

SEQ ID NO: 65408 - protein, 663 aa, Vibrio parahaemolyticus; identical to SEQ ID NO: 63134

SEQ ID NO: 65409 - protein, 583 aa, Vibrio parahaemolyticus; identical to SEQ ID NO: 63135

SEQ ID NO: 65410 - protein, 663 aa, Vibrio parahaemolyticus; identical to SEQ ID NO: 63134

SEQ ID NO: 65411 - protein, 583 aa, Vibrio parahaemolyticus; identical to SEQ ID NO: 63135

SEQ ID NO: 65412 - protein, 663 aa, Vibrio parahaemolyticus; identical to SEQ ID NO: 63134

SEQ ID NO: 65413 - protein, 583 aa, Vibrio parahaemolyticus; identical to SEQ ID NO: 63135

SEQ ID NO: 65414 - protein, 663 aa, Vibrio parahaemolyticus O4:K12 str. K1203; identical to SEQ ID NO: 63134

SEQ ID NO: 65415 - protein, 583 aa, Vibrio parahaemolyticus O4:K12 str. K1203; identical to SEQ ID NO: 63135

SEQ ID NO: 65416 - protein, 663 aa, Vibrio parahaemolyticus; identical to SEQ ID NO: 63134

SEQ ID NO: 65417 - protein, 583 aa, Vibrio parahaemolyticus; identical to SEQ ID NO: 63135

SEQ ID NO: 65418 - protein, 736 aa, Vibrio parahaemolyticus
MHITKLSLVNYRNFNNVKLLFNKGINTIIGENGSGKTNLFRAMRLLLDSSMPRFATKLAEGDFCRALGDWRGHWIIISLEFDDIAGDEASQSLFLHGVGNAEDEVVSRATYNLIFRPKAYVRQALAQLPTGDLAALESYLGSITIDDYETVLTGKSVANFNDPSVYKSIVGDFERVDFPTALNNPVVGIRLPNILNMPNEVSFTFIKALRDVVSDFNSNRTNPLLTLLKSKSGDITQSDFQPIADLIGTLNNEIEGLPDICAIRDDIVTTVGDTVGDTYSPNSISIRSSLTDESDQLFRSLKLFVSESSDGYEGAIHEMSLGGANLLYLTLKLLEFKYQKANQSIANFLLIEEPEAHIHTHIQKSLFDNINYENTQIIYSTHSSHISEVSNINNMNIIGLVNGVCEVFQPSSGLSDEQIGFVQRYLDAIRSNLLFARSVVLVEGDAEEILIPILLKKVLGLSLDEIGISLVNIRSTGFENIAMLFNNERIKKRCSIITDLDETFFDTTIYPTDSDADRKKKEKALGSEETGFARKGRLDDFCQNNPWISIFYAKHTFEVDFIQSSNSDYLKMIVRDVYTQPATVNAATTELSSTDIAISGSRALTMANYQGKGWFALTLSKVIDFKVAIPEYIFDAIKFAHGDFNAELTFKILKHRYESVIEHVKDGLDIIERLDEEGNVSLKQEWEAYLAPYESGLATFTPKWEAFNPLGGDINVLKAQLMNDLPTENNDILTRI

SEQ ID NO: 65419 - protein, 596 aa, Vibrio parahaemolyticus; identical to SEQ ID NO: 65407

SEQ ID NO: 65420 - protein, 663 aa, Vibrio parahaemolyticus; identical to SEQ ID NO: 63134

SEQ ID NO: 65421 - protein, 583 aa, Vibrio parahaemolyticus; identical to SEQ ID NO: 63135

SEQ ID NO: 65422 - protein, 771 aa, Klebsiella pneumoniae BIDMC 33B; identical to SEQ ID NO: 64244

SEQ ID NO: 65423 - protein, 625 aa, Klebsiella pneumoniae BIDMC 33B; identical to SEQ ID NO: 64245

SEQ ID NO: 65424 - protein, 728 aa, Staphylococcus aureus; identical to SEQ ID NO: 62710

SEQ ID NO: 65425 - protein, 597 aa, Staphylococcus aureus; identical to SEQ ID NO: 62501

SEQ ID NO: 65426 - protein, 671 aa, Endozoicomonas elysicola
MHIRKIRIQNFRLLKDTTLDLEDESNNELSLLIGKNNSGKTSFIVLFEKFLKSRKFYYDDFPLSLREDIHNLSEKTDEYSIAIRLSLSIKYGEEDNLQNLSEFIVDLDPKCNTARISFEATINKSKLLKDLDVVAKKKDEFIKKNLSDYIQVRYYIFNEYSDFEPKHRSNLIQKDVSDVNSLINLKIIQANRNVTSSDAKPQERKILSHLTTQFYNSKVNISHDELDGINSSIIEADSQLSSNYKIFFEPFLKNAKSFLGLTELNVVSDLQSKEVMANHSKITYGKDSTELPEHLNGLGYMNILYLLLNIEIEKADFKETGRDINLLFIEEPEAHTHPQLQYVFIDQITKTLKGIKGLQAFISTHSAHIVKKCNFRDIRYFRIKKDEANTDIRNFYIELQSRYADVKNVDIDKVEKENFKFLNQYLTIESSELFFAEKIIFIEGTSEKMLLPYFINKFDQDGMGDKDEVALTSQNISILEVGANAKAFKHFLDFLEIKTLIITDLDTTEKKIKKGDNGKDSISYTACPAKVGTHTSNATLRHYYNSPKFEEVGFSAWMEKLKEQSHDDPSPLIKIAYQDVEDGYQGRSFEEAFVSANMDDIGNNLEDVDGLKNKSKFDECKSDPDKFVDVMLDSKGKSSFASSLLYLALSKENLKWNIPSYIKEGLKWIAK

SEQ ID NO: 65427 - protein, 560 aa, Endozoicomonas elysicola
MDSQVTPLERIQECTANKKSFVLQGGAGCGKTETLKQTLQLLSKDYSKKRIACITHTNLAVNEIIDRVGEGYNISTIHSFLGSLIENYTKSIHEVIHEIYAVDKVEFETEESSGLSGNELKKANHENYKKPYKKYAKLKYIAKGQPSGKELGKREYDKAPDDISQELNKNIDELNVEVRQMIQRKDHRSIKYNNSRFDNLSDLSFGHDSLLRVTSLLFQRYPRLGKILCDKYDFILVDEYQDTHEDVVNVFLKHLPKDRQTTIGLFGDAMQSIYSDGIGDVRAFIDSGDLVEILKEDNFRCSEQVINFVNILREDALSQELAFKIKDDGTKEAFKDRQGQVRLLYAVWGDNKPHTRSRPEEKHAYLDFVDKLIESADGEESPHKKLMLTNKSIAGKVGFSSLYKVFSDRYTEVKDELERVLSSIQVLDLAELCDAYSGSKKRYNFILTELKKSGFVLNKLEDKEKIVAAFEKIATGDLSIAKTLEVAFEEKLISKPDSYLAYIGRKDSFLAELQKDRAYQKFKERFNSGSNTITKMAKEDPELTEEVFNEFKSSLDKERF

SEQ ID NO: 65428 - protein, 594 aa, Escherichia coli 2-316-03_S1_C2; identical to SEQ ID NO: 64492

SEQ ID NO: 65429 - protein, 605 aa, Escherichia coli 2-316-03_S1_C2; identical to SEQ ID NO: 64493

SEQ ID NO: 65430 - protein, 594 aa, Escherichia coli 2-316-03_S1_C1; identical to SEQ ID NO: 64492

SEQ ID NO: 65431 - protein, 595 aa, Escherichia coli 2-316-03_S1_C1
MAQAAELAGNPGQLAAYESRGHCVVLAGPGSGKTKTLVLKLARILAEDVQAPRGAACITYSQECARELTRRLEALGLREAPNLFIGTVHGFCLRHLLMPYGRLADLPIPFPLSVASQRASERLLRQSGDRLFGPNHPYKAIDLGRHRRSVLNRNSVAWRAEEELAAWAEAYEAALRQEGLIDYDDMVVFGQRLIVEHDWVLPLVQAKFPILAVDEYQDLGVALHRIVKRLAFEGGVRLFAVGDADQSIYGFTGADGALLMELASRRDVETVRLQLNYRSGTGIVNASEMVLGEVRGYRASDPNRQTTIAFQLCPDGLEDQAVHAVAQIIPTALAAKPGRTLGDIAILYKDYRAGDVVADAVTAGGFDYIRVDTAAPYRKVALTSWVEDCAAWCAGGWRIGRPQLRGLIDRYLAFHRARLDDACARRKGQELTRLLWALRTDQQPACDFVVSLRNGLVDSLLATEPALSDQAEQLEHMTAALAEGGALALLDITSLGGRDGSPEHLNLLTLHSAKGCEYDVVIMVGLDLGNLPWRNEAPEKLRESRRLFYVGLTRARDEVHMLYSGFVDGRYGPMRLGRSPFLDELEARMRGAGLW

SEQ ID NO: 65432 - protein, 692 aa, Lysinibacillus sphaericus
MYLKTIKLYNFRKFGAKEGGSPGLTLHLNPSFNILVGENDAGKTAIVDAIRYLLGSVSDEYEKIKPDDFFSYEKDSYSEEFCIEGFFSGISEKEAGLFLEWLSFDEDGEYSLRVALKVEKRKNDNGNEYIDRKLVAGEESFEHRLDSAAREVLKTTYLKPLRDANAELKPGVKSRLVNILKAHPTFKEDNNGDHELVSVMKKANEEIVNYFETEYVSGHSILQDVENLLEDFYDNADLSKSKAKFSVTKTDLNSILRKLSLDTEDINLGLGNQNLLFIATELLLLNNYLTGSEVIGPNITLIEEVEAHLHTQAQIRLIKFLENELEDKKNASQFILTSHSPNLVASINPSSIILLHDNCAYPLKEEYTMLNELDYKFLERFLDSTKSNLFFAKGIILVEGDSEMLLLPALAELLDYPLFKYGISLVNVRGTSFERYVKLFSRSKLWREEYKLPILKLPISIITDVDVKPIVYFDEESEDKFRYVLNEGEVDEILQHIDKSKDKLNLSYIDKEYSTLRKLAKDFKFKVTNENESELNRIIKKTINEGYIKNENLLKQASINNRYSTNYDCNLKVNIAPEWTLEYCLSLSCLAEYLYKSIYQLQNNVVDFENEQNEDFTSMLAKIRDPKREIEKVAYNIFKPLNDKTISKAETAQTLATMIKSLELQERENLKNLVLEDKKLKYLVNAIEHVIK

SEQ ID NO: 65433 - protein, 609 aa, Lysinibacillus sphaericus
MSLETLKEIEKKLLPSNAEFFDQQREVILNNNSLNIVAGPGSGKTTVLIAKCALLLKKNEGGKKGICLITHTNVAVEEMKIGLERSGYKNIEFPNFIGTIQEFFNTFFVKKALHLLIGNKPFRVLDKDDYQEKFVESFNPVKPYWYTGNPPNFSKSNTEFLFKDDNTFEIINDSISHRYRSEFKQAVKQVFQSGILTNSQCLDVSQWYLTKYKEKLRAAMANRFDFVLLDEAQDSNEMQYSLLKQLFDNNVNFQRFGDPYQALYNIFNEDEDVWKPTEEISKVNRADISKSSRFGTSIANIVKNLSIEKYDTFESQKLVESFAPYFLVYKNEEGLLTAYRELIRELSNEEVLFSHSTKKDAIVAVTHKNLTSTFKSYIKPKSTIKNTGSPVQQSYKFLVDLVAKELDMSFKETKKIIDENLNFKIKFSKIVTLLLSDELKDISVISTYVSTVLRDITQADEQKFESENLAQKIQVFRESIKVNKEQKEFKEKDFYIGTIHSTKGETHRSTLLILNYSFEKEGQSHQMMDLLRGYLTGKYVELNQIQDTVIQSSSAKALKLAYVALSRPTHLAAIAIPEEFIQDKAFLAELKEFGWKEFTCKEVASRGDS

SEQ ID NO: 65434 - protein, 565 aa, Shewanella xiamenensis
MYIKKVTINNYRSFRNFEAKLQQLTVVIGENDTGKTNFFTALSLPLSGNQIDFNQKRLSVSDINKDAVIDFLTSVVNDETEKNQLNKIPKVSVTVEFADPKDAYETALLAKWIVADGDKETYKIRYDFKPKDDKDLLEVVKKSLTGKTLDDINWFTLPVELYDYQIVSVNNEKPIAYSDLKHVSVHSINAERDDFSESSSMKSNSIFTKLLMNTLNDDDKGKINTAYSEFFSAIEKTETFEKVIGTNDDFENYDSIIKQLECTPNLPNLKNILSNITLKYGNEFLYQKGLGQRNLIYILILFAYYKSCGDTFNLCCIEEPEAHLSVNNLRLVRDFIEKSSSNSGSLVQTIISTHNPSIINKLKITNVLAFTGEKAISLSDTPTKLVDYLRKRPNFDILKLLFANKVILVEGPTEEMLISTYLSKQSALNDIDIIPIGQRGYATFLDIWLALNKNNQNKKIGVVRDYDNSEEAKERHNAYDTAHANVTVRTTKHYTLEIDLVEAKDNLALLNGLFEMDGNLDEVSGHMIKGKTARMLDVCDAMIDEENPLDIQLPAHIAEVIEALS

SEQ ID NO: 65435 - protein, 458 aa, Shewanella xiamenensis
MIEVQIAGAGAGKTYGLAKTLIEHIKACTSHKKTFALTYTNSATAKIEQEIIKQNGFIPSNLCIQTVHSFLLNEIIYPFSSFTLGDVYNDASIMILPSDFKLKNWHLKRLKEKNIIHAESVYNIAKQVVDETISKHDNKAKKAKVRRLLAILESCFDKIFIDEVQDLDDDALRFFEVLGSNDIDIYMIGDPKQAIKYPQALDTFVKKVTPKEYANILPINNQTRRVPTEILAISNSFCYEDQQQESLSEVVGELMYIESVDRRYDELLTNYIDAKQLVCIDKKNGRYTTSSTHKHAFPREIEEMIRESNHKKDKTLFVKAAFSDFMDDAINEDNKRAISKLITRHSLTLNKQHFAQLHELCNSCTKNGVQFKVQSIDSIKGLDAETCVIILSSNTLKYLTQNGISKEKQFNKEWKRVYVALTRAKKRLVLALDHELLAKEDMAAVRDSIGELGFVSHD

SEQ ID NO: 65436 - protein, 641 aa, Escherichia coli 5-172-05_S1_C1
MKLEAIRLSGFQSFGKVPTELSLEDVTYLIGPNGSGKTAALQALCRLFAFDPALRRVQRSDFHVPFDEGEVPSERQLWIEADFLFHELAEDEDNSTVAPHFGHMRLDEPEGIPRVRFRLTATMGMDGDIEENLVYVLDVNADSSPQTTAKVTRAERNIIQIHYLPARRDPADHIAYGANALLGRLLRAVRWDDERNAIRGLTNQISESLAANPSINAFSESLKLTWATLHKGKFFSDPKITFVASEIEALLRHLSVSFTPSHDGSLVDFSRLSDGQKSMLYLSLVLSSQAIGRAVLAEEDVTFDPDKLRPPIFTLVAVEEPENSLSPHYLGRIVSALNTMAKNIDAQALIATHAPSMLRRVDPRFIRYLRLTEERKTRITCIKLPPKADEAHKFVREAVQAFPEIYFSRLVVLGEGDSEEIVLPRLLQVKGTPVDESAITVAPLGGRHVNHFWRLLSALQIPYLTLLDLDVARYGAGWGRIKYVNDQLAAFEPEKILPTEWKITRWNDEATPVRTHHFFNKGTQDIFEELENRSVFFSFPMDLDFSMLLAYPEAYGVEEEEPDESTIKAVLGKSYNDVSQYSVDEQSLFVTYHQRFKLGSKPAAHIDALAKLSDKELIAKMPESLNRLVDAVIAKLGELPE

SEQ ID NO: 65437 - protein, 558 aa, Escherichia coli 5-172-05_S1_C1
MIPIEVWHPADGLTLEPNAKRAAKARKRCLALTAGPGAGKTEMLAQRADFLLRTGTCRYPKRILAISFKVDASRNLKERVERRCGADLASRFDSYTFHAFAKRIIDRFRPVLKGRDALDSGYTIVDKKIGISSTQIEFSDLVPLAIKILQNSRIARNAIRQAYSDIFLDEFQDCTNLQYELVKLAFLGTKIRLTAVGDTKQKIMGWAGAMDGIFQTFTNDFNAVPLNMYRNFRSKPQLLRVQNEIIRELDPTSVMPDEQLNGDEGEIYVESFGNSQEEAIYLADIINNWINKEQLPPAEIAVLVSKQLDLYADHLMMELELRGIPYRNEQQMQDITVEPAARLIVDYLSCLYGKREPKAWIRLVNQLIPFADEEVQSSVRKDLDRLLKKQRKEAASAEQLDSSFSCWWKFVKAFLKHIGSDTIVALSPDYESHKRLQEVFRDTKARIEELLKIESDLPRALGRFTDDQAVRILTIHKSKGLEFDSVIIMAVENEIFFGNQDENRCAFFVGISRAKRRLILTHADERQRPANAKRWDVHRTAQSEYFSYVTPFITAAIK

SEQ ID NO: 65438 - protein, 771 aa, Klebsiella oxytoca KONIH1
MHLRKLSVRNFRRLHDVVIDLASDISIFVGANNSGKTSVGHALQLFTGKSRFNIHDFNAECWTDIVTFGEGADAASLPSLELDIWFEVTPNDVHRVVDLLPSLSWSGSLVGMRVAFSPINPEEIRSRFLAVRQLAIDATPKDENGILKYDPSPRNLWEYLRDRLNDEYELRYFVLDPARFNAEMISEEGYEPTPLTGRDRSGREILNSLIQINFLNAQRHLSDGSGGSRSEDLSRVLSRFYGRNLEQKGEDYEALIALAASESAFNQHLERVFAPTLKSLAKLGYPGLSNPRMMIRSALDPAQIMNNQNGAVIHYALGEDDGNPTPPTLPDSYNGLGFKNLIFMVVELLDIHNQWLSIEENRPPVHLIFIEEPEAHLHAQLQQALIRKIMDLLAMESQELMHYTTQVVVTSHSTHILYERGFRPIRYFRRKRSSNMSATDVLNLSVFYDNTDPEIRDFLERYLKLTHCDLFFADGAVLVEGNVERLLLPQMIATAAPRLKSSYLTVLEIGGAFGYRFQKLIEYLGITTLIITDLDSVYCTPPVQDATEARADELDGLAENPAANDDGEEPDDEEEEQANTETPGKACIASHPGAMTSNQTLRQWLPKCDTVAALWEATEEMKIQSRTAECDALVRVAYQCQTNVTWKEETLALAGRTLEEAFALENLSWCQDVGCKPLKLRIARAVSMDLLQLVQRIHKRVQSKSFSKTDFALNLLLKKPDEWSVPTYIAEGLKWLEAEIAPPELEVAEGQEEDVEDMSVALAETDGGRVA

SEQ ID NO: 65439 - protein, 625 aa, Klebsiella oxytoca KONIH1
MTSRIGSPDTQADIDVRACLDSSPPRSFVMVAGAGSGKTTSLIKALAHLADTRGSALRRAGQKISCITYTEVAVGEIAADVGNSQLFHISTIHSFLWSVIRPFHVDIAKWVVARIHEKIAEKQAHYDKPRTQAKTKSRLEDEIAYLSAQLECIDDVDKFIYGTGSNYAKGILGHDDILKLVPACVEAHPLLRRIVAKRFPFVFVDESQDTDPDVISALRTIANDNPDMCIGFFGDPMQKIYMSGAGAIPLSDGWAEITKPENFRCPTSVLGVINSIRASGDGLQQIRGRTTIVDGVEQTVLGTVNLFILPSNVERSAYLTSVRRYLANETSDEQWLSDTREGDVRLLVLVHRMAANRLGFPNLFSALTDKAPMSLSEGVNDGSAWPLRPFVQHILPIFAAAQANDQFQIMSIMRNECPKLEPSRLHGQAMVAVLNELQQGINSLLALLEEGSQATVRDILLHVRDCELLRLDDRFDNHLSDEPVNDGNDDFGNVQNYLRCNAYELWAYRRYLSEESPFATHHGVKGAQFERVLVVIDDEEARFSQYSYGKYFQYIPLSDNDLANLEEGKESVLDRTRRLFYVCCSRALKDLAVVIFVPDVAVAQAAIVEQNLFPASVILGEHDLA

SEQ ID NO: 65440 - protein, 661 aa, Burkholderia sp. K24
MRLESIILSGFRCFGPEPTQVNFAPTITAIVGPNAAGKTALLQGLMKLFGVSRAQRTVHRSDFHVGPGSDPGSRLPRELFIDVLIGLPELADGTAMPETVAPSFRHMRLSRAGEVPICRVRLEARWEDDGTVEGEVSQEMFWVDTLDSLPTDEQKHVVAAADRGLIQLYYTPASRDAGTQVRATTGALAARLLRAIEWSVDTQEAIGEASVSLSEAFESEDSVAAIGKALGRRWSELHDEVVNTKPRLSLVSRRFEEIVNRIAVIFEQGADGEERGLESLSDGQQSLFYFALVAAVFDLERDIVEENVDGFRNDDLRIPALTIFALEEPENHLSPYFLARIIQQVQSLTDRGGAQAIVTSHSPAVLSRVEPQQVRYCRVDPTSRASSVKQIEMPADSVEATKFVRGAILAYPELYFARFVLLVEGDSERIVLPRLAEAMDLLIDPAFVAIVPLGGRHVQYFWRLLSNLGIPYATLLDLDLGREGGGFGRVKTVVQRLIEIGISKKKLLALENGGRVSDEELAEMHTWQSLDDVKQLRAWIDDLKQYGVFFSIPLDLDLAMLKAFPEAYSATIPKGGGPKMTVEKAAEVVLGTAGPGLALYVNNRKAYPDLLPAYRYHFLTHSKPASHLAALANVKTEALRDGMPKVLGEVLRHIESKLRRD

SEQ ID NO: 65441 - protein, 633 aa, Burkholderia sp. K24
MTLLARRVSRDDWRPIGVKELEKSALDVVRSEDSRSVIAGPGAGKTELLAQRAAYLLQTGLAPSPQRILAISFKRDAAANLATRVRKRCHRSHADRLDSLTFDAFAKSIVDRFGQALPERWRPRPDYDILSTNDKLYRGFLEQIASPPPDIGTRADLNSVSPKTFERVYLLGSPLPVDGWSSLVPAQWAADRFWQSALHEGKRTYLSFPMIGRLAELLLRINPMVRDALRLTYSHLFMDEFQDTTQTQYDLVKTIFLHSNSIITAVGDNKQQIMRWALAMDDPFGALEADFGARRTSLLNNYRSSPDLVRIQHVLAQALDKRAVAPVSKTEGSIAGDSCAIWDFSTPAKEAQRLADFVLSEMTTYNLAPRDFVLLVRQKADDYAAVIEPAFRAVGISLRNEAGLIGKVALQELLTEDASRVLLYVLRLAAIQRGGRHWSTCLQALATLHRLRTDDEVAHDRLARNLDAFATALFKDYAAPPSDKAAVRALVDRIFGFVGLDKIVAAYPAYAQGDWLAKVIESAAHHLWTSCSSTSDWTGALDAYEGVHAVPLMTIHKSKGLEYHTVVFVGLDDGAWWSFTGDQVEGTAGFFVAFTRAKQRVVFTYCAQRGARSKIKTLYELLKAAGVKAAQVE

SEQ ID NO: 65442 - protein, 594 aa, Escherichia coli; identical to SEQ ID NO: 64492

SEQ ID NO: 65443 - protein, 605 aa, Escherichia coli; identical to SEQ ID NO: 64493

SEQ ID NO: 65444 - protein, 744 aa, Thioclava dalianensis
MKLTRIEVFNFRKLRRARLDMSDKQTLLVGANNSGKTSAMKALRKFLKDRGGIDTRDVTASNWAAIEQIAGAWTQEVEVDLSPLLAQLPFIDVWLHADTSELHHVAHLIPTLTWTGGLLGVRLRLEPKKGADIKAQYLAAREAAQTLQPGGATAKGFALWPRDFREFLDKRLRDLFELNAHLLDPMSFTTTGPVEPHALPALSEGIGSNPFAGLIHIREINAQRGFADAGDSNGDDDEPTNATSRKIASQIQPYFRKHIDPEKDPTPNDVKALEAIHDAETTFNARLKDGFADAIKELESLGYPGGLNNPKLFIATQIKPVDGLDHPAAVQYDISGDTSGVKLPESYNGLGFQNLISMVFQLMRFRDDWMQVGKFKSQLVTPDDKGIEPLQLVLIEEPEAHLHVQVQQVFMARAHKVLRNHKDLEQEGSAFTTQLVVSTHSGHIAHAAAFEELRYFKRELPSHGVVPTASVANMTGLFGADNETHRFVTRYLLSTHFDLFFADAIIVIEGAAERILLPHLIQHHYPDLAAAYLSFLELGGSHAHRLRPLIEALEVPTLIITDLDAVAAVDKGGKVVKESVQPCCGAAQTTANHVLKTWLPKLAEIDELLGSPPTALCHTAPDRPIAVSYQTPQKVTLGSVSTSVTPSTFEDALVLTNPKAVTDAAGTEFSCLMTRAFAKSIAEAQAPEDLAKALFERLAKRPEKAAFALDLLYIKDIKVLRAPPYINTGLTWLASQLKGVEGAA

SEQ ID NO: 65445 - protein, 657 aa, Thioclava dalianensis
MTDVTDATRDAGADATIRACLSLGQPRSFFLFAGAGSGKTRSLKEALEGLDTQTLTTLRKHSRKIAVITYTNAAADEITRRVKADPVFQVQTIHSFAWSLIEGRTADIRGWLESNLRTEIAEIQAAHAKGRVGTDAHDKREKKMASKTKRLERLAEIRAFTYAPEGDNFGRDALQHTEVIALAAHFLTESETFQNIVLARYPFILIDESQDTMKPLMEALLTFEARHRGRIALGLLGDTMQRIYTDGLRDLDQRVGDFSQPAKQMNHRSRKRIVDLANSIRRDDDGRQQRAREDKPGGTVRVFLAPSEGTDRGAFEAFACADMARITGDPAWQNAEAIKTLTIERHMAAARLGFSELFEPLSKPDKLKDGFRDGTLPAMRLFTHRVLPLVTAQRNGDAFAAMAVLRDGSPLVDKRGIRTGRGGQASGLDAARAGVAALMTLFKDEPDPSCADVLAVVAEHRLFPIPDQLRPCLPDDNPAAEDMADILAELDPLFDELDLTTPEDTPPTEPTITEAWTQALDAPFSQVARYLAYVEDRSPFGTHQGVKGLEFPRVMVIADDVHTRFKGLASYETLFGVKPLGPTAQKKADNGEETTIERTRRLLYVTCTRAEESLALVLYSEAPDTIRRFLISNQWMAEDEVVMAAADGTFQEAAQQR

SEQ ID NO: 65446 - protein, 143 aa, Snodgrassella alvi SCGC AB-598-J21
MKILCGIEELNDNLQYKEINNTYIVFQKDPINKQYATSLEEAIILTNYDNQLVIESLKSTISTKMFNIIMDNNRINPNCSFEIQKKLNTNGGKTKFASTLLYNMITVTANTDPDSSNIIPELPQYITDGFDWLKRQLENDKGK

SEQ ID NO: 65447 - protein, 311 aa, Snodgrassella alvi SCGC AB-598-J21
MSLEENLNQEIQQQQKIFTAIDKFESFIVYAGAGAGKTYTLIEAIKYILSHHLDTLHRHNQKIICITYTNVAVNEIRQRLGESQYIQVSTIHEMLWQQIRLYKQDELIELHKNKLEKELRKNELKIIEQVNHPNLSCLNTEENKELFKQFVQKNKKLFFNLEKVLNTTQLRKEKILEINQTNPILNQEILEKSLKNFAIFKKYFNLVDRNITFQQAIEKINNSQNNNNILSVEYDSNSNSDRLASMKFSHDTLLEYSLQLVEKYDMFKKLLTDKYPYMFIDEYQDTNESVVRILANLHQYTYQRKQKWLAG

SEQ ID NO: 65448 - protein, 740 aa, Lactobacillus reuteri
MYLKSISIQNYRKFGEEQTFEFAHSSWEKGINSMLEEKKEEETEKYISKSTSLFVGKNNAGKSTVINLLNRLQNTKCGNRAVFQYNDFNLEYLHEWYKKYFESSVEINDISPEDLPFMKFELKVGIDDGNDIISNFKDILVISGLKEIKNNPIDDNQPVVTITIRYEVIDVEKFKKQLIDLRTEEREINSKESSYYKGLIYRKFLQLFNENYYALNFYPLDADEYAEQFSLAPLLKVDVVEANTVKDNHTLSKAYSKIVSTYAKNNDINDITEVVNELNSKVKNMVDDNVKEILQNAVSAVEATKNLQMNLYPDVTLEKVLAHNIIYEYQENEDNIPETQYGMGYTNLMVIIANIVNYLELYKEDDINGAINILCIEEPESFMHPQMQELFIRNISKAIARLLGKKGELDTFQILITTHSSHILNSKIHSANSLDNIIYLGNFDGHNLVRNIKDKDIKGAYDEDNKLWEYTKKYLRLEANDIFFADAIILVEGLSEETYIRYLIDEKTKLYNCHIKVYRIDGAYAHKFISLLNLIGVKTVIITDLDLKREKRKDKNGRNIIDKDNIKDLTKCYGYKTGCITTNNALRAVIEKAFGIPKNMNNKINEKIISTINDREFLRLDLPNTNITIYSQGKIKGSFATSFEEAIILTNSEINRDSIRRLLRRSSVHISSEEQKESKHFANNSYNYQRRIASGQRKEKFSTNIVRMSIGCDGFELKEPAYIYSALEEICQYFNGDTNE

SEQ ID NO: 65449 - protein, 676 aa, Lactobacillus reuteri
MSEEVIKNNLKEEVKIQEKLNDCVDEAKSFCFDAGAGAGKTYALVNTIRYILQDENKRQLLRNRSQKILCITYTNAAKDEIINRIGHNSEVVISTIHDFLWDFISIQQTLLVQQHKDKIRNEQKRAEKLEEAFIREYSLEKDIFKEKVTDQGFLKAFHQNYAKNALPFKEAIGLYDNFWNGFKFSVSKLKKAVSAVNSLLNYEKALENNNSKVKYLPTRNRDDLANYIISHDTLLDYSKNIIEKSNLLQRLLLDNYPYVFIDEYQDTDKRVIDIITSIKEYANKKKKRFVVGYFGDALQNIYKNGIGALPNINEYVSIQKKFNRRSTTQIVSIIEKIRNDGFGQRAIDENNNDGLCKFYLSDTNFDLEKFLKENDLTRETACLLLKNKDIADKREFNELLAVISKYPRFSDSNYVNINNEFLQKNQQRIGWFLRDVLTFVGFILCVSDDSSTVSKIIKFMQEPTNRITFNEMSELIKKIRLQVHDNMTLEECIKQLSQIDKADSIIKNIFSINDKSTDLITHIKNNAFEYLLFSDANDSELLDGFFDIKFVQFKNWYNYVFNKDVNTGLTYQTLHGSKGLEFDNVVVVLQDNFARKKDYCYYFFDNYNNPDTEDKQRFNEVRNLLYVACSRTKKNLYVIYETKDYQELLTNDKLKILTNIKTIFSEIEFIGSTLDE

SEQ ID NO: 65450 - protein, 679 aa, Streptococcus mitis
MKIKKIYVQNYRLLKDFSLELKNDLSLIVGKNNCGKTSVLSVLEKIFNKNSSNTLTWEDISLSHRKEIYEKVKLFSDISEKDWEPILGTSLQIWIQYSEIDSYQNIQTFMMDLNPDNNFIILEFTYIIPIQKLRDLNLQVSDFIDDFSRFESFMKKNMSKLFEMQIYSLGYNPSTQKLTEEKSDLLEMKDVHKIIKVRGISASREVSNKENNHSLSKTSNRFYKLNNGEAIDSNAINLLQSAILKADETLTKAYSGDDSNEGIFTPVFERVKRFGGNNSEAELAIYSSLSEKDILSNNTTLYYKHDDSLLPETYNGLGYLNLYGIIFEIETVMADIKQDPADINLVYIEEPESHTHPQLQYIFIKNIKDLLAEHVKELKEKSSACDIQSLITTHSSHIVSDCDFDDLIYFKRNNGTATAKAFNSLKEEYGTDRLGYKFVKQYLTLNSSELFFSDKVICIEGDTERILLPTMMKKVDVANPVQQNSTIMPLLSQNISIIETGAHSQVFRKLFEFLELRILIITDIDPVKKKKNGRLTSCSAQKATTTSNSSIKNFFDISGDNNFLAVSNKRFEDKINSDNSIRIAYQIGNPESSYQPASFEDAFISLNSQFILDNKENLIEYEALKSFSKSDIYDLYHFARDKVNKKSAFASSLLYFEDDQNTWKVPKYISEGLLWLREQ

SEQ ID NO: 65451 - protein, 640 aa, Streptococcus mitis
MVERTIEPEVEKVFEAIKEDKNFILEGGAGSGKTFSLISIIEKISRDEPDKSIVCITYTNNAVAEIRERITNDKLKVSTIHEFIWSIIEQFQNEIKCCLIDLINDDEQKAFIRPLDYPSEDPLTDTYFENIRVDYDERYSMSIIDNRVQISHEHILIVAEKMFSTYPKLCDILIDIADYIFVDEYQDTSPLVVKILLEYIQNRTKKNIVGFFGDSMQAIYDSGIGDLSSYNLEKIAKAQNRRNPKKVIDLANKFRDDGLIQTPSDDDTAPNMDNGSIIPGTVKFVYGNDINQLEILRGSQLYRELEFNAPSKTKELRLTHKLNAEMAGFSKLFELYNSDIFVKLVANLKKKIDTNQVIDDGKSFEELVEEDQIVVGRGGPLIIDVVKSTPELLDFYDEVKTYSFEEVISKSKVNKDSLLAYKFNGSSSRYEAGTDRDRILRRLDLIHELLDLYKTGKHNEFLRITKFNITSSEDKITLSEVMTKISVDDITIGKVIELAEGSGLISKDDLFTNFIENRGYYLWLRLKKLPFKEYINSIAYLREYVSVITQHKVKGSEYENVLVLLDNGRWNQYNFDTLFGMGATSEKVQDRTKKLFYVAITRSMKNLIVYMPTSDSQIIKKAQDYFELDDIVDILSFVDE

SEQ ID NO: 65452 - protein, 741 aa, Streptococcus mitis
MYLKSLSIKNYRKYGEEVQVINFAHSKWPEMSGDEDEMQKLNITEEYISKSSSLIVGKNNSGKSTIVKLLNTLQNSKSGSRSIFKYTDFNLKILSDWYHENIVNKSEEEIKNIDKSHFPKLEFQLILGIDDGNDLISNFEDILILSGIEAVETHENQEISEVTIDVKYEVVDEVAFLEDLVKIKTSYFNDSQQYDELYKKELQYRQFLALFSSNYFVLNFYPIGREEPAKEFSLSSLFKVDTIEANTVKNDKTLSQAYNKIVSTYIKNNDIEEINSLVGGINYLVKGMVDANIKDILQSAVSSIESTKNLKMNLHPDVTLEKIFANSIIYEYQEGNNNIPESQFGMGYTNLMVIIAKIVDYIELYSEKDINGSVNILCIEEPESFMHPQMQELFIKNISKAIATLLGKKQQLDTFQIIITTHSTHILNSKIQSGNTLNNISYLGQAGVNNIIKNISDDAIVSGVDIDKKAYEYIKKYLRLEVSDIFFADAAILVEGVSEETYLRYEIDKHPILKNHHIKVYRIDGAYAHQFVSLLDLLGIKTVIFTDMDLKRKEKDEDGEKIEILSYNINDLNIQYANSTECLTTNGTLQYFIKKELNDKKAKYDKINPKLIEMLADKDELVIICENISMYSQGKINGYYATSFEEAIVLTNAGNEDENKYKKSLIKALQYVHPNMKYFGDIDETSEIADKSYMYQVKLSDGKSRFSTGIVYLSETDDDFSLKQPQYIESGLNSLCSYFKE

SEQ ID NO: 65453 - protein, 515 aa, Streptococcus mitis
MTYTISPENKQLELDIQEKINKCLDNFESFCFDAGAGAGKTYALQKSIEHILKTEGENLKLRNQKILCITYTNAAKDEILSRLGKNSAILVSTIHEFLWEFISIQQESLTIEHKNKIIDELHAIDCKINENSLSSNVVLPEFQNVVCKDDFIKTFYSYYGISARDFRDAMKNYDTYFETYLSNISNFKNLVKDINKKSRLSKTLKDIEDKESKKIIYNPVQNRDKLENYVISHDTLLLYCKNIITNKDILKRLFSDRYPYILIDEYQDTDEKVVAIIDSIREYSNSRKKLVVGFFGDSLQNIYGSGVGILPKKEEYKSIEKVFNRRSSMQIVELIEKIRNDNFGQQSIYTDFDNGSYNFYISGDDFNIDTFLQENHLINNTACLLMKNDDISKARGFDEILSVLKKFPRFSGVNFENVSNEFLQKNLQHMGWFLREILTFIDFIQKVRDDNSTVREIIQFITSNKPKLTFAVMKQFIGNLREPNLSTLTIDRCIDEIANIQEPISGNDILKKYFH

SEQ ID NO: 65454 - protein, 761 aa, Photorhabdus temperata subsp. temperata Meg1
MYLHSYRLRNFRRLKDAHIELADDISIFVGSNNSGKTSATQAIYSFITGGKERFSLYDFSSSCWKTFDEAGDINLTDPIPEGFTLPSIDLDLWFEVAAPDLYLVIALLPSTTWKGTKVGIRISLTARNPINLIQNYQEAKAKGTEPSAQLPPGSQYVPWPRSMTDYLQRELKSEYELRYFILDHTRFDDNYREIGDYVPDELGGEPGGGTILKSLIQIDNLSAQRHLADPNPEAGGRSEDLSKRLSRFYKRNLNQRQDDHLALKALFDSEQALNVHLDGVFKPMLDRLAKLGYPGINNPQLKIMSALDPAHVMSQNARVHYQIGDGDDIATLPDSYNGLGFKNLIYMVVEILDAQTRWSTMENRPPLHLIFVEEPEAHLHAQLQQVFIRNVLELLSIEGDNGSIFDSQMVITTHSPHILYERGFKPIRYFRRKKVGKEQQTEVLNLSAFYHAQPDDRDFLERYLKLTHCDLFFSDAAILVEGNVERLLLPIMIRKVAKTLRSACLCILEVGGAFGHRFQSLIEFLGLTTLIITDIDSVALVVPAANDITDDEELEEFEISGDIEEDQVLEETQSPVVEPELKKKYGKACLPCKLGAATSNQTLIKWLPSKLTIEDLHAASEAEKTHELEDGAKVRVAYQTERDVTWNGTTDSLCGRTLEEDFGLENPEWSQATARKHLGLIIKGNIENPNALAKGLHERVSRKSFDKTKFALAVLTEKEDEWDVPAYIREGLVWLKDEVRIELDTALPGIIDDVAVGGEHE

SEQ ID NO: 65455 - protein, 650 aa, Photorhabdus temperata subsp. temperata Meg1
MSSRANKPDTQADIDLRICLGDVPPRSFIMKAGAGSGKTTSLIKGLSSVIQMHGNKLRKARQRVACITYTEIAAAEIWRDVSNDPLIHVSTIHSFMWLLAKPFQNDIRAWVSVRILEKIEALEEKRSTYGPRVQQRTKDKDARELERLHRQSERISTVKSFRYGIGSDYIKGILGHDDILKLVPHLIAERPLFRTLLARQFPFVFVDESQDTTAEVVEALKTVESEPGVSLCLGFFGDPMQRIYATGTGLVEAKPTWVDIPKPENFRCSSKVLDLANAIRRDGDDLVQVPGQRLGPDGIIPTPEGSAHLFILPADDTRDINLIRVREWMAMQTGDDHWQRGGDDQERVKLLVIVHQMAAKRLGFGDLYTALNSKTPSAFKDGFLDGSAWPISPCVKFLIPIAIAHTEGQHLEVMQLIRKYSPLLDKDYLIKVSVAERLKEIRELVAYIAAGIAGDSGITIGELLKRVHAAELLLLDPRLVSYLDPGASVPTPSEPEERLGNNDDQEDDESDKEMASMDAFLACPASQLLAYQTYISERSPFWTQQGIKGAEFKRVLVVLDDAESTHFQFSYEKYLGLKPLSDADQKHLDAGEETTVDRTRRLFYVSCTRALKDLAVVLFTADPELAEAHIRQLNLFEDGAIHTQLVFQTA

SEQ ID NO: 65456 - protein, 684 aa, Ruminococcus bicirculans
MKLTKIKIQNYRCFGEEQIIDFDDLTAFIGNNCSGKTTAMSALNCIFSNNSNDRILKRSDFHLPHDKSWNSLDHQELFIEAVFVFDELAEKDADLSAIPVFFKSFVVDEPGGTPYLRIRLEASWEKSNNIEGAIENKVYYITCSESEAITESAKSPANRKDLDQIRVIYVPAVRDPLKQLKNTSGTMINQIMSKVNWSDESQKQINDSIEALNQSFLAEKGISVISESINSQWKMYDSDSRYTNAQLRFNSTDIDSSIKNSEVVFSPAPMAKECSIDELSDGLRSLFYISLVDSILNVEIQIKQEMPSYPEQLSFSFTPPVLTIIALEEPENHIAPHLIGKLVHNLKSIASKSNAQTILSSHSSSIIKRVEPENLRYFRIDSRHDTTSVRSLTLPDKEKLSDQYKYIKEAVKAYPELYFAKLVILGEGDSEEIILPKVWNAKNGDTDISGISIVPLGGRHVNHFWRLLNDLKIPHITLLDLDRERDGGGWGRIAYAVEQLIQYNPEKKSLLQSDKGTISLDAMKKWNVSDNMDLWIKWLEENDVFFSSPLDIDFLMLEQYKDVYISTLESSEGPQLMVSEEGKKHRNKIIDIETQGKTSLPEYTERIENDVHSTLKECGGDGATYSDEQKRLMIWYTYFFLNRGKPSTHIEALSRIDNEQLKTTMPDVLCRLIASAEKKLKETM

SEQ ID NO: 65457 - protein, 607 aa, Ruminococcus bicirculans
MAIIADEKWLPSDSIILEKNADVAIRQKRNVLVVAGPGAGKTELLAQKANYLFETDNCKEPYRILAISFKKDAAKNLKERVEQRCGKETACRFDSMTYDAFAKNLLDHFRLALPQELRPKQDYIVEDKDILKAAFEQYNNHNTRYYDAIISSVSLPFAKDEVGERIWKLLLHGFDDHTSMLTFKMISMLAEYIIRTNIMIRNGLQETYKYVFLDEFQDTTTLQYELVKRCFLSSKAIITAVGDNKQRIMVWAGARKTVFVDFQNDFNAIKYKLIMNHRSAPRLVDLQRKMYSVLNESDGQVQHSAKWREDDGIINLIISENSESEALTITNSIIKKIETGISPTQICILCKQKPQDFTQIIIDYLGQKGIYARIENDYQDLIKEPIIEIILSILSLTCNRKHPDDWQVLVSSIIELWNISGTQSDDEYFNVQNQIDDELLRIKQQFSLVTTKSEFYEVLKKIVSFLKFDCIKAVFPEYSQGKYLNDVLNRFAKLFWDELEKTSIDLNMSIEQFKGLHSIPIMTIHKSKGLEYDTVFFVGLEDAAFWNFKNQPEEDRCAFFVALSRAKSEVSFSFCKNRNHKTQKHNDINEFFDLLQEPRIANIITPP

SEQ ID NO: 65458 - protein, 642 aa, Mucinivorans hirudinis
MYLAKIKIENYKGIELVETEFDPKLNIIIGENGCGKSAVIDAIRLLYNVGEPIRELSVSSDDFHQKEVDNAGTKTIQKSTLITITYTFKGLSTSQKGAFYEYMVIDPNKIEEDYAKISISYEEKDGKYPYFSYNTGNIDGQKADYKTFELFQHYYLGALRDSTRDLLSTRNSILGKVIRRFVRRENSEADIEKIIKDANSQLLDRDEVKNTRDGVNTNLENIFKKVIDNKIGLRIEDARTEYIVNAIKPYLPHDRTTLIDDGFHLWQNSLGFNNLIYIAVVLGDIKEQIKDNGLPHFALLIEEPESHLHPQLQLSLYNFLNNANATENSQLFITTHSPTLTSKVPFKNLILLDCDKATKIDKQFQNRESEKIIEDTTKGKELLDADFENRMKKLQRYIDVTKSQLLFAKSILFIEGISEELLVSAFTQLQDYKLEDYRTEIVNVRGTSFYPFLYLFNNSNPIERINKQISVITDDDRFTDSKKSDYSFDKLIDDNSILDSLDDSIQTGNAVSRIKNLNSVKNKANNIEVFESFKTLEYEVALHNVNIDRRNFKDNFLVQYIDSIDNAKTTKIIAYMATFTNDIMAEEERRKVATLLWKSFPAKAEFAQDFSIHLLENLEAAKASFKVPGYILKALNHLKKGL

SEQ ID NO: 65459 - protein, 606 aa, Mucinivorans hirudinis
MYFENDERLAYLGARGKVILNACPGSGKTTTIAKKILDLENQNEIGGHSGVACLSFTNSAKDEINEAYRKLSGKSLQFPNHVSTIDSFINKFITLPFYNLLNRDFNRPKILDQTNILDDMWKTTYIDRNGKMQDGLRRPLNDPEYKAKNNRSIFHLYPPSEIRIEPNGAFSINGNQPSADKVDRANFNKYCQLIKNKQFTKGLISTGDSAYIALHLLKNNPKISKWLSLRFPFIIIDEAQDNSIMQHAIFEELTNQGLNNIELIGDPYQSLYEWRDANPTEFLRKYDEDETWQSFDLTDNRRSPQNIVDVFSKVRRQEDSKINSVGCQELEESIVVYKYTANNHQLIIKHYDDFCSKNKYLNSCIVVRGNSLKDLLLGKKSEQRPWNVELPKSIIYAKNLYLSGDIKNAIKEIRTICIPLIHSDNTDYHSLKEIEKEKSIDPSFNSLMITILAELPSFSLSVSDWTIKTQVFLKEQLNLNYDVDFNLRNRKSKYLEMTTLDESVEIHFKKSYSAFNIPITTIHQVKGQTLDSILVFFNEKKHKDNITFENISNTENIFPDETKRLIYVALSRPKHLLAMAFPESITNGELINKFGEKIRIIEENEL

SEQ ID NO: 65460 - protein, 569 aa, Vibrio nigripulchritudo Wn13
MYIRTVEIENYRAFKNFEIKLSPLSLIIGENEAGKTNLFSALTLPLNSNDISFNKKRLSVSDINREAIKYFYQAIIDDKEDDEVKALIPKVRIEIEFAEPKNIIEEGVVGKWIIGEEADDSYKIPYDFRPKDADLFVKTAKDLLEGIEDIKDTRWFNLPIELYDYDVTQSNNGLKVSYSDLRLISINSINAERDDFAESNTQKSNDILTKMLISSLVDTDKAKINSAYTSFFDAIENTETFEKIVTPDPDFENFFDEIVDKLECIPNLPNLKSILSNITLKSGESYLYQRGLGYRNLVYIYLLFEFFKGNKNALNLCCIEEPEAHLSVNNLRFATDFIYKSTQKGGSSLQTLISSHSPQVINKLELTNVIVLSGNDAIHLTDSKKQLTNYLRKRPNFDILKLLLSNKTVLVEGTTEEMLINAILYRDNKNVSSLEVISIEQTGFTTFMDVWLQVNKGNTKKKLSIIRDHDENETTKKKHEKYDIDNDNIRVRTTTKYTLEDDLAEADGNLDRLNTLFKKKYKTSDEMTKFLKKSKAERMLKIADSILDEKNEDPIKLPKHIQEALDFMK

SEQ ID NO: 65461 - protein, 493 aa, Vibrio nigripulchritudo Wn13
MIEVQIAGAGAGAGKTYGLAKKIIAHYDLKSHKKIFAITYTNSAAKNISQAIIKHLGYLPENIMVCTVHTFLLNEIIYPYSPFVLNEKHTTSSRCKTFSNFPPGKTEEQKKRETASTISRLKKSGVIHVDETYAAAWRVVDENYSKHSSQKKKSKVRKVHNILSSAIDKIFLDEAQDLDETALKAFQKIGELSVDIYMVGDPKQAIDYPKSFKGWLAANKANEKVKVLPNIKTSRRVPQRILDISNNFCPRGQAQTSLSEVEGHLTYITSEDEHYDQILCHHIKNGSLVSIFRKEGNYSTKKAGSLPEFDPEVEGLLTVKFPEYEEGVVIYSLQRYFASLLSNNDNKTSIRIFLNKLEIPYEKELFKKLCRSAEQYDSSKDNSAKYAISSIQITKGLESKVCVLILTPAIFKYLMQDGVEKFNKTWNMVYVALTRAQSELVVAVDMDLLGKKYKHDDIVEGLKSIGFEELNPNHPNHKTEEKFGSIISTKDNY

SEQ ID NO: 65462 - protein, 651 aa, Clostridium pasteurianum DSM 525 = ATCC 6013; identical to SEQ ID NO: 63854

SEQ ID NO: 65463 - protein, 670 aa, Clostridium pasteurianum DSM 525 = ATCC 6013; identical to SEQ ID NO: 63855

SEQ ID NO: 65464 - protein, 703 aa, Enterobacter cloacae ECNIH2
MYINKLAIRNYKNFRSSNFYFVKGSVNTIIGENASGKTNLFNAMRLILDDSLPMNSRILSNEDFYRGLSEPFGHWIIITLYFDDLSESEEEQVLANYTVNDGNDKSIKEGNYTFIYRPKFHIRQKLYELTLEDDNVEARSASFTEFASNHIISKETYEAVAFVRTKVDLNNDEIYKQVVGDFDSYSFSNPNDDDATVLGVKKPPYFALGSEVACTYVKALRNVVADLKYYKTNPLYKLLTLKSKQIDDRRDIVENVKEINGKISAIPEIERLSNKISASLLNTVGSTYSPKILVSSQLPEDFTELIQSLGLVVEDSLDYNGSGKIDDLSLGGANLIYLALKLYEYEEIRDSEEHITHFLLIEEPEAHIHNHIQKTLFDNFNFKNTQVFVSTHSTQISSVSKISSMNILSRQNGFTDVYHPSFGLTPKEISSVERYLDAIRSDLLFAKSVILVEGDAELILIPAMVKETLGISLDELGISLIKVDGTVFKHISNLFHEKRLKRKCAILTDLDSAYVKVADNIFDADFVESLVDAEDDGLRRKEELDKYIEGNEFITVHYAENTFETELVRYDENNNLFIEVMKTEYKKEAYFKKAESDVNSSDLRVRYKRVLKFAKKIGKGWLATEMVEHLSVDNRVPDYILQAIQFVLRDRNVEPIYQKMLDYNMSLMGVKAFDCINAEKDFSSKMIEYKKHFNDSFVRLLEL

SEQ ID NO: 65465 - protein, 583 aa, Enterobacter cloacae ECNIH2; identical to SEQ ID NO: 64895

SEQ ID NO: 65466 - protein, 610 aa, Bacteroides fragilis
MQKILIDEIRIDGFRGLKDFKMSLSETTVLTGMNNVGKTSVLKALQLLFGNSSFLSTEDLHIDKNGKSNCIIVDAKIVAIDNAGKRIPNFSDVWEIAFGADNIKMDAEEHAYVPLRVKYTFQTLQNSFNRDMQILNEWDSAGIAWQDLKGKKSTVKGDYFQFHYLDAKRDIQDDLKARTSYLGKMLGDVVSNYDPKDVAELEQKISSLNAEAIEKSDVLKNIQESLKGIDATMDSSGKVYVSPFAKKLRDLNKSLTIHYGTEDSSFTMDYHGMGTRSWSSMLSFRAFVKQMCDSKNPEDEAFLPIIAIEEPEAHLHPNAQKQLYKQMNEMPGIKIISTHSPYVAACAELSELRGMYKAAEKTICGSLPVAELIPEEQRKIRQAVLTSNGELLFAKGIVLGEGETEVQALPIFCQQHWGLTPVESGLSFVDAKGCGNYYPFVVLADAFKIPWYIFSDGEAKAQKELKKLLERIYNEDKELAEQKNIFLIPDEKDFEGMLLDDGYKDEIEKAIEQLKGEGYIDKFIRENNHKPKKREKTSKVCESCHQNIFVDIERIYDNEDGRLTALDDIMEKNKAQLGPVLANCIIESGKTLPPLVVKLFDGIKKDICHV

SEQ ID NO: 65467 - protein, 618 aa, Bacteroides fragilis
MCKIKLSSKQQEIASLKDGAILVRASAGSGKTRVLVERIKMLAGMTKRKVLAITFTNKACEEIRTRLAEVDENLLEHVFVATFHGLCESIIESHIAATRFVTMPQIFADDDRKKILEETITETPSLSQWYRGLNDKERRETLYRALDNISLIKRSVILDDELSKVIKDGQMRNLYLSYREQMDSLNAIDFDDLLLNAYQLLIHNPRIADLYRRSFTYICVDEAQDLNKAQYMVLRAITGSEHKNVMLVGDTKQSIYAFNGSSSKYMDDWFVNDYTPTIYNLNENYRSAKAILDYAQKVVHDDTLDVTLPYTGVCKEYAYDTPCEEAQEVVSGIKSLVGTEIEGYDGKLSYSDIAVLARNKFVLGKIEEQLKSSNLPYHYKTTGAGLEFASTAAKAFDLAMVVRTNPYDRLHLDMLQSIVGVSHCKSLEQVVESISDAFLKEVVQQASLLEDDGSNMYQTIKSVLNTLKASNASEFKSTDEALAVFDEFELLKHHWSSYAKSVTNYSLSAFRNAMSLGQTSVASLDVEGVTLSTVHTMKGQQAVVVFLVGMDEGTFPDYRAIKKGNNSIEMQQEKNNLYVAITRAQRHLYICYPQKRKMPWGDWSPRKRSSLLPKQTIV

SEQ ID NO: 65468 - protein, 527 aa, Listeria monocytogenes; identical to SEQ ID NO: 64370

SEQ ID NO: 65469 - protein, 713 aa, Listeria monocytogenes
MSNTNNFASDVVRMEDEDANIFHHLVSLNGGNEFNKEQVNAIRFDMRTHLRIIAGAGSGKTQTICAKAAYLVLKEKIQERNIVMCTFSKKASQEMKERVNEFLGGNSRIEVLTFHGWFQKEYNVLIKKYPYLEKYGIAGEVPGKGSGKDSHDRILMNLIKQYHLYNFDKYEEKPINERLSYWRNMGYNDEEIVAFIARYFDDKEILKDQLLSEVFSEMLKELERIKRREKVINFDDMLINLKCVLENDSNALSLIQTRYQYIFIDEFQDINPLQKQIIELICPPDYEKSVINSTKLIIVGDDDQSIYFFRGAEPRYIKEFDRQYRQTSIELMTNYRSIAPVVHIGNTLISNNQHDRIKKSMIPHKLNEGDCYAKVFQNEQLEANWIAMRILSLSSEEKPFQDQIGKPNYTETIVLYPNKNQLKSMIIALQEKGIPFVTKSDDDLLGIFGINFFKRSFNLLMDIIDAETIEIKKHLYKQLIKNICLYYYIPFAKSTDFVSDETNYTSEKLTDFICKEKKVSKKEMALIKSIFRDINEFIKTEELNIKVFVNWLVETPKVKKQLIDEEKDWLLKEVSNVKTLKELILKYKAARTLKEEMADKLREYDNNNYNAVYLLTIHSSKGLGYKNVFVKGIYKNSLPDYRSVDKESIELQPLIEQASPPTTMEEQRRLMYVALTRAKENLYVTYPREINDKPTLVSPFIKESNIMFSEEKI

SEQ ID NO: 65470 - protein, 527 aa, Listeria monocytogenes; identical to SEQ ID NO: 64370

SEQ ID NO: 65471 - protein, 713 aa, Listeria monocytogenes; identical to SEQ ID NO: 65469

SEQ ID NO: 65472 - protein, 527 aa, Listeria monocytogenes; identical to SEQ ID NO: 64370

SEQ ID NO: 65473 - protein, 713 aa, Listeria monocytogenes; identical to SEQ ID NO: 65469

SEQ ID NO: 65474 - protein, 527 aa, Listeria monocytogenes; identical to SEQ ID NO: 64370

SEQ ID NO: 65475 - protein, 713 aa, Listeria monocytogenes; identical to SEQ ID NO: 65469

SEQ ID NO: 65476 - protein, 527 aa, Listeria monocytogenes; identical to SEQ ID NO: 64370

SEQ ID NO: 65477 - protein, 713 aa, Listeria monocytogenes; identical to SEQ ID NO: 65469

SEQ ID NO: 65478 - protein, 527 aa, Listeria monocytogenes; identical to SEQ ID NO: 64370

SEQ ID NO: 65479 - protein, 713 aa, Listeria monocytogenes; identical to SEQ ID NO: 65469

SEQ ID NO: 65480 - protein, 527 aa, Listeria monocytogenes; identical to SEQ ID NO: 64370

SEQ ID NO: 65481 - protein, 713 aa, Listeria monocytogenes; identical to SEQ ID NO: 65469

SEQ ID NO: 65482 - protein, 527 aa, Listeria monocytogenes; identical to SEQ ID NO: 64370

SEQ ID NO: 65483 - protein, 713 aa, Listeria monocytogenes; identical to SEQ ID NO: 65469

SEQ ID NO: 65484 - protein, 527 aa, Listeria monocytogenes; identical to SEQ ID NO: 64370

SEQ ID NO: 65485 - protein, 713 aa, Listeria monocytogenes; identical to SEQ ID NO: 65469

SEQ ID NO: 65486 - protein, 527 aa, Listeria monocytogenes; identical to SEQ ID NO: 64370

SEQ ID NO: 65487 - protein, 713 aa, Listeria monocytogenes; identical to SEQ ID NO: 65469

SEQ ID NO: 65488 - protein, 527 aa, Listeria monocytogenes; identical to SEQ ID NO: 64370

SEQ ID NO: 65489 - protein, 230 aa, Listeria monocytogenes
GLYYYIPFAKSTDFVSDETNYTSEKLTDFICKEKKVSKKEMALIKSIFRDINEFIKTEELNIKVFVNWLVETPKVKKQLIDEEKDWLLKEVSNVKTLKELILKYKAARTLKEEMADKLREYDNNNYNAVYLLTIHSSKGLGYKNVFVKGIYKNSLPDYRSVDKESIELQPLIEQASPPTTMEEQRRLMYVALTRAKENLYVTYPREINDKPTLVSPFIKESNIMFSEEKI

SEQ ID NO: 65490 - protein, 527 aa, Listeria monocytogenes; identical to SEQ ID NO: 64370

SEQ ID NO: 65491 - protein, 713 aa, Listeria monocytogenes; identical to SEQ ID NO: 65469

SEQ ID NO: 65492 - protein, 527 aa, Listeria monocytogenes; identical to SEQ ID NO: 64370

SEQ ID NO: 65493 - protein, 713 aa, Listeria monocytogenes; identical to SEQ ID NO: 65469

SEQ ID NO: 65494 - protein, 527 aa, Listeria monocytogenes; identical to SEQ ID NO: 64370

SEQ ID NO: 65495 - protein, 240 aa, Listeria monocytogenes
HLYKQLIKNICLYYYIPFAKSTDFVSDETNYTSEKLTDFICKEKKVSKKEMALIKSIFRDINEFIKTEELNIKVFVNWLVETPKVKKQLIDEEKDWLLKEVSNVKTLKELILKYKAARTLKEEMADKLREYDNNNYNAVYLLTIHSSKGLGYKNVFVKGIYKNSLPDYRSVDKESIELQPLIEQASPPTTMEEQRRLMYVALTRAKENLYVTYPREINDKPTLVSPFIKESNIMFSEEKI

SEQ ID NO: 65496 - protein, 527 aa, Listeria monocytogenes; identical to SEQ ID NO: 64370

SEQ ID NO: 65497 - protein, 713 aa, Listeria monocytogenes; identical to SEQ ID NO: 65469

SEQ ID NO: 65498 - protein, 527 aa, Listeria monocytogenes; identical to SEQ ID NO: 64370

SEQ ID NO: 65499 - protein, 713 aa, Listeria monocytogenes; identical to SEQ ID NO: 65469

SEQ ID NO: 65500 - protein, 527 aa, Listeria monocytogenes; identical to SEQ ID NO: 64370

SEQ ID NO: 65501 - protein, 227 aa, Listeria monocytogenes
DYIPFAKSTDFVSDETNYTSEKLTDFICKEKKVSKKEMALIKSIFRDINEFIKTEELNIKVFVNWLVETPKVKKQLIDEEKDWLLKEVSNVKTLKELILKYKAARTLKEEMADKLREYDNNNYNAVYLLTIHSSKGLGYKNVFVKGIYKNSLPDYRSVDKESIELQPLIEQASPPTTMEEQRRLMYVALTRAKENLYVTYPREINDKPTLVSPFIKESNIMFSEEKI

SEQ ID NO: 65502 - protein, 527 aa, Listeria monocytogenes; identical to SEQ ID NO: 64370

SEQ ID NO: 65503 - protein, 713 aa, Listeria monocytogenes; identical to SEQ ID NO: 65469

SEQ ID NO: 65504 - protein, 527 aa, Listeria monocytogenes; identical to SEQ ID NO: 64370

SEQ ID NO: 65505 - protein, 713 aa, Listeria monocytogenes; identical to SEQ ID NO: 65469

SEQ ID NO: 65506 - protein, 527 aa, Listeria monocytogenes; identical to SEQ ID NO: 64370

SEQ ID NO: 65507 - protein, 713 aa, Listeria monocytogenes; identical to SEQ ID NO: 65469

SEQ ID NO: 65508 - protein, 527 aa, Listeria monocytogenes; identical to SEQ ID NO: 64370

SEQ ID NO: 65509 - protein, 713 aa, Listeria monocytogenes; identical to SEQ ID NO: 65469

SEQ ID NO: 65510 - protein, 527 aa, Listeria monocytogenes; identical to SEQ ID NO: 64370

SEQ ID NO: 65511 - protein, 713 aa, Listeria monocytogenes; identical to SEQ ID NO: 65469

SEQ ID NO: 65512 - protein, 527 aa, Listeria monocytogenes; identical to SEQ ID NO: 64370

SEQ ID NO: 65513 - protein, 713 aa, Listeria monocytogenes; identical to SEQ ID NO: 65469

SEQ ID NO: 65514 - protein, 527 aa, Listeria monocytogenes; identical to SEQ ID NO: 64370

SEQ ID NO: 65515 - protein, 713 aa, Listeria monocytogenes; identical to SEQ ID NO: 65469

SEQ ID NO: 65516 - protein, 527 aa, Listeria monocytogenes; identical to SEQ ID NO: 64370

SEQ ID NO: 65517 - protein, 713 aa, Listeria monocytogenes; identical to SEQ ID NO: 65469

SEQ ID NO: 65518 - protein, 527 aa, Listeria monocytogenes; identical to SEQ ID NO: 64370

SEQ ID NO: 65519 - protein, 713 aa, Listeria monocytogenes; identical to SEQ ID NO: 65469

SEQ ID NO: 65520 - protein, 527 aa, Listeria monocytogenes; identical to SEQ ID NO: 64370

SEQ ID NO: 65521 - protein, 713 aa, Listeria monocytogenes; identical to SEQ ID NO: 65469

SEQ ID NO: 65522 - protein, 527 aa, Listeria monocytogenes; identical to SEQ ID NO: 64370

SEQ ID NO: 65523 - protein, 713 aa, Listeria monocytogenes; identical to SEQ ID NO: 65469

SEQ ID NO: 65524 - protein, 527 aa, Listeria monocytogenes; identical to SEQ ID NO: 64370

SEQ ID NO: 65525 - protein, 713 aa, Listeria monocytogenes; identical to SEQ ID NO: 65469

SEQ ID NO: 65526 - protein, 527 aa, Listeria monocytogenes; identical to SEQ ID NO: 64370

SEQ ID NO: 65527 - protein, 713 aa, Listeria monocytogenes; identical to SEQ ID NO: 65469

SEQ ID NO: 65528 - protein, 527 aa, Listeria monocytogenes; identical to SEQ ID NO: 64370

SEQ ID NO: 65529 - protein, 713 aa, Listeria monocytogenes; identical to SEQ ID NO: 65469

SEQ ID NO: 65530 - protein, 527 aa, Listeria monocytogenes; identical to SEQ ID NO: 64370

SEQ ID NO: 65531 - protein, 713 aa, Listeria monocytogenes; identical to SEQ ID NO: 65469

SEQ ID NO: 65532 - protein, 527 aa, Listeria monocytogenes; identical to SEQ ID NO: 64370

SEQ ID NO: 65533 - protein, 713 aa, Listeria monocytogenes; identical to SEQ ID NO: 65469

SEQ ID NO: 65534 - protein, 527 aa, Listeria monocytogenes; identical to SEQ ID NO: 64370

SEQ ID NO: 65535 - protein, 713 aa, Listeria monocytogenes; identical to SEQ ID NO: 65469

SEQ ID NO: 65536 - protein, 527 aa, Listeria monocytogenes; identical to SEQ ID NO: 64370

SEQ ID NO: 65537 - protein, 713 aa, Listeria monocytogenes; identical to SEQ ID NO: 65469

SEQ ID NO: 65538 - protein, 527 aa, Listeria monocytogenes; identical to SEQ ID NO: 64370

SEQ ID NO: 65539 - protein, 713 aa, Listeria monocytogenes; identical to SEQ ID NO: 65469

SEQ ID NO: 65540 - protein, 527 aa, Listeria monocytogenes; identical to SEQ ID NO: 64370

SEQ ID NO: 65541 - protein, 713 aa, Listeria monocytogenes; identical to SEQ ID NO: 65469

SEQ ID NO: 65542 - protein, 527 aa, Listeria monocytogenes; identical to SEQ ID NO: 64370

SEQ ID NO: 65543 - protein, 713 aa, Listeria monocytogenes; identical to SEQ ID NO: 65469

SEQ ID NO: 65544 - protein, 527 aa, Listeria monocytogenes; identical to SEQ ID NO: 64370

SEQ ID NO: 65545 - protein, 713 aa, Listeria monocytogenes; identical to SEQ ID NO: 65469

SEQ ID NO: 65546 - protein, 527 aa, Listeria monocytogenes; identical to SEQ ID NO: 64370

SEQ ID NO: 65547 - protein, 713 aa, Listeria monocytogenes; identical to SEQ ID NO: 65469

SEQ ID NO: 65548 - protein, 527 aa, Listeria monocytogenes; identical to SEQ ID NO: 64370

SEQ ID NO: 65549 - protein, 713 aa, Listeria monocytogenes; identical to SEQ ID NO: 65469

SEQ ID NO: 65550 - protein, 527 aa, Listeria monocytogenes; identical to SEQ ID NO: 64370

SEQ ID NO: 65551 - protein, 713 aa, Listeria monocytogenes; identical to SEQ ID NO: 65469

SEQ ID NO: 65552 - protein, 527 aa, Listeria monocytogenes; identical to SEQ ID NO: 64370

SEQ ID NO: 65553 - protein, 713 aa, Listeria monocytogenes; identical to SEQ ID NO: 65469

SEQ ID NO: 65554 - protein, 527 aa, Listeria monocytogenes; identical to SEQ ID NO: 64370

SEQ ID NO: 65555 - protein, 713 aa, Listeria monocytogenes; identical to SEQ ID NO: 65469

SEQ ID NO: 65556 - protein, 527 aa, Listeria monocytogenes; identical to SEQ ID NO: 64370

SEQ ID NO: 65557 - protein, 713 aa, Listeria monocytogenes; identical to SEQ ID NO: 65469

SEQ ID NO: 65558 - protein, 527 aa, Listeria monocytogenes; identical to SEQ ID NO: 64370

SEQ ID NO: 65559 - protein, 713 aa, Listeria monocytogenes; identical to SEQ ID NO: 65469

SEQ ID NO: 65560 - protein, 527 aa, Listeria monocytogenes; identical to SEQ ID NO: 64370

SEQ ID NO: 65561 - protein, 713 aa, Listeria monocytogenes; identical to SEQ ID NO: 65469

SEQ ID NO: 65562 - protein, 527 aa, Listeria monocytogenes; identical to SEQ ID NO: 64370

SEQ ID NO: 65563 - protein, 713 aa, Listeria monocytogenes; identical to SEQ ID NO: 65469

SEQ ID NO: 65564 - protein, 527 aa, Listeria monocytogenes; identical to SEQ ID NO: 64370

SEQ ID NO: 65565 - protein, 713 aa, Listeria monocytogenes; identical to SEQ ID NO: 65469

SEQ ID NO: 65566 - protein, 527 aa, Listeria monocytogenes; identical to SEQ ID NO: 64370

SEQ ID NO: 65567 - protein, 713 aa, Listeria monocytogenes; identical to SEQ ID NO: 65469

SEQ ID NO: 65568 - protein, 527 aa, Listeria monocytogenes; identical to SEQ ID NO: 64370

SEQ ID NO: 65569 - protein, 713 aa, Listeria monocytogenes; identical to SEQ ID NO: 65469

SEQ ID NO: 65570 - protein, 527 aa, Listeria monocytogenes; identical to SEQ ID NO: 64370

SEQ ID NO: 65571 - protein, 713 aa, Listeria monocytogenes; identical to SEQ ID NO: 65469

SEQ ID NO: 65572 - protein, 527 aa, Listeria monocytogenes; identical to SEQ ID NO: 64370

SEQ ID NO: 65573 - protein, 713 aa, Listeria monocytogenes; identical to SEQ ID NO: 65469

SEQ ID NO: 65574 - protein, 527 aa, Listeria monocytogenes; identical to SEQ ID NO: 64370

SEQ ID NO: 65575 - protein, 713 aa, Listeria monocytogenes; identical to SEQ ID NO: 65469

SEQ ID NO: 65576 - protein, 527 aa, Listeria monocytogenes; identical to SEQ ID NO: 64370

SEQ ID NO: 65577 - protein, 713 aa, Listeria monocytogenes; identical to SEQ ID NO: 65469

SEQ ID NO: 65578 - protein, 527 aa, Listeria monocytogenes; identical to SEQ ID NO: 64370

SEQ ID NO: 65579 - protein, 713 aa, Listeria monocytogenes; identical to SEQ ID NO: 65469

SEQ ID NO: 65580 - protein, 527 aa, Listeria monocytogenes; identical to SEQ ID NO: 64370

SEQ ID NO: 65581 - protein, 713 aa, Listeria monocytogenes; identical to SEQ ID NO: 65469

SEQ ID NO: 65582 - protein, 527 aa, Listeria monocytogenes; identical to SEQ ID NO: 64370

SEQ ID NO: 65583 - protein, 713 aa, Listeria monocytogenes; identical to SEQ ID NO: 65469

SEQ ID NO: 65584 - protein, 527 aa, Listeria monocytogenes; identical to SEQ ID NO: 64370

SEQ ID NO: 65585 - protein, 713 aa, Listeria monocytogenes; identical to SEQ ID NO: 65469

SEQ ID NO: 65586 - protein, 527 aa, Listeria monocytogenes; identical to SEQ ID NO: 64370

SEQ ID NO: 65587 - protein, 713 aa, Listeria monocytogenes; identical to SEQ ID NO: 65469

SEQ ID NO: 65588 - protein, 527 aa, Listeria monocytogenes; identical to SEQ ID NO: 64370

SEQ ID NO: 65589 - protein, 713 aa, Listeria monocytogenes; identical to SEQ ID NO: 65469

SEQ ID NO: 65590 - protein, 527 aa, Listeria monocytogenes; identical to SEQ ID NO: 64370

SEQ ID NO: 65591 - protein, 713 aa, Listeria monocytogenes; identical to SEQ ID NO: 65469

SEQ ID NO: 65592 - protein, 527 aa, Listeria monocytogenes; identical to SEQ ID NO: 64370

SEQ ID NO: 65593 - protein, 713 aa, Listeria monocytogenes; identical to SEQ ID NO: 65469

SEQ ID NO: 65594 - protein, 527 aa, Listeria monocytogenes; identical to SEQ ID NO: 64370

SEQ ID NO: 65595 - protein, 713 aa, Listeria monocytogenes; identical to SEQ ID NO: 65469

SEQ ID NO: 65596 - protein, 527 aa, Listeria monocytogenes; identical to SEQ ID NO: 64370

SEQ ID NO: 65597 - protein, 713 aa, Listeria monocytogenes; identical to SEQ ID NO: 65469

SEQ ID NO: 65598 - protein, 527 aa, Listeria monocytogenes; identical to SEQ ID NO: 64370

SEQ ID NO: 65599 - protein, 713 aa, Listeria monocytogenes; identical to SEQ ID NO: 65469

SEQ ID NO: 65600 - protein, 527 aa, Listeria monocytogenes; identical to SEQ ID NO: 64370

SEQ ID NO: 65601 - protein, 232 aa, Listeria monocytogenes
NICLYYYIPFAKSTDFVSDETNYTSEKLTDFICKEKKVSKKEMALIKSIFRDINEFIKTEELNIKVFVNWLVETPKVKKQLIDEEKDWLLKEVSNVKTLKELILKYKAARTLKEEMADKLREYDNNNYNAVYLLTIHSSKGLGYKNVFVKGIYKNSLPDYRSVDKESIELQPLIEQASPPTTMEEQRRLMYVALTRAKENLYVTYPREINDKPTLVSPFIKESNIMFSEEKI

SEQ ID NO: 65602 - protein, 527 aa, Listeria monocytogenes; identical to SEQ ID NO: 64370

SEQ ID NO: 65603 - protein, 713 aa, Listeria monocytogenes; identical to SEQ ID NO: 65469

SEQ ID NO: 65604 - protein, 527 aa, Listeria monocytogenes; identical to SEQ ID NO: 64370

SEQ ID NO: 65605 - protein, 713 aa, Listeria monocytogenes; identical to SEQ ID NO: 65469

SEQ ID NO: 65606 - protein, 527 aa, Listeria monocytogenes; identical to SEQ ID NO: 64370

SEQ ID NO: 65607 - protein, 713 aa, Listeria monocytogenes; identical to SEQ ID NO: 65469

SEQ ID NO: 65608 - protein, 527 aa, Listeria monocytogenes; identical to SEQ ID NO: 64370

SEQ ID NO: 65609 - protein, 713 aa, Listeria monocytogenes; identical to SEQ ID NO: 65469

SEQ ID NO: 65610 - protein, 527 aa, Listeria monocytogenes; identical to SEQ ID NO: 64370

SEQ ID NO: 65611 - protein, 713 aa, Listeria monocytogenes; identical to SEQ ID NO: 65469

SEQ ID NO: 65612 - protein, 527 aa, Listeria monocytogenes; identical to SEQ ID NO: 64370

SEQ ID NO: 65613 - protein, 713 aa, Listeria monocytogenes; identical to SEQ ID NO: 65469

SEQ ID NO: 65614 - protein, 527 aa, Listeria monocytogenes; identical to SEQ ID NO: 64370

SEQ ID NO: 65615 - protein, 713 aa, Listeria monocytogenes; identical to SEQ ID NO: 65469

SEQ ID NO: 65616 - protein, 527 aa, Listeria monocytogenes; identical to SEQ ID NO: 64370

SEQ ID NO: 65617 - protein, 713 aa, Listeria monocytogenes; identical to SEQ ID NO: 65469

SEQ ID NO: 65618 - protein, 527 aa, Listeria monocytogenes; identical to SEQ ID NO: 64370

SEQ ID NO: 65619 - protein, 713 aa, Listeria monocytogenes; identical to SEQ ID NO: 65469

SEQ ID NO: 65620 - protein, 527 aa, Listeria monocytogenes; identical to SEQ ID NO: 64370

SEQ ID NO: 65621 - protein, 713 aa, Listeria monocytogenes; identical to SEQ ID NO: 65469

SEQ ID NO: 65622 - protein, 577 aa, Agrobacterium tumefaciens; identical to SEQ ID NO: 62728

SEQ ID NO: 65623 - protein, 580 aa, Agrobacterium tumefaciens
MSAVEELSKAQEEVVDLPAEPFVVSACAGSGKTKTAVHRVAAMQNRLTDRIGRILLLSFSNVAVETFQREYGMLVTNDKRRIGPIVEIDTVDGFLTKNLLRPHGHRVMGCDRCPFLVDGREPFLKHFTVWDGSKPARTADLRITMDGGKFSFRVGKWAGTAISRTPAVEALEKLGAVGAYTHESARYWAYRLLNEVPFVLRAIARRYSHILVDEAQDIGTIHQALLEKISDAGAELSLIGDVNQGIFEFTGATGDFLGNYHSRAGVTAKELNRNFRSVPSIVKIANQLSGRKDEPDRAAPDELSGAFYIAVDHDKRDEALLRFKKFLDKGSISQSKGVVVFRSSEVFNTWSGPGDPQGQGVIKSFVASARWRDQAKRFDQAFSQACAGIVGLLDDGHGDLLSLIKGQAVSQELRGVRREIWNFVKNPATGLPASNLDAVKEWHPQLVVRVKALLGRLEKQYGFVSGDNLGNRLKKTALPNGPLVEAPEGDEPQNLQFRLSTVHKVKGESLDGVMYVASRSNIEEFLAGTKTENGKIGYVALTRARNVFVLAVPSDAIAALKPLLDATGFQDGDVCALAGA

SEQ ID NO: 65624 - protein, 738 aa, Escherichia coli
MFIRKVALVNYRNFKGANFYFDKGINTIIGENASGKTNLFRAIRLLLDSSMPRYTLKLQEGDFNRSIGEWRGHWIIISAEFDDIAKDEASQSLFLHGAGNAEAEIVSRATYSLIFRPKSFIRQSLSKITSGDRSALEEILRSITIDDYETILVGKSSVDLSNPSVYKKIVGDFENIVFPQKLNHPELGVKLPNILNIPNEVCLTYIKALRDVVSDFHNNKTNPLLTLLKRKSGEISTTDFQPIADLVRNLNNEIENLPDICDVNSDIATTIKDAVGDTYSPKGMSIKSSLSEESNELFQSLKLFVAESSDGYEGAIHEMSLGGANLLYLTLKLLEFKYQHANQSIANFLLIEEPEAHIHTHIQKSLFENIKYHNTQIIYSTHSSNISEISNIKNMNIIGFVNNNCEVFQPSKSLNDVQCEFIQRYLDAIRSNLLFARSVILVEGDAEELLIPTLIKKVIGLSLDEIGISLINIRSTGFENVALLFSDERIKKKCSIVTDLDEAFFDITIPEGADNDNDEIKVKKKAAASQKSGAERKVRLQNFSNNNDWVEVFFAEHTFEVDFIKSGNKYYLDKIVDDVYKQAATIEIAKNELNSSDISISGVRALTMANYQGKGWFALTLGKVIDFKTAIPDYIFDAIKFSHGDFNRQLKYKILEHRYKSVVEHVSFAHELISKLNEPEDIQLKKEWSGYIKAYEDGLNAFTPKWNMFDILKGDVDALKIQMMNDLPNENKDILRRI

SEQ ID NO: 65625 - protein, 595 aa, Escherichia coli
MFTWEKGELNEEQEEAINMPGSVLLIACPGSGKTRTLTYKIALELSKLSDDKKYVLAITYTHKAADEIKERIELLGVDTSQLWIGTIHSFCYEWLLKPYSIYHENLKDGFKILNSYDSEELITNICSNYKSVKTKFYECNHYYTSEGMQLSGNFKKHEAIRNILKEYHLQLRSNNQIDFEQMLYFSFQLISKQSISKILSGIFSYIFIDEFQDTKEIQYVIVAKIIKSSKGAIDAFVVGDPNQAIYGSLGGYAISQERLEEMTDSHFSCLTLDKNYRSSQRIIDFYRNFNVLHSATSSESELKGYKSLITYNQIINKVDLVDHISKYIEHNIKTLGIEQKEICILAPWWMHLAALTRNLVTRLPNYNFDGPGLVPFSRDIDNFWYKITQVILTEPSPNLYVKRMRWVDDILSEMNFSQVDVHKLNPRLFLNIINDIKIDVVNGLDYLRDFFSELFNRIDVNISSYPLLQEHYDSFFKSSQDRIERLKKDNEHFETHINAFRNAFKPRTGIKVSTIHGVKGGEYDTVISFGLLQDMVPNFNDSSDESAKKLLYVIGSRARKNLHLISERGRKGTCKAYESTKVLSGTKFPYDPDPF

SEQ ID NO: 65626 - protein, 582 aa, Burkholderia sp. MSh2
MHLAQLTISNFRKLQKAELRFQPGLNVLVGANNVGKTAVVDALRALLAGHDEPYPRLDIDDVHRPHGGVPGGDITFQYIFRGLDEDDEADFLPALKIDAAGKAEAHITIRYAEADKIGRLRAKRWCGDHEDVGLTADMMENLRGVYLPPLRDASQSLKPSRSSQLARLFQLLSDDAGRKEINEALEKLDEELKKHQPITNTHTAIKSRHDSMLGPQLAQLLELGLSGSDFQRLASRLSLMVDAFEIEQNGLGFNNLIFMAVVLSELAKNPESSYRGLIIEEPEAHLHPQLQAVLLGYLETIKATDGEKPVQLFVTSHSPNFASIADIKCLACLVDTGSTVETFFPRDVAFEKGKREKLERYLDVTRAELFFARRVIFVEGAAELMLVSVLAEKAGYKLREHGVSLISVEGLNFDSFLPLFGESALKIPASVITDADPVDTPTDGSEPKALYPAAGDAVKVSDNTAKMKQSEDALVKIFHGVKTLEYDLALHEDNRSAMLKALKELHPKIGEAVETTVNAAIGDADKARLLFSGMFERTQNNVQKGRFGQALAQILAEGAACTVPEYIRLAIEHACQKTPENP

SEQ ID NO: 65627 - protein, 581 aa, Burkholderia sp. MSh2
MTELSSEQSTIIDATLAPMSVIACAGSGKTLTSVRRLAEIRRQLGDHRGRVALLSFSNVAVDTFRQNYQVLLKEMSVGMGGHRVDIDTLDGFITRHVLHPHAHQTMGATQAAFLVMGGESFLNGFTFKPGNYPVSITSMQVGARTSGVYFYYVNNDQVVELNQSDASKLVHRLGKTGAYTHNLGRYWCYRTLQEQPVILRALARRYPHILIDEAQDIGTLHQAILEQLIGAGVRVSLIGDPNQGIYEFAGANGAFLSQYGGRTGVTDLGLTRNYRSVPPLVKLANKLSARNDVADREAPDTTHGAFFIPYKTAERDKVVTAFQAAVLAAELKVERSAVLCRGRDLADKLAGNDSPAGQGTVKGFAQAAIARDKKQDYLGAFKGVATCVVSLLADPPKGLVASITQPARYPEAQSLRRLIWRFARNPDTGLPSTTLLADTEWHPQLLARVKALLAVLESDHGLKPTDNIGMKLAKKSLPNAPLAVVSDLAAPSAARVRVDTVHQAKGESLDAVLYMANKEHVSALLGGVSSEVGRIGYVAVTRARNLLWLGVPSNALPDLRQSLISHGFQEAGISAVPSVTS

SEQ ID NO: 65628 - protein, 771 aa, Sphingobium yanoikuyae
MHIEFVEIANFRKLLSARVDLSTTTTLFVGANNSGKTSAMLAMRRFLSPRRCPFEIHDLTLCHWPNLITLGESWIAARDADEVVDLTIAPWVSSLPTLDLWLHVETGEMHHVRDLIPTLDWEGGRLGVRLRYEPKDLGLLYKDFMGAVTDAEAMKAAAIAAVAVEHPDVDPQPDPPKLTVWPTNLIDFLSKRLSAHFTIRAYTLDPALLVDPVKSQAQPQALPLASLPIEGDPLKGLIRVHDIPAQRGFGEEQSGDDDDDTPVSASSNRLSDQLRSYYAKHLDPTKGPDPKDLGALQAIEAAQDAFDKRLTESFTAAFSEVEGMGYPGVTDPRPRVSTRLKAIDGLNHSAAVSFEVDVIAEDGVTMPLLRLPEANNGLGYQNLISMIFRLMSFRDAWMRVGKASKGGVINSTEPLHLVLVEEPEAHLHAQVQQVFIKKAYAVLRAHDDLIGNDKLRTQLVVSTHSSHVAHETSFACLRYFRRLPAGMVAKVPVSTVINLSEVFGTSNDTERFVTRYLRAQHADLFFADAAILVEGPAERMLLPNFIRAHYDELNQCYITLLEIGGSHAHRLKSLIDHLGLLTLIVTDLDTLDKTGGASVQPAMGVDQKTNNATLKTWVPGTDDVDTLLDAPVAYKIQSQPEDQLFAVRVAYQTPLTVTLPGTDAPEIALPYTFEDALVFENLAFFAALKGTGLVRKFSDAIEAGGGAAAIGEQMYLALKNGKKAEFALDVIETEGFKDLVVPRYIAEGLEWLLLQLKKKRVEILPKVEVAV

SEQ ID NO: 65629 - protein, 634 aa, Sphingobium yanoikuyae
MSTVPDDDVFDAKADETILACLDLDKPKSFFLYAGAGSGKTRSLVEAIRIVCREQGRRLSLAGQKIGVITYTNAACDEIKQRLEFDPRVEVSTIHAFAWSLIGGYDGDIRKWVAARMLQDIAELEKAQAKGRATSKAAIDRARSIESKRRRHAGLDAIQRFIYSPTGDNRTRDALNHAEVIAMTAEFLTAKPGLRRLLVTRFPILLIDESQDTSRRLMDALLDVQAAHRESFILGLFGDTMQRIYADGKTGLAEAIPEDWAKPRKEMNHRCPTRVIELINKVRRDDDGQEQRPRADAQPGVARLFLLPHTTANKSAAEAAIAQRMADIAGDPAWADGSEAIKTLALEHMMSARRFGFEQFFEPLYAVQRINTGLLDGTGAGLGIFTREILPLVKALRVGDRFATAAIIRKTSPLLDRDALRDAGEAQQDLLDRAKGACSGLLALVDGQPSASLRDVLRYVAEHRLFTVPDVLLPFAAADPDPDPVDGNDADEDEEEIDIKSEIAAWRQALEAPFGQIDKYDRYVCGFSQFDTHQGVKGLEFPRVMVVISDEEARGFLFNYDKLFGAKGKSKTDLDNEAAGEETTIDRTRRLFYVTCSRAERSLAVVYYAENPTASRDALLQQGWFAEDEIEIVN

SEQ ID NO: 65630 - protein, 601 aa, Sphingobium yanoikuyae
MRVARIVIQNFRTFASLDVNVADDLCCIIGENNTGKTAILRAIQICLDNMLPSSFRSLLREDIHSAIDIAQPSQVLIGIELTGFEGRVNEEALVSTWKTAADRARIFYRFRPRPAVREQLASGEIAPGTLTLEDYQWEIRGGGDPAIDLTNIAWDDEGIGESVRFADLQSYLLVHLPALRDVENDLRNPRQSPLIRLIEAFEIDAAEQDALIAILDQANDAIANSETIAQIAAAIDARFKDVAGPAFEMDATLGLSAATFRAIIRNLKIILSDLSLTSFEPGRNGLGMNNILYIAILMEYLQRRIALNRSAGQLILIEEPEAHLHPQLQFSLIAALRAIGVQTILTSHSTQVTSRVPLSSIVSLTKREDATIAAGNLALNAALTAPEIADLERYLDATKSALLYARKVMLVEGPAEMFLIPALIEQVYGVKLERLGISVIAIHGVHFDIYAKLFRAGSLEKKCAIVADADMKPSDAEDFDPETDAPDLVALEGDFVSTFAGATTFERELVSVGRLPMLIETVRALGAPQILEQMENGFATLVLGGLGLAEETALRVELGRITLNTAKRFGKARFAQIAARYANLATDLPPYIEQAYEWLTE

SEQ ID NO: 65631 - protein, 587 aa, Sphingobium yanoikuyae
MIRLTPEQREAVEHEGNLLLTACPGSGKTRVILAKLLTLADQVVGTPQFIGCITYTNAAVDEIEARLRTYGNNAIADRCEISTIHAFCLEFILRPYSWLIPEVPASFQVLSRENSLFEQIVTAVEDAFGRMPAGQVFEDYESLRIDVNGEPCGQGIETGIVTDESAALYWERVRAHGYLDFAMILYYSWRILEQHPFVGRGIASRFAWLLIDEFQDTTDIQIAIFGALRHFLHTRFFLVGDQNQSIMRFAGARPELAEQFGDQIDAHRDTALTGNFRCGPAIVSTASALIPTVPGMQSAGDAAQLAAQVNYVHVGRPIDAITDHFLPALQDAGIPLGKAAILAPWWTHLIPVARALREFDIPVFGPGARPYKRRRLLAGLAEQLGACAEAGNYLGIPGVERALFRLIGDLTGNSRYDMFSYQGRRVSLGLIYLARELADQHPGGVAWLRVIAREAGNYLEREEWLTSSAKQPLIDSAEEMLSDMQASKVDLANLLISDMSLFANPENALKLITLHNSKGREFDGVALICMNNGSIPHFSTSTQEDYDEARRLFYVGLTRAKRILLVASDQSHWKNTPTPFIAEAGLG

SEQ ID NO: 65632 - protein, 649 aa, Sphingobium yanoikuyae
MKLVELRLSNFRCFGPEATKISLANTTFILGPNGSGKTAVLQALGRMFSLDPAQRKIRTSDFHISSDEDPEDAPSTRDLWIEADFEFPELADADADEAEDGTMPAVAGNFSHLQMETDDASVRIRFRLQASLDEDGDIEESFTHVMQVDDDGVPTVQGRVSKQDRAAVQVHYLPARRNPADHISYAANALLGRALRAANWSAERQTISALTEQISAALVGNASVKGIGDEVTKLWESLHKGKFYANPTLSFAQSEIENLLRHLSLSFAPGHGTPQVDFSRLSDGQQSLLYITLVLAMRAIGNAVLAGDTNAFDIDKLRPPLFTLVAVEEPENSLSPHYLGRVLRTLSEFAEDGDAQAVIATHAPSLLRRVEPESIRYLRLDEERRTTVSRITMPSGAEAHKYVREAIQAFPELYFARLLILGEGDSEEVVLPRLLAARGILADDASISVVPLGGRHVNHFWRLLSDLGIPFVTLLDLDLARHQGGWGRIKYAAKQLLRFQEDPVDFDEEGADAIPKWDSKQGLMLNDDGWIATLEKNAVFFSSPLDLDFMMIEAFPDAYGLTDAELEDPDDGTIDAVLGKSHDALGGQYDDAQQQLFGAYQERFKLGSKPSWHIRAMAKLDDDALLESMPEVLDRMFDRIEEKLAELPE

SEQ ID NO: 65633 - protein, 549 aa, Sphingobium yanoikuyae
MIPIARWAPSDGLVLEPNALDAAKETARNLALTAGPGAGKTEMLAQRADFLLRTATCRYPRRILAISFKIDAAQNLRARVRRRCGADLGARLDSYTFHAFAKRLIDQFRPVLKGANALDPDYSIGQRRVQRTSITFADMVPLAQTIIENSRIARNAVRQTYSHVFLDEFQDCTADQYALITACFGGSTCLLTAVGDTKQSIMGWAGALEGIFQTFADDFTAHPLNLYQNFRSAPTLRRMQNAMVRVMDPLAALDDADIVGNEGSIAILNFADDEEEAEGIAARVQQLADNDGVSLSEIAILVSKQQQLYCQKLIAAFDACGIAYREEDATQNLASEPAARLIVDFLLVTSSPRQPAAHRRLLDLVVFNQGVDEEREYQLRSKWNRLLGETRKAIATGKIDLSHKPDLEKLVDTLLAAVGSEAIVAMSSTYAQGDMLATCIVETVDRAHELLCGGVDPATALSSFSGDRAVRIMSIHKSKGLEFDTVFMLGVEEETFWGKQADERSAFFVGISRAKLRLFLTVCEERSRPAGAGRWTVARRPHEEFLSYV

SEQ ID NO: 65634 - protein, 603 aa, Halomonas sp. KO116
MYLSRIKIDNFRNFRDLDVALGGNVVIVGENSVGKSNLLFGLRLIFDPSLPDSSRQLGLADFWDGLEEVTNETTITISVEIKDFEEDLDILAVLTDYRLDDDPDTVRLTYQLRAQPSLDHSPASDDDFSFVCFGGEDEAKRFGHDLRRRITMDLLPALRDAEGDLAAWRRSPLRPLVEDAFIGIDKEALKEVGDKIAEASAAAIDFAEVKTLEASIAELFLTMAGSKQDVHPSLGFSATDATRINRQIRLLIDEGRRGVADASLGSANLIFLTLKLLDLQRLIAANKRDQSLLAIEEPEAHLHPHLQRLVYKHLFETIVNGEDDGDRDASGPLSVILTTHSPHIASVAPLGSLLLLRSHSNEGTKGYSTAEADFTTTDTEDLERYLDVTRAEMVFTRGVILVEGDAERFLIPAFAEDMDISLDEHGVSVCSVAGTNFIPYVKLLCALGIPFSVITDYDEVNETPRAYNRALKLVRIIDEAAGGDGTDLLIKAIKDKETWEETFAEIQKFGIFVNWSTLETELFEGDYAQKMIDTLREHNFSAKRKTTLDSWEKKPKDYNADELLKMIEQMGKGRFAQRLAARTPNKPVPDYIADAINHVINLV

SEQ ID NO: 65635 - protein, 598 aa, Halomonas sp. KO116
MSSILSDRAFYLRAATDLRPNKKQWQAYESTGHCVLLAGPGSGKTKTLTVKLARMLSEDVEEPRGIACITYNNECARELENRLEALGIAPSRRVFIGTVHSFSLTQILLPYAKVAGIGLPDEFTVASRQQTRACLAAAHAKIIGGPENPQNWDMRLGRHRRRFLNRARPEWKTLDPQLTGLVEAYEAELRARGLIDFDDMPLLAGRALVTNKWLRTAMVAKFPILAVDEYQDLGLALHGMVMGLCFSAGMRLFAVGDVDQSIYGFTGAAPELLRRLSERDDVETVQLGLNYRCGSRIVSASEYALGEERGYRAPEDADEGTIFFHPCTGGYAGQARYLMEELIPEIRERRPNINLGEIAVLYPAAFLGDEVASSAAEHGYSVIRTDGNALYPRGSRLMRWLEQCAMWCCGGWRSGTPPLSRVVSEGTRLFHEAITDEDERLAFQRDLTAVLWDHRDETLGLYNWLAALRDDIIQPRFAIARSLADEYATLNDFLTRISPTGDIDDFPVAEFAGIGSGLDRINLSTLHSSKGREFDVVILFGAEEGRLPRNHVSDNDVREARRLFYVGFTRARHEIHLMYGQHNPSRFVTEVQRHLEEE

SEQ ID NO: 65636 - protein, 663 aa, Epilithonimonas sp. FH1
MKISSLKIKGFRSFGSSNIIIPINEHLVGFVGLNSSGKTTALEAMRKLFGQSLADRELTRKDFHIGKDEEVDEVYERELSIEARIDFSNDEKESIPHFFSNMVIDDEGENPYIRIRLEASWKKSELVPDGEIETKTYFIKVPEGEKESDENKPIYPSHFKSLIQIMYVPAIRRPAEQLKFASGSILFRVLKKIKWDDAFKAKFDEKVEEINAEFKALSEFNTVQTSITGFWQQFHKDNRYKDATLSFGGSDFDSILKKLEISFSPTGVHKPYKIDELGEGYRSLFYLTLVCALLDIEEKLADEQDKENIGINRPLLTILAIEEPENHIAPQLLGRVIKILKTIAGQENSQVFLSSHTPAIVKRLNPESILHFRITEKYETEVNKILLPEKTDEAYKYVKEAVHNYPELYFAKLVVIGEGDSEEVIFNRLMEVMDVDFDDNIITFAPLGHRFVNHIWKLLETLHIPYITLLDLDLEREGGGWGRIKYALKQLLKIGIKKDDLLETDEGILSDVEFNAMHSWKVSQKATLNGWINFLKQYNIYFSAPLDLDFLMLKHYPEFYKKAIPKNGGPQIPDQAKEAEKFEEKVESAVHATLKSSQATAATYTKYQKELMIWYNYHFLGRGKPTTHIQVLSSMTDEDIKENLPEVFTQIFERISTLLKAEE

SEQ ID NO: 65637 - protein, 614 aa, Epilithonimonas sp. FH1
MKPIKNDEWIPTYGLELEQNAFDVAIATDNNLVVAGPGAGKTELLAQKACFLLQTNTCKFPHEILAISFKRDAAHNLKERVRLRCGEELAKRFDSLTFDSFAKQLFDRFNQAVPTNYKIKSEYDVVLDDRTILDYYKAEDITYFSSVTTADILSLHHNKLPHTNLNLGENIRNKVWKTMIWQSKLSFKMIMRLAEYIININPKIKEYLQETYHFVFLDEFQDTTEIQYDFFKSCFLDSTTKFTAVGDDKQRIMMWAGAQESIFEDFIADTTAERIPLTMNFRCAPRLVMLLNHLTEKLLQKTDFATPSKKWHPEQGECSVWVFENPNLEKQILFTEVQKWINEEKIDPRNICILVKQQLDQYAGELIRYFNENGVKARDENKLQDLLVQEVSVYVINVLYVIFKKKSIDEKDKAFNFLSQLHTELEDSQLLKLEISFSIFVKKMNNNYNVDEMNEEVIKKLFEEVVNFAGKDLIRASFPSLRNSDFLDNVLQNLENEFIKNYQESNDIVLALDMLVGKDTIPVMTIHKSKGLEYHTVIFIGLEDGAFWSFESQPDEDKCAFFVALSRAKERVVFTFSKLREGRFGLKTQRIDKIKVILEELVSSGIVLITERKN

SEQ ID NO: 65638 - protein, 692 aa, Elizabethkingia meningoseptica
MYISQIKITNFRNFENTTVDFNDGINVVIGHNNAGKSNLVSALSLVMDNSKSKRLNIDDFYKLIPTAHLLTSPPKVSIEITIKKGSYETEDDLVTVSTWLTRLEEDYEAKLTYEFFLPEKHVENYQTLVREIPENENQNKNIWNTIKHDFLRLYVVKIWGGNVVNQSTADVDSLQKFDFQFLDAIRDVERDMLTGRNTLLRDVFDFFMDYDIKIHPTKTAPEKHMDIKERKIEFSEKAEELVGLLHRRIASGKEEILSYAKDTGASFNNAVPDFEGVISETELYSVLKLIVEYETGIKIPATRNGLGYNNLIYMSLLLAKMQVNNDVNYLDSNAKIFSMLAIEEPEAHLHPAMQFKFLKFLDENKTKRKVRQIFVTTHSTHITSAVGLDEIICLHNNEGETIVAYPGKTFLNAEGQPLDHSKKYVERFLDASKSDMLFSQKVLFVEGLAEQILATVFAGYEDKSLEDHHVSVINVGGRYFKHFLYLFDSEKDFSISKPVVCMTDRDPERKNRTVERSNFQKCYPFEYNSEAETFDYQQNSFSNEYQPETHPNITVYSQDSELGKTLEYEIAFSNPSLKLILTDSMKNRNELERLMDLYDHEDSTLENFFEILRESDENERIISGITLNTSLDLDGKKRSIIAARYLNSIGKGENALELAVVLKDNLLKKGTEEYVEFNVPQYIKDAIEKLCQ

SEQ ID NO: 65639 - protein, 561 aa, Elizabethkingia meningoseptica; identical to SEQ ID NO: 62741

SEQ ID NO: 65640 - protein, 407 aa, Tatumella ptyseos ATCC 33301
MLRLAQDIRNEEQSRSDQAIFDELNTLLSDVNNKVRDISYVAQATAELNEELRKLSYNHERLRVQLDTGAIGIEQFIEKLELGASSSGKKLMLGGDGFNNQILLALWRAKSLREHDVSSEVVIYCIEEPEAHLFPHQQRKLATYLTENLPGQSIVTTHSPQIAVNFTPDSVIRLFSRRGETSAASNGCSACISDAWDGMGYRMSIIPAEAFFANVVLLVEGPSEVIFYTELAKALKIDLDWLNVSIMSVDGVQFDVYTKILQALNIRWVVRTDNDAAKVPRRTDWSYTGVNRALALCGLPKGINVPNEIKHKDLVNAWGTVSPQVNPYGVFLSFTDLEGDLAGTLTSYMMEFSGKTNPDDAVDYFREKKAIRMREFLNAYRTVLPELSDKDIARPLLYAQRLAKEEV

SEQ ID NO: 65641 - protein, 540 aa, Tatumella ptyseos ATCC 33301
MILTAEQVDAISHCGNLVVTACPGSGKTTVLVHRIIRHLELCRDFQGVVSISFTNKSSTELKTRCKTVVGELKASFFGTTDKFMLREIVMQFIAHLWFRPHQETELVRWSDLETQTKAKLEQYFLHAEMENNISDTGMEELCKLYQRGTIVLELLPIIACYVVMHSPACQRYLKARYTGGIYVDEYQDTGFFTHQFFKLLASIGLQLTVVGDAEQSIYLYSHRGSDSLNDFLQSSDFCHKRITLNFRSHPSIINYASRLQDPTCHLQQADELRVYRKKIEGSQKNIAEWIDSVLPAMKVHFSIPCNSEIAILVRSNMCAELIADNLKAPNRAYLDDRLSKIGGRTSELIRALLSYRFSDELTVQPLLDEFLNPTCKRHLVVQTRILMRKTRSCTDQALLDVIKEIVFRCFGVGMAEEHINGIEDALTIQRVRNNYLKVHEDEVQIMTLHKSKGLEFDFVFHLDLYDWVIPIREFVQGSYDVIFQNEQQCLNLHYVGVTRARKAVTLLYSDSRYNTNGQLKRGAPSQFLNRSGLDGLFIKM

SEQ ID NO: 65642 - protein, 729 aa, Staphylococcus aureus subsp. aureus SK1585; identical to SEQ ID NO: 62500

SEQ ID NO: 65643 - protein, 597 aa, Staphylococcus aureus subsp. aureus SK1585; identical to SEQ ID NO: 62501

SEQ ID NO: 65644 - protein, 740 aa, Xenorhabdus bovienii str. oregonense
MKLTKLQIKNFRSLKDLHVDLEEYISIIVGKNNSGKTSLLLALERFLGSTSPHFELDDFNIDFQKDLVEIINDKISPTEPLQISLRLFIEYEDNDNLANVGNKIIMDLDPENNCIVLDFLYQLSSENLDILKRDYITHRDKKAAKAQPILDFLRENHSNYFKLARRSVQFDHLKQKVQEDYYIDLIKEGVRLEDIISFKRINARRSVSNKDSDRSLSAMSAKIYSTILTNAGEEDVFDSFKETLNSTDGQLNSIYSDLFKDIIDDVRKFGGIREGDTQIQIKSTLQHRELLEGNTTVMYGQGGEAYALPENFNGLGYLNLISIIFDIKIILNEFKQRKSPKPADINLLFIEEPEAHTHPQMQATFIKNIKSLIGRVITNTDGITRPLQTIISTHSAHIVTESDFEDIKYFKREDGGTYSKNLKDLEKRYGDVKHNAHYKFLKQYLTIHRSQLFFADKAILVEGETERILLPAMMRKKDQFDEMKAWETSTQSLIPLLSQNISVVEVGAHSKIFEIFLDFIGIKTLIITDIDSAVEKPRLTEDGQPQRNKEGNPIVDLCAHVIDNATHTTNHSLQFFFNVDSNLTYFLQLKSNEKTVHKNKTTNRWEKNPNGQVMCAYQVSETDTGGINYYARSFEDAFFHINRQFINDTCNRNGQIDETKFPSLTMKHLKIYLGDGSSFDMAEKGITKKPSFAIEILLNSQPTTYIKVNSAGESKKFDLEFSNWKTPFYIDEGLTWIKAD

SEQ ID NO: 65645 - protein, 632 aa, Xenorhabdus bovienii str. oregonense
MDQSGLKLEPEVVDILKHIDEGNNFLLSGGAGSGKTYSLVQVIGELLRIEPCSFIACITYTNAAVKEIESRISSNRLSVCTIHDFLWNAIKSYQNELRTVLIKLMEGEAPQIKPGNAIVSNDMFDRKLIEYKEFRMLEQGIISHDEIIILARNIFSNYPKIQDILRDKFRYILVDEYQDASPYVIDILLDLLPLSSRKGVCGFFGDSMQSIYDEGVGTIQSYIDKGIVKEVQKKQNRRNPWLIYELANQLRCDGLIQNASDDQNAPNMDKGIIKEGTICFYYSSGEIDKLDHVRAHLNWNFDDEPETKELNLTHNLIAPQAGFRDLMEIYDKDGVLAFRDRVVKFIKECDDLNKYNELTFGEVINKLQKDKTGKELTAINPTPWMQTFINDNPDLFEKAKKNNFHLFRHMYVDKSQLIDDKKQSEDEIQRKGTQRCDFIKHVFKIQTIIHLYEQRRYNDFLRKTEFRINNANDKVLLKKYIETILSMKDHPIIDVINFAHKHNLCIKDDRFNCFSQKKEYLFNRLINVKYESYQKLYEYLEGRTAFSTQHKIKGLEFDRVLVVLDSGGWNKYNFNYLFERNGTETVRLRTQKLFYVCCTRAKESLAVYFRNPSNATLEQAKNWFGTENVINI

SEQ ID NO: 65646 - protein, 669 aa, Xenorhabdus bovienii str. oregonense
MLDIWLDVPRVQIHHVVHVLPNIDWAGGAIGVRLNFEVGDAEQLKADYLEGRLKAKKIENEAPEEQKPSIAPRNLVEFLENSFSKYLVLKAYSLDPEQIKMPDSKGFACIQPLSVDALEIEGDPFQDLINLREIPAMRDFSIGSPLSFGGEDSQSGRLVQTLSDHVRNYYDQHIDQTDTVNVDDISAFSALQRAEKAFDKRLKTNFSSVFEEITNLGIPGINNPSIVINTKFKSLDGLSHSSAVQYKVSQPEDGHEERYLPESYAGLGYQNLIAMVFLLMRFRQDWLEPKTNRTEVVKIAPLQLVMIEEPEAHLHSQVQQVFIKKAYDVLRNHSELGDLDTYSTQLLVTTHSSHIAHEVDFANLRYFRRLPVEVQGQSPTTTIINLSSVFGKDLKTLSFVKRYIKATDCDLFFADGAIFVEGQAERILIPHFIRCHFGDLSRRYISVIDVGGANARRFEPLIEALGLTSLVITDLDASLPTEVETKNGKTTTRLKKAQPTFGVNQVTTNPTLKEWYPKLTKIDDLLSMEESKHYIYFSNEYDLYVAYQRAVPNPRDKNEPKLVPRTFEDALVYANFEVLENISGSLTTKKIAELVKNKDKLSNNELESELFGIVNKAEKAAFAIDCLVEINDGSSLSPPPYIEEGLKWLQEKLEEPSLFSVETGAVANG

SEQ ID NO: 65647 - protein, 314 aa, Xenorhabdus bovienii str. oregonense
MVSSFTTGIPDTDNSVDVIIAECLNPQAPKSFFLYAGAGSGKTYSLVKGLEFFEKAHGAKFRKIGKKIAVITYTNAACDEIIERVKNNPLFHISTIHSFCWLQIKTFHNDIRNWLQAALSDEITGLQKKEAKGRSGTQASLIRQQSIVSKRERLDWLSKPREFTYNPNGDNIGKTPLSHSEVLNIFGDFLISKPAFQQIIVNRYPFLLIDESQDTNKHLIEAFFVVEEQHQGRFSLGLFGDMMQRIYGDGKIDLGENLPDRWAKPIKQMNRRSSSRIVTLANDIRAEYGSCIQYVYCEFYCVEPIAAYNTKITL

SEQ ID NO: 65648 - protein, 717 aa, Xenorhabdus bovienii str. kraussei Quebec; identical to SEQ ID NO: 64864

SEQ ID NO: 65649 - protein, 647 aa, Xenorhabdus bovienii str. kraussei Quebec
MSEEFYLAETKPIDHDNRVDEGIQECLRIGSGKSFITFAGAGSGKTYSLKEALDFLKKEHSGNFIRQGKQIAVVTFTNNAADEIMDRIEQNPIFAVSTIHSFCWSAIAGFNEDIRKWYLEKIPAVLAEVDDLERRGRAGKASDARKRTITLLKEKMDWLTEPRSFIYDPNGVNSTKNALSHADVLKIFSSFLTTKPMMAEVIVNKFPFIFIDESQDTNKDVIRAFFELQYAKSNKVVIGLFGDTMQRIFGGGESELGNTKSSGWITFDKEMNHRSARRIVALGNQIRSEYDKRKQFARDGAANGYVRYFLLSNDVSNKNEIEARIREVMAEVTDDADWTDIQSKDTAILLLEHKMAGRRLGFDDLWNKLEKSDKIKERISNGESTELNFFSDIVFPMAEASRNERRTELMSILRERNSPLLEANVLDSNKDDPLSLARTAEHAFKNVVSNNKVSFRAVLEVLAKHNLLRIPEKLLSFVVASEERKVESEPEQMGAIQEVESETEERDDSEITAWAEALETDFFQIRNYKDYINENSIFLTHQGVKGNEFKRVMVVMDDDEAGGFLFSYEQYFGAKELSSSSKKKQDAGEETGLDRTRRLFYVTSTRAKNSLAHVIYTSDVAKIKENLINKKFAQEGEIIEFYGNKYE

SEQ ID NO: 65650 - protein, 626 aa, Xenorhabdus bovienii str. kraussei Becker Underwood
MTGLMADGKKTSDLAQFIDVLKNRHKGLRMSILIDTIRIAGFRGIKNLEVSLSRIIILIGPNNAGKTSLIKALQLSLGDYSRYLSEEDFYISPDERRVNEIIVDVRIVPADANGDRVANFDIEWLTEFGDKIQSEANGNQFVAIRTRSEQNVTKGGFDTNRTTLEIWPPFETWTTIKVKGTKLGSRLQSLPLVSMEAQRDIHQDLRDRSSFIGKILASVEYDKNDILELESLIKQVNDGAVNKSKELKSLKSHLEKLNQSIGGTGGAEVTPFPKKIRDLSKNFSVYSGETDTNSFSMEYHGMGTRSWASMLTIKSFVEILSHRHIAESEPLFPILTVEEPEAHLHPNAQKTLYHQLSDTNGQLILSTHSPFLAAMADLYQIRSLVKTKNGIVAHKISHTMTDDEKKSISRSILAKSGELLFAKCMLLCEGVTEEQVLPAMFEIYASATPWSVGLSCVNVGGKDAYIHFALLPFSFGIPICILSDNDINPNSGTKTQDDVTQQIEKLSKKMGLPLTNDFYDIYFLDDKHDFEKELIDHGLRHEIIDAFVLLATTGNKNNEKFREAKYNEFNQLTDEKLLEKMSKEKASYAGFLADVLLANKRKKSVDDLVPPNVRASFDCIKGWLAC

SEQ ID NO: 65651 - protein, 631 aa, Xenorhabdus bovienii str. kraussei Becker Underwood
MLNLSKGQEAVVHAEIGLPMQVLAAAGSGKTRVLTERVRYLIENTRKDGIIALTFSNKAAEEMQIRLADLDVLSERCWIATIHAVAQRILDQYGHTIGLPSELHIYERDLDQKTVFLQSLRESGIGIDDFLNAGDEKTRKNRDRIIHNYLEQFSVVKRELLTEEEIKEKYTSNESFLSVFQAYQGALVRSGGLDFDDILVYAHRILMEQSWCANIYRAKYKHICVDEAQDLNKAQYEFIKVLCGDQIKSVMMVGDPNQMIYGFNGSSSDYLCKLFLQDFSAQVFELKENYRSSKAVISLANKLKPGSQVEADFVLDGQYEIHKCQNEEDEATWICNKVNELLCQKINIEIEGDISLTNMVVIARNRFVFLKLEKVLGEKGIPYSLKKSERQAEPSSLFGRVLDLAIRVRLNPKDWIDGKKLCTALKISVPSVWGNDNLLLDMAAAVRHSAISFPDIQADLLEEIQGLDIEKPNIPRLYDRFKTIIQGLNDVNFPKEDNELERSLQELDDFRNCWTTFKRKGLGESLMSFRNAIALGQVAENYDPTGLTLSTVHTMKGLEKDIVFLMGMCEGVFPDYRANTRKELEEELNSAFVAITRAKRWIFVSYPLQRIMPWGSSKSQTVSRFVTMLQK

SEQ ID NO: 65652 - protein, 765 aa, Pseudomonas syringae
MQIQHLEIANFRKLLSVRVDLAAETTLLVGANNSGKSSAMLALRKFLLSKASIFRLQDLTLSHLATIDAIGEAWEAADDSFPIPVANEWADWLPTLDIWLEAAQGELHHIRDLIPNFAWKGGHVGMRFRLEPDDMPTLFVDYRKERARVKELQQEIQKQAVLGTQPPSLPLWPQSLHDYLNRRIGKTFKIRWYRLDPGQLRAPNPATRKANRQPLAATATPLERNPLTDLIRVHEINAQRGFGDSADEGVLEGGHGSGRKLSEQLRAYYSRHLDPGDSPDISDLEALRAIEAAQTAFDTRLSTSFAPALKEVAGLGYPNNSDPSIRVSTRLAPTDGMNHEAAVLFELDSVGGAPGAPPLRLPETSNGLGYQNLISMIFRLMAFRDEWLKKYRSPEEQSATGVEPIHLVLIEEPEAHLHVQVQQAFIKHAYHVLCSDPLLAKYPNLRTQLMVSSHSSHVAHEIDYENLRYFRRLPSGMAGISIPVSTVSNLSTVFGESNQTKEFVTRYLRAQHADLFFADAVILVEGAAERMMLPHFLRQHFRFLDQCYITILDIGGSHAHRLRPLIDALGIVTLVITDLDAGLLQVGKPVERKKGQTTNNPTVRHWMRAAGLGHDVDSLLDLSFGSKAQQIDDLFSIRIAYQTPITVRLPKTGLDVEALPNTFEDSLVLSNTEHFANKAGRGLMRSFAKALREAETSLELGTELFTKLKDGDKAEFALHVLGDSNFATLKVPTYIHEGLAWLQSKLERKSKELLIIPSAILEVTP

SEQ ID NO: 65653 - protein, 623 aa, Pseudomonas syringae
MSRQPEAATDDVPDADQIIQECLNLDHPKSFFLYAGAGSGKTHSLVEAVKNLKSRERQRLTFEGRQIAIITYTNAASDEISRRLEHDPLVVVSTIHAFSWRMIQGFNTDIREWLRAKLTRDIGELNEKLGKARGQNKTFLANQASRDSKARRLDSLDEISTFIYSPTGDNRGRQALNHSEVIQMAAAFIQQPPLLNVMADLHPVLLIDESQDTYGPLMDAFLRAQSLIPDRFCLGLLGDTMQRIYNDGKVRLEEAIPPDWAVPEKRMNRRCPTRVVDLINVIRAGVDSHQQKPKPDAVEGTVRMFCTQHIPGQDFELEEDIAHRMAAITGDAQWATGKDGRKSLILEHKMAGRRMGFEGVFTPLHRVEHLRTGLLDGTLPILKLFFERVAPILQAAKTNSFSLMEAVRLQSPLLNPKSMKEAPDQLALLEKAGESTESLCELFNDNAPSIGDVTHLLLRTGLLDLPDKLVAALLLGATTDDPPDTSDRDALETHAYQILLGRPYSEMAGFAGYTDGLSPFDTHQGVKGLEFPRVMVILSDEEAGGFLFSYDKLLGVKPASDSDVKNQREGNDDSLARTRRLLYVTCSRAEESLAIVVYTAHPDKAKQQVIDAGWLKAEEIEIL

SEQ ID NO: 65654 - protein, 638 aa, Pseudomonas syringae
MYLRTLDIHGFKCFGEPFTIEFHDGLNVLVGENGAGKTGVVAAVRQLFNDSESGKRLINERDFHRGFHEEATTAQRIDIQATFSDLDENDAIAFRDWCGNEDEAKLTFTALNLESRGRFKSQLYGGYARATALETETLDLIHCIYLPPLRDAETKLRDGRQSRLARLLKALCRKELDTARKEGKPHPLEERVGAFNQELSASDDYAIKQANERIGNSLRTALGMHLSQNTLIQFSEVSFSRIVEGLRLLYFPNLSAADATQFRSLEENSLGYNNLLYIASILAELTLEVEEERGEETYLRLLLIEEPEAHLHPQLQIRLLKHLSTVAKEKSIQVIVTTHSTVISSAVSVDEIIHLSNKCNPVAIPLRTCGLPEPSRKFIDRWLDVTKSNLLFSKGSILVEGIAEAMVIPELARRVLAHYGDGGNTLEDYGVSVINLGGIYFKHFMQLFCDVTDESAGENVPVRCAGLTDKDPPKTIKVDVDGGEHVVIEYMPNDDDLRDGENHALAYIAKIGQSQFGRLYAGNYKTFEYDIAMEGANLRMMLSVAADLWPAQDGAVAPELRERAKLAFDDMESPERAGHASELLYRIDSTSIGKGIYAQAFAEELEKQEHEFVVPAYIRDAILWACGLEEPLLNDKAN

SEQ ID NO: 65655 - protein, 584 aa, Pseudomonas syringae
MIKLTDEQKAYIGAPIDKHVYLNACPGSGKTEVVAAMVAKVVDEWTGFPGGIAVLTFSNSATDELKNRLVRYLGEPLGFPHLVSTFDSFVHSRMVASIASEVTEFPAKDGDSRIRILENKADIFHTRKKICGRSVSACKYNYDLETKSFTFSTGERTRDKQLNDAPITNVALEDLIKTKKRFWAAGFATYKDMDMIALAALKKPSLKSYFQRLAKRFPLVIVDECQDLSAEQLAMVRRLHVLGVKFHFIGDLNQSIYGFRKSNPDNVKVLLAELRFVELPLTANWRSGQSIVDLCSDLLRIKRISGNPEIASVKPLLLQYAKCPSELIPKIIELTNGYGEVVVVARGHSTLQRFRRGDSFKGVEVLALACVAASNGSNKELNVAVALFAGWFADRLSLQVTTSGPHCPLAIESKLAWRKFIHQCLKHLVAAGAADTNLTWKEWAAVVKKTMRNLPDQAFVLDEISGDLEPLRVLELRSPAKQGDIALSVRLSQAVAQQPVADALRYETIHQVKGETHDATVVVSSLQKGIHLSHWKEWLANPTSEGARFAYVASSRPRHMLIWAVKNLKADEIKTLTGLGFELV

SEQ ID NO: 65656 - protein, 650 aa, Pseudomonas syringae
MKITKISAVNFRALQNVTLELRDSLSLLIGRNNSGKTSLLVLFEKFYEPGVSFNYHDFPLAVRKDLAAIDHKTDMLPLSISMRVEIEYDEKDSLRHLSEFMLDLDSEINNVKILFECVVNKDLLLRDIEQFEGERERFLRKNLDRYLQVNVYAYADEDDLLLENRSRLVKKEIAAVRDLINFQIIHAKRDVASSEGGKKMLSKLTTQYFNKANKDVTDFDPINNLLLKIDESLESSYKDFFEPFLKTSKAFLGIEDIKVVSNLESNEVLENSSQVVYGDRSEFLPETFNGLGHMNILYLLLSVEIKKESFAKTGKNINLLFIEEPEAHTHPQMQYVFANQIKSILNDIENIQAVITTHSSHIVSQCDFKDIRYLQNSDGCTRVKNFYSELKAKYGKDEDSFKFLEQYLTLNSCELFFASKVIFIEGVTERMLWPYFVELFDRSKVQSKDHISLFSQNVTILEVGANAKAFKHFLDFLEIKTLVITDIDTTKKTIDTKKANPRTIYPSFKVAGADHTSNATLKYYYDAPDFSEEAKFSSWFEKLVAHELKHSYPKVHIAYQKKEEGYHARSFEDAFVHLNRDVIKKKIDNINGLKNTHEFDGALDAYDLIETVLDKKSAFASSLLYLALTDDEVTWRIPAYIGEALEWISE

SEQ ID NO: 65657 - protein, 664 aa, Pseudomonas syringae
MDIGMTPFENIISCLERGESFVLQGGAGSGKTETLKKLLDYISKHMPEKRVACITHTNLAADEIKARAGELHAISTIHSFLNGIINSFRIDLHKVIHELFLLPEFRVGQAMDDDKEYKKREHERYKKAYGKYADKAYLILKIKEAKVLGKPMYDKDPQAANTVLNEKIKHLNARVLEHIKKASPQKVCYNETAFDSFRDLSFGHDGLVKLAVSLMCERKKLRKILADKYDYIFVDEYQDTSPDIVKAFFDYVVKDQNIVFGFFGDSMQGIYEDGVGDVENYVQAGAIEKINKEDNYRCSEQVVKLINNLRDDGLEQSVAFKTRENGDLETLADRQGRVKLVYAICDDKPTQHSPREEKDSYLKKLNKLIETARGVDSYKMLMLTNKAVASEAGFSQLYEIFNSRFGQATNENLEKVLAICHFSELYELHEDYGNKRYAKVIRFVKKSGFVLDSVFHKDELLVAFKSVFDLNSPAHGAIHESFKLKLLKQSDSYERFVRRREEFFEAAMGNSRYSAFKDHYVSGFDSLSKLNKAGFDIDEYEFGDLERDVKRELFYNDFFGGKITLGEVFKYYDYLSEKTNFITMHKTKGSGIENVLVVADEFFWRDYKFGNVFSAGDITAENRKIMYVACSRAIKNLTCVRIMSTEESSTIKDYFNEIECVSLD

SEQ ID NO: 65658 - protein, 379 aa, Hyalangium minutum
MRFTHIGLENWRNFLEVAVPLEGRVFLVGPNAAGKSNFLDAIRFLRDVADVQGGFQRAVSSRRGVSQIRSLHARRYPNVAVEVMVDLSDGKPWGYRLEFTQDNQRRPVVKREIVTHGDDTLLSRPNSEDKRDPELLTQTHLEQVNTNRRFRELADFFAKVRYLHLVPQLVREPDRSAGRVNDAFGGDFLEQLARAPSKTLKSRLKRITHALRVAVPQLQELDLKRDERGVPHLLGRYKHWRPNAGWQNETQLSDGTLRLLGLLWVFLDGTAPLLLEEPELSLHTAVVRHIPQILARLSRKSDRQVLVSTHSADMLSDPGIGAEEVLVLEPLKEGTRIEVAKDVEQIRSLLEGGMSMAEAVIPRTAPVGAEQLPLFGDAL

SEQ ID NO: 65659 - protein, 774 aa, Hyalangium minutum
MNPHEAALLEDLNPPQKEAVLHGDGPLLVLSGAGSGKTRVITRRVAHLVTVRRVFPWRILAVTFTNKAAREMRERLTQLLGAQAHELVVSTFHSSAAMILRREAEAVGLTRSFVIYDDGDQLGLVKRAMRDARVEPLLQPREILHRIDQEKNAARLPEDMQVDIDDIRGMVVKKTYQAYQRLLRAANAVDFGDLLLLLVTLFRKRPDVLAKYRQRFSHVLVDEFQDTNPVQYELLRLLAPPPGANLVVVGDDDQSIYRWRGASVDNILGFPQQYPGARVVKLEQNYRSDKNILEAAHAVISHNRRRMPKKLWSERPPGANLDLLINRDERAEAQEVARRVLALQREGFIKYSSMAVFYRANAQSRVLEEAMRLARVPYTLVSGRSFYDRAEVRDAAAYLRLMVNPRSDADLLRVINTPARGIGDTTVERLSDYADAQGISLYEAIERPEKIPALNAAAARRLGGFHVLVSSLNAFAQKAQDAAGAVDEMLKETKLVESLMAEGSDESITRAENLREFLGAAQEFDLNRAAAAVAAAAAQPAEGAEPPPPELDAAPLTADVPPLQAFLEQISLVGEADAEVGEGRVALMTLHAAKGLEFDAVFLTGMEDGVFPHSRSLAVEDPEDSEEMAEERRLCYVGFTRARKRLFISFAQCRSLFGELRYNPPSRFLRDVPQGLFGIEQEVQEAPRPMPSAVAPRRRSYDEDDGPRVDRSYSQAADGEGMGGDVRGMRVRHEQFGVGRIISADGSGPNAKVTVEFGGGVGLKRVIARFLMPG

SEQ ID NO: 65660 - protein, 681 aa, Flavobacterium reichenbachii
MKIKTLEIKNFRLLKNVTLSLEDHTTVIVGRNNSGKTSLTEIFRRLIGDKNPSFSIYDFSLSAMQGFVKALHFKLEGRDDDEIRAEIPYIEIRITIEYPVDLEDLGILGDFIIDLDPASNVAIIAVKYALKNGKIESLFEGVADMDEGSLKIFMKSLKERIPSLFETHITAVDPTDPENTAPIEYSKFRSVLGASFINAQRGLDDVTHSEKDVLGKVLAQLFKTSQSNAAPDDMKSNSAELKVIVDDIQNKVDTDFNTQLNKLLPALGLFGYPGLSDPNLSTETTIDISNILESHTKIRYGQGNNLFLPETYNGLGSRNLIYILFQLFEFFRRYQSRQISNSLDIIFIEEPEAHLHPQMQQIFIRKLYEIANEFSKTLNDGKPWPVQFVVTTHSTHMANEAEFEAIRYFLTSSGAERHTVVKDLRKEFRTDDLKEDKEFLHKYLTLTKCDLYFADKAILFEGPAERLMMPLLIAKRDELDLNKPQLGLQYVTAIEVGGAFAHHFYKFLDFLELQCLVITDLDSVLMTKGEKTTYPGSLVQNGSHTSNAGIKNWFAKGTEGHYLLPDCLAQTAETKVSGSRRIAFQIAEEGKTAIGRSFEEAFILANREHFGISEISENDAEVSAEKFAPENKKKTEFALKYSLENTKWNAPKYILDGLDWLAVKPVSPEMYIAEDVKQPTK

SEQ ID NO: 65661 - protein, 585 aa, Flavobacterium reichenbachii
MAESLEISPAENASIECLSRVFKAIDEKKHFLVEAGAGAGKTYTLIKALKHLISKYDVEYLKTSRKIACITYTNVAKDEIRSRTDNHPIVLADTIHAFAWEAIQNFQKGLRDRMVELGDRWQERIAEAGGITSQKVVYSLGYPKITATEISLHHNDVIKLFTSLLYDDKFKKIFSSRYPIILIDEYQDTNKGLADALVTNFIEEESNLILGFFGDHWQKIYGTESCGFIEATEGKMEVIGKQANFRSDKNIVSVLNKMRPELKQFEYNPESEGEIVVFHSNNWKGERRTGGHWSGDLPEDIAHDYLEWTKEELNKGDWNISSETTKILMLTNNVLASEQGYQNVANAFSDNDDYLKKNNDYMAFLIDTVEIGCEAFLNKKYGEMIQAFNAGTPKIRKHADKKVWFDDMTKLLTLSNGGTIGEVLDLLKTTSKPKLPKKIEEKEQRFTQIKAVEEKDWEEEDRSFASKINSIRSIPYSEIANVSNYIDDKTLYSTKHGVKGAEFENVIIVLGRGWNQYNWNQFLEWMNAGIPEGRQDSFERNRNLFYVACSRPQKRLCLLFTQELSENAFQSLNKLFGNVVKEACS

SEQ ID NO: 65662 - protein, 687 aa, Flavobacterium hydatis
MYIARIKISNFRNFTDQTVLFNEGVNVIIGHNNAGKTNLLKALSLVLDSNASKRLETDDFNKNVEFSQLQAAPPKISISLTIKKGSHTELDDLVTVGNWLTVLDTKYEALLTYEFFLPEKDIPDYLAAMKSITDTDPIKARETAWKIIKHDFIRLFVARIWGGNLVNRTAADHESLQKFDFQFLDAIRDVEKDMLTGRNTLLREVFDFFMDYGIKNEPEVTKSKSKKLAEIKQLKQDFSLQADQLISTLHTRMKEGKDQILSYANKTGASFDAPPNFEGSMSDIEMYSVLKLIVEYESGIKIPATHNGLGYNNLIYMSLLLAKMQVNSNGDYMGSNSKVFATLAIEEPEAHLHPAMQYKFLKFLRENKKENKVRQIFVTSHSTNITSAVSLDEIICLHNDKGVTTVGYPGKVFPDDGKSKKYVQRFLDATKSDMLFAKSIVLVEGLAEQLLMSVFAQYEGTPLEENHTAVINVGGRFFEHFLYLFDTDKPFTIPKKIVCITDRDPERKELPSGRFKKCYPYEVDIDTASYAYQNNPSSGLYPEGSHKNIAFFTQDATYGKTLEYDLILSNTVSELLITDGMSNSSEILKLMKLYADKKPINEFLDILRSSDENNRIMAGISASVWPDEEKKKAIIAARYLNSVGKGENALNLSVQLIENLDEKGKAGYQDFIVPDYIKKAITYICKP

SEQ ID NO: 65663 - protein, 563 aa, Flavobacterium hydatis
MQTITSQDILPDIEHHFRISAGPGAGKTHWLTEHIRNILHKSVRMAATRRIACITYTNIAVETILKRLGTSVTRVEVSTIHSFLYENIIKPYVFLVADEYGLDVSQMDGHDDTILSNYGFLSDWKAKTSQVYLRDDKEIAKAFSKIQWKFKNKEELEAKPSRPYAVNGTNIKTASYMVYKRMAWEKGIMHHDDVLFFSYQIIKKHPFILEVLRANFPYIFIDEFQDSSPIQVKIFQAVGQKESIIGIIGDTAQSIYVFQGSDPAEFKKFKLKGMKDYVMEDNRRSTNEIIDVLNITRTDIKQKKYRNIEGNLPFILIGERSSALAFAQSHCGTQPVYSLSRHNITANAMKKEISGAFNSKLFDELSEKDKPGSGNKYRSSAVASCLKAVEYARVGKFKDSIKEMERQFKYESDPFKRKSIALNHIVTLLEHYEGYSKGTLYDFFLLVKGQIKTNITNLGSGVAKEFYVGHSYQNMALCVKIPEDISQHKTIHKAKGDEFDNVLVITLEESDLDFLITPDFAKEVHRLHYVAASRAREKLFISVPALSLANQNTLEKYFTIKTI

SEQ ID NO: 65664 - protein, 726 aa, Chryseobacterium sp. JM1
MKIDFVKIKNFRKLQNCKIEFSDEETILVGANNSGKTTAIEALMAFLKEKKFEIQDFTITNWNVLNKLAEVWITKSNLAEEDKSLNLLDPYLPALDLWINVNISELRYISHLIPTLDWTGGLLGIRLILQPKNMETLVEEYTIARQRIIKLKADSGKSIDLWPKNFWQFCERRLDSYFEIKTYILDPERPNDEQIITENNFELDGNPLKGLIKVDVINAQRGFGDPKSPEYQNTPTLSSQLRSYYEKHLNPNINPTENDLNALESLNDAQKIFDSNLQTNFKKAIDELHDLNYPGFGNPEITLSSLIKATDGLNHESAVIYNIDKALSLPEKYNGLGYQNLISMAFKLISYRDEWMKKGKKADENNDIIEPLHLVLIEEPEAHLHAQVQQVFIKEAYKILRKHDELGKKNEFTTQVVISTHSSYIAHQKFESLRYFKRNIASIPISEVLSIKSVFDSAKPKEKETEKFVIRYLNTTHNDLFFADAAILVEGPAERILLPHFIKNNHVTLDKCYITILEIGGSHAHRLKPLIEKLGLTTLIITDLDSKEKYSDISKIPPKNSYKKCMPQKGADQITDNETLKSWNPKIKEIDNLLELTFENKLLADYPIRIAYQTEIDISGTKVYPYTFEDALVLENIETFKTITETTGLLKKMVKAANEGDPNASAQQAYLAINGEGVKKAEFALDVLYFEDPTSLKTPTYIREGLNWLQSILEIEKKIETETSTL

SEQ ID NO: 65665 - protein, 630 aa, Chryseobacterium sp. JM1
MITENNDIDKHIDDEIFECINPSNLKSFFLFAGAGSGKTGTLVNVLKKFKKEYGNDFKLKNKKIAIITYTNAAADEINHRLKFDSIFTVSTIHSFCWELIKNFTTDIKKWLTIDLNDSIVDLEEKISRARDPNNKTAISNQRRKESKTKRLDSLTTISKFVYNPNGDNITKSSLNHSEVIAIVSNFITSKDLFKQLIINKFPIVLIDESQDTKKELIQALFSLQSQNKTKFSLGLFGDTMQRIYSDGKEKLGADLPEDWLKLTKVMNHRSLLRIVELNNKIRQEIDGQIQFARIENTGGVVRFFIIPRDADKEKEEKFIKEKMSLLTSDRKWIDKNSAKSKLDISVKTLTLEHHMAATRMGFGSFFNPLYNVDKLKTTMLDGSSSSINFFTNIILPLYLAHISNNKFEIANIVKGQSPLFDKKNIINESDKLTIIQYSKTSIDKLLKLWENNNIPSLIDILKEVDETKIFNIPSELKLAIERSSFTDSEEEEDDDDALLLAWDLALRAKFDQIVKYQSYISENSPFGTHQGVKGLEFERVMAIIDDVEARGNIFSYDKLFGTKALTKNDNDSISEGKETGIDRTSRLFYVACSRAKKSLALAAYTDEPETLKAKLIELDWFTDEEIEILK

SEQ ID NO: 65666 - protein, 693 aa, Chryseobacterium vrystaatense
MKITKISVTNFRLLDDISINIEDDITLIVGKNNTGKTSLFEIINLFLGGKYKISFHDFSQNSYEIFENCYKKFNDELLVEVDEVERNRLEKEIILNIPRITLEIKIEYNKNEDSLINISDFISDLDDSKTEATILFKHEPSDTINLFKTFHNRVNQDIRLIEWLNENITGYYSTRLFGGDNLIEDNVLSRISKVLYFESIQASRKLDDVKTDRNRSLAVGFSDYYQNVHGDQDADVEALKSTLKNVSTELDEKYEKVLEKILEKLKSFGVDKEINIPEIILKSKFDPENIIKNNIKYFYKNGDIELPENYNGLGYSNLIFLVLKIVSFIEHFKKNKAKHETEILTILLEEPEAHLHPQMQQVFVEQVRETIEKTLSEDKVQVQLIISTHSSHMIAEAGLNVKRSFERIRYFNKFKKNNKNIVEVKDFNDFKHRETNKDTFRFLKQYLNLNKCDLFFADKVIMVEGITEKLLMPLFIKKVAKELENEYVSIIEVGGAYTHKFKEFFKFLNTKVLVITDIDSVDSITGKSCHVLKADANTSNSTLSIWLPKKTKISELLALTYEEKLDESTTIRVAFQIAEDNETFVARSLENAIVNCNQVFFKGKYSTEDGVELNVHKSFSYQKLKNLDDLIYMDTEKDQSEVDPSSKQKTDFTFDLMTFDENLTKLEWKVPKYIKEGLEWLAKNDHIEITKID

SEQ ID NO: 65667 - protein, 347 aa, Chryseobacterium vrystaatense
MAAFDEVKECIEKKSSFVVEAGAGSGKTYLLIQTLNHLIDLQGDNLRLNNQSIICITYTNVAKNEIIKRIEFNDLVNVYTIHEFLWQSIKQFQKQLKIELCKLNEIRYHKDVDNDKTSKYIKNLKGRINNIETVFYNDSSFRDFENGELHHDDVIELSKMLFENYSLLTSIVAQKYPYIFIDEYQDTSLDTVQTLIDFLLKRNEKWIVLGFYGDSHQKIYDTGVGNLENYYTEENKTLVLIKKEENYRSSKEVVKLLNSFRTNIEQKPQKEIQGSVKFLYWKNHPEKGEKQKVTEFENSLKGHKNDFYDKVVNKLIEQGWVFNAESDKILVLANSRIAERAGFSNLY

SEQ ID NO: 65668 - protein, 684 aa, Chryseobacterium piperi
MRIKQIQVRNFRLLDNFSVNIEDDITLIVGKNNTGKTSLFEAINVFTKVSQEISFEDFSLSSYLKFKKIVNFITKIDFNNISEKRKEIFEKIIQNQTPKVQLFIEFEYDIEKDSLVNLSEFITDLNEKRNDATVLISFESLNSLGLFSSFLNRERKEIELISWLKENLKKYYQLTCHAIDKDSNFKKDIGLNFKSKIEKIVSFEGIKASRTLDDTKSDKNKTLATGFSHYYRERDKTKEDVKKLEDTLTKVSVDLKNEYEKVLREVIHDLNHFGASTPISIPKIEIDSEFNSEAVIKNNIKYYYKHDDINLPESYNGLGYSNLIFMVLELTSFIERFKNSSEEKKSEFLTILIEEPEAHMHPQMQQVFIKQITNKINDAKSNGINIQLIITTHSSHIIAEAGIDIKKGFDRIRYFNKINGNLEVNDFNNFKHKKSDTETFRFLKQYLNLHKCDIFFADKVIMVEGITEKMLLPLMINKVAPELNKKYISILEVGGAYTHKFKELLNFIKVKTLVITDIDSVHIDDNRKACRVNTSNSVTSNATLKNWLPKKDAIADLISTRLEEKFDGKFIRVCYQIAENTENQYTARSLEEAIINRNLNFFKNKYNDLDKDKKVVEVDVKSKFELLKKINFEEQLDLYELSPKKGEKSQFAFDLMTFKAGIEDFSWEVPKYIGEGLEWLEKDE

SEQ ID NO: 65669 - protein, 630 aa, Chryseobacterium piperi
MNEMTAIEQIIENIDNKKSFVLEAGAGSGKTYTLIQTLNYLLENKGEDLKYNHQKIVCITYTNVAKNEVIERLENHPLVIVSTIHEFLWDCIKSYEKQLKIELCKLNEIRYQIDIDLGIDESRYIPNLVDRLDRIDSVSYNDTAFRDFEKGQLHHDDVIILSKMMFFAYPLLTNILSQKFPYLLIDEYQDTAKETINALVDSLLENNKDKIILGFYGDSHQKIYNNGVGDLANYTHPDSHKLYLVKKEENYRSSIAVVNLLNKFRTNIEQKAQTDVEGSAKFIYCEYRPIKTRINRNNREVDDESRSAYNAEIDLQKKENFDKVVNLLVTRENWIFDKLDNKKNDKILVLVNSAVAKRNDFSNLYRIYSRRYIRSVGDELNKRRNALIQYFVGYTDKKISQERETGIEHLVKFWEECNYNEVLRFLKRYSSLFVDGYLEHKHKKIITDILDELIVIRKTKSVKEVMEFVESRKLIRRSDAVKKFIEQVGLDFDKLEEGSEKSRFVNNKILYDSLLGLSYKEIINFFEFTQNHTVFSTKHGTKGEEYRNVLTVIDDKEWVNEAEGYNFEGFFDNTDVNEERKLRTRNLFYVECSRAKENLIVLALSPMGESALNNIEKWFGKNNVIKLDNF

SEQ ID NO: 65670 - protein, 612 aa, Comamonas testosteroni TK102
MHLAKLVVKNFRKLAHAELIFQPGLNVLVGGNNVGKTAVVDALRALLAGHDEPYPRVSEEDIHRPPGGVPAGDIVFEYVFSGLDLDDEADFLAALVPDNKGKLEAHITIRYSEPDKAGRLRAKRWCGEHEDVSLTADMMENLRGVYPPPLRDASQGLKPGRSSQLARLLQLLATEAGIEGINKALQELDSELKKHLPIVSTYEAINTRYQSMLGPQLMQLLDVGLSASDFKSLKSRLSLLVDAFEIEQNGLGFNNLIFMAVVLSELTKNPDSCYRGLIVEEPEAHLHPQLQAVLLQHLESIKAVEGEKPVQLFVTSHSPNFASIADLNSLVCLVDTGRSVVTFFPRDVEFKKGKREKLERYLDVTRAELFFARRVIFVEGAAELMMVDALAKRIGCDLRQHGVSLISVEGLNFDSFLPLFGDKALKIPVAILTDADPVEPKPAKKSEDAAGPEAVAAPMDASAVDAGSPPEDEDEDPEPVYPAAGEVITVSANTAKMKACEDSYVKVFHGLKTFEYDLALESANREPMLAALKEMHPKIAATLTAAVNAAADDAAKAKTLFCGMFERPKNNVQKGSFAQALAQVIADPKLPFTVPTYIQDAIKHACQAAGKP

SEQ ID NO: 65671 - protein, 576 aa, Comamonas testosteroni TK102
MSALTPEQQAVVDAPMEPLCVIACAGSGKTKTAVQRLVQMRRNLGNTRGRVALLSFSNVAVDTFRKAYDVLARDLPTGVGRDRVEIDTLDGFITSNILRPHGHRTMGASQAAYLVTGSETFLSGFTFKTPSFPMRITELHVAFVKGQECFYYRRNDELELVANAAARDLIGRLGKTGAYTHDLGRYWVYRALKERPELLKVVVRRYPHILIDEAQDIGSVHQAILLLLIDAGACVTLIGDPNQGIYDFAGADGKFLSEYHERPGVLQYSLKRNFRSVPRIVSLANGLCGRDDVAERGAPATPHGAYFTGYKRDQHVKLITAFQGALAVAGADLKRSAVLCRGRGLTEAIRGDAAPAGQGSVKVFATAAVLRDQKNDFQNAFQRVAIGVAALLDKPPHGLVSCITQAGASPAQFPRARALRREIWIFTRDAKAGLPSAFLTADTQWHSQLVANVRILLNKLQTEFGLTPAANIGLKLKKTGLPNAALLGTKDLADEKAAPLRIDTVHQAKGESLDAVLYMTLKDHAQELLAGVGTEVGRIGYVASTRARDLLWVAVPSNALNDLRPLFEAKGFQEVD

SEQ ID NO: 65672 - protein, 778 aa, Comamonas testosteroni TK102
MHLKKLAVRNFRRLRNVVIDLASDISIFVGANNSGKTSVGHALQLFTGSGRFNIHDFSAELWADIVAFGEGDGEASLPTMEIDVWFEIGPDDVHRVIDLLPSLAWEGKLVGMRVAYAPTNPAATHARYVEVRQRVLDAVAKGEDGAPAFDPSPRNLREFLRDRLHDEYELRYFVLDPARFDAKMVAEAGYDPATLTGRDRSGREILNGLLHIDFLNAQRHLSDGPGGSRAEDLSRVLSRFYGRNLEQKGEDIEALRALAASEVSLNEHLERVFEPTLKSLSKLGYPGLSNPRMMIRSALDPAQIMSGRDGAIVHYALGADDGKPDPPTLPDRYNGLGFKNLIFMVVELLDLHAQWLAIEENRPPVHLIFIEEPEAHLHAQLQQAFIRKVMDILALKGEDRTHYTSQVVVTTHSTHILYERGFRPIRYFRRSRAQNVSTSDVLNLSVFYDSTDPDIRSFLERYLKLAHCDLFFADGAVLVEGNVERLLLPQMIANAAPRLQSTYLTVLEIGGAFGYRFKTLIEFLGLTTLIITDLDSVFGPLGQDGEGAAPAGQPEAAEPAAENAQAAGADAEDIDDDEDDLPVAAEKPGKACIAGHPGAATSNQTLLQWLPKCDTVAALWEATAEQKIQARTDDNDALVRVAYQCRTDVTWGGETLALAGRTLEEAFALENLEWCQDKNRKPLQLRIAKADEKNLTTLAERIHKRVQAKSFSKTDFALALLAEDPSSWSVPTYIAEGLSWLETEIAPPEPDEDQPHEGQPHEDAPQGAPVAAGDEVAA

SEQ ID NO: 65673 - protein, 596 aa, Comamonas testosteroni TK102; identical to SEQ ID NO: 63721

SEQ ID NO: 65674 - protein, 606 aa, Comamonas testosteroni TK102
MKVVRLTISNFRGIKSAELLFDGHTLMVGSNNVGKSTLCEALDLVLGPDRLNRFPPVDEFDFYNAEYLAPAAAEGAERVPTPLRIEAVLIEPGAEIGAKCGGNIEFWHVPEQRLLGPGEADAANPPHAVPCLRIETIGQYNPEEDEFEARTYFSHSPDAPPGELTKLPRPIKRLFGFLYLRALRTGSRALSLERGSLLDIILRTKGVRTSLWEKTIERLRGLDIETDAAEIAPVLRSVERRLARYIALESPGNATKLHVSELTREHLRKTMTFFLALSVDQGHVPFPHAGTGTINTLVLALLSFIADLKPDTVIFAMEEPEIAVPPHTQRRIAQYLLTKTTQAFVTSHSPFVIEKFEPSKTLLLARNAGVVTARKVSDATGLKDNDYKRFSRSGLSECMLGRAVIVVEGVTELHAMPVVARRMEESDSNLQPLDIAGVAFFDADGESNMPKFGKFFKTLELRTFAFYDLDYKKKRKTEQAQALADNFEINVEHAYKGFEDLVVAEVPVDRLWSFLSGLKANDENGNVAIPDARPNDDAVKAIAKEALGGNKGAGWSARLFEECELHELPVTVTKFLASVFALFPPPPPIDDGDGAPPEPAAAAAAP

SEQ ID NO: 65675 - protein, 586 aa, Comamonas testosteroni TK102
MNEPCKLRESVIACEGHALVIGGPGSGKTTLALRKAVKRIRDGMLPGQSALFLSFSRAAVARILDAAKLESTKAEQEQLSIQTFHSFFWDILKPHAYLLGAPHRLSILLPHDEKALSGGLGDEDDGWDEWLVERERLFREEGRIAFDLFAANATALLARSSHLLASIAHRHPIIIVDEAQDTGPYAWQCIQMLAPHTQVLCLADLEQQIFDYLPGVGPERVIAIREALKPHEIDLGTQNHRSSDSEILAFGNDILTAKPRGAPYKGVSALAYRPEKPPPNWNHLLRRALGELLKSIRAQSDKTVETIAILVTNNRSALKMSNALNALGANVGKPVRHKLLFDEAEALLSARFAAFLLEPKDLAKLEADVVTSMEMIAAARRATGQGRKEVAKLLEQANKIKGGKVLNINIANALRGLISGLAVNDFSGDPAEDWLTVKHELRATNQDELTRVAAQLDFLVAFRRGHRISAALSDEWLRDGAYTNARTALDLALAQEQILDGVEPPMGLQVMNFHKAKGKQFDGVILVREARRTGPAVESSFVWRGDTAPYPKSRRVLRVGITRAKVHTLILDPLWPQCPLLKGHKL

SEQ ID NO: 65676 - protein, 583 aa, Comamonas testosteroni TK102
MYLHELRIQGFRRFHDLKLQFKKGLNVLIGPNNGGKTAVVDALRVLLSASDEGSLRLTELDLHQPEAGSRSTEAKFNFIFRGLSEQEHADFITALRPIAAGDNSGERYEAWFTVQYSKADSESRLKLRRWVGEHEENPLTTEMLEELRAVYLQPLRDPASGLKPGRYSQLAKLLHRLSKQPERDALELHLKQIDQDLKPLPPLSTTNTVIGERHAAMLGKELAQLLDLELSPSDFARFASRIGMSVGGMEVEQNGLGFNNLIFMAVVLSELALNNAVSYCGLIVEEPEAHLHPQLQAVLLDYLKTVEKPEQGQRPVQVFVTSHSPNFAALADLDSICCIYDSPTGPAVFAPRDVKFETGQKEKLQRYLNVTRAELFFARRLILVEGTAELFLLDALAGKASIDLRKHSVSIISTDGLNFDCFLPLFGKNAMQIPVAVITDADPPADVFPRKAQALQLSENAEKLQKLEDDFVKLFFAHKTLEYDLALNRSSRDQMLSTLKQMHPKICADIELGIIFGGKPHELAKEVFSGMFVSRSVKKGSFAQLLAFEIANSEENVVLPRYLKKALMFVTTATPKNNDDDVL

SEQ ID NO: 65677 - protein, 577 aa, Comamonas testosteroni TK102
MSFEPTAEQTAIIEADLVSMAIVACPGSGKTATAVRRLAELRKRLNDTKGRAALLSFSNVAVETFRAEYQKLQGTTVTDSKVAIQTVDSFITNYILKPHCARVMKSRRMPFLCLGDEPFLSAYKIGEGKETTGVADIILNRVSGETRFYRKVGKSDPIALTPAMSKLALKKLNEFAATGGYTHTHGRAWARWLLAREPHIAKALALRFPQILVDEAQDVGTFEGEILDLLIKAGSDVSLIGDFHQSIYSFNFATGDYLRAFSERDEVVKFELTQNRRSLPAIVNVANALARTKTTPHRTTSKLHSGAFYWRYEEDKARELMSTWSSALQAKGYALADAAVLCRSSDMLSELTSASVNLGTSAVKHLASAALERDRNGDIAKTFHHCVQAAIHLVDVPNTFAQQVKSPERGSDIAQLRRLLWDLIRDNASGIPPSTLEARGEWLTKLRTNLASWLDIVEEKTKFTRAATWTARVTARRLPETGPLLGGDLGQNDWNGLRLGTVHSAKGEGIPAVMYLTSKKHLTALLKGTSKEDGRIGFVAATRARDLLVVAIPLDTKPSVIKKLHNLGFMDWDRPGR

SEQ ID NO: 65678 - protein, 698 aa, Flavobacterium psychrophilum; identical to SEQ ID NO: 62716

SEQ ID NO: 65679 - protein, 633 aa, Flavobacterium psychrophilum; identical to SEQ ID NO: 62717

SEQ ID NO: 65680 - protein, 631 aa, Sphingomonas paucimobilis NBRC 13935; identical to SEQ ID NO: 63188

SEQ ID NO: 65681 - protein, 607 aa, Sphingomonas paucimobilis NBRC 13935; identical to SEQ ID NO: 63189

SEQ ID NO: 65682 - protein, 764 aa, Haematobacter massiliensis
MYLHSYRLRNFRRLRDVHVELASDISIFVGANNSGKTSATQAMQMFLAGGKDSFSLYDFSSHAWPLLDEIGEREGEVAEAEFPTVSLDLWFEVGADDLYLVIPILPSTSWAGTLVGIRVELAPRNITELIQRYRTARDDGRAKAAALVGGAGDYVPWPKSLSAYLLKELRHEYELRYYVLDHRQFDAKFQAVEGYQPLPLGNEPGGSAVLKSLIKVDFLNAQRHLADPSTASGSGRSEDLSKRLSRFYQRNLDQRQDDHQALKALFESEVGLDKHLAEVFKGTLERLGRLGYPGLNNPRLEIKSALNPASIMTQDARVHYIVGEAAQTVMLPDTYNGLGFKNLIYMVVEVLDLQERWKAEEEKRAPLHLIFIEEPEAHLHAQLQQVFIRNILDLLVIPGEAGGSFVTQAVITTHSPHILYERGFQPIRYFRRDLVGNDQVTEVLNLSAYYAKETEHRDFLQRYLKLTHCDLFFSDAAVLVEGNVERLLLPIMISKTATSLRSSCICILEVGGAFGHKFKSLIEFLGIVTLIITDVDSVTLLPADHDGDDDDDDELEIEVEALEVDAANDVDELLGGDAPAAQAGDAADPAPARRYGKKCLPGVAGAITSNQTLVKWLPAKLSIDELFAALEQEKETPADVTPRVRVAYQTPVPVAWNGQNVELAGRTLEESFGLENAEWCQSAEQRRLGLRLRGALADPAALAAGLHKRVSGDKFDKTKFALGVLTARPEEWQVPKYIREGLVWLKAQVDLEVEAELEGGVVGE

SEQ ID NO: 65683 - protein, 643 aa, Haematobacter massiliensis
MSSRAQQPDTQADVDLRQCLESQPPTSFNMVAGAGSGKTTSLIKGLASILAIHGERLRLRRQRVACITYTEIAAGEIWADVGNNPLVHVSTIHSFLWSIARGFQQDIAAWVANRIDERITELQHDAANFDPRVQQKTRDKNARDITRYEQQREAITQVRSFTYGTGSDYAKGILGHDDIIKMASQLMIQRPLFRTLVAQQFPFVFVDESQDTFPVIVEALMAVQQQEQARICLGFFGDPMQRIYPTGIGTVPKPDDWRAIPKPENFRSPTSILNLANAIRREGDDLVQIGGRKEKSGDQEVSVIGTARLFVLPTDAHRDERVAQVRAWISNANDDELWQPADENDPVKMLVIVHRMAAKRLGFGDLYAALNDKAPEAFKNGFLDASAWPLRPFVSFLLPLAEAVRDARDFETMRLLRLHSPLLAKANLQGVNIAERLNELQAVSNQVGELMGPQSQATIRDVLTLAKESRLVEFDPRLSAYLEDVAVNEAEVEADDNLDEGEEGLSNEINSMAAFLACPAKQLRPYQAYVNEESPFSTQQGVKGAEFDRVLVVLDDDEGTHFQFSYEKYLGLKELSARDKKTLQDGGETGVERTRRLFYVCCTRARQNLVVILFVADPAAAIAHIRGLGLFPEADILSQDALA

SEQ ID NO: 65684 - protein, 493 aa, Haematobacter massiliensis
MRKLGYPGLANPTLEIRAALKLERLMGDQQAKVHYLLEEATAEVEALVLPDSYNGLGFKNLIYMGVELLDLHSAWATTEEGEEDKRQPIHLIFVEEPEAHMHAQLQQAFVRKLTDLIPPRGEDGFASQFVITTHSPHILYERGFKPIRYFRRSVETGAKQSTDVFNLSIFYEQNEPDRDFLERYMKLTHCDLFFADGAILVEGNVERLVLPLMIATGAKKLGAAYLSILEVGGAFAFRFRKLVEFLGIPTLIITDLDSVHPTPPTPEPLPEEGDTEAFAEGAEDDEEVEDDGDIDDSEEDAGADSKVAPKPGTKCPAGTPGAVTANQTLRQWLPGKTLIDELLTAVEADRLQAPSADGGAHVMATYQMPVMVTWGETTLELKSRTLEEAFAYENLAWCQKKENRDVGLRWAKSADMTLEVLAAKIHKRIKGEWFKKTNFALGLLASTDGGWVVPTYIQNGLNWLALHVSVGDDLPEEKPADADVPSEVAEPPQ

SEQ ID NO: 65685 - protein, 627 aa, Haematobacter massiliensis
MTSRTGKPDTQADIELRELLDDDNSTGFVMVAGAGSGKTTSIVKALDHLRKTRGAHLRQRAQKVACITYTEVAVDEIWGDVGNDPLFHVSTIHSFLWAALKPFQADIALWVDRRIDQRIADTEAKIAAFTKRTHEKTRLQAAADVERYRDQKQEIKSVKSFNYSVGSNYPKGVLGHDDVIRLSTELIQGQPLIAKVVGQKFPFIFVDESQDTAPDVVSALKAICAALGSKFCLGFIGDPMQKIYTSGAGVIAPLAGWKVIEKPENFRCPTSVLTVINNIRAAGDALVQTGGKTKLVGGKRVPVVGTAKLLVVPKDDRVARLAAVRDWLAKKHDDPLWLSDAPEADVKVLVIAHRMAAERLGFGALYDAYHDKTSETLKEGFDEGTHWSVLSFLRLLMPLVIAQAKGDQFEVMSLLRRHAPSLQRNQAGSSTLPAVLKELDSKAKVLAETCAIGSSVPVFEALSHLKHARMFGLDDRLLSAMAEYDAAKQITDSGDAAAVQKLLHLPMSELWGYRTYIEEQSPFETHQGVKGAEFTRVITIIDDEEGRHNQFSYGKLFGITPPSDTDNVNAKEGKETTYDRTRRLLYVCCSRAGQDLAIVFVADDPAGAHAAIANLGIFPPEDVHNLA

SEQ ID NO: 65686 - protein, 662 aa, Bifidobacterium kashiwanohense JCM 15439 = DSM 21854
MQLSKIKIKNYRLLIDAELEVDSRTTLIVGRNNTAKTSCFSCIGKVLNGEAVSFDDYPLLRRKDFYTKIALFMEKKLTYEDLCKHIEIISIDFLVDYSLDDLDDNLGALSPFIIDVDVDTTTALIRAEYRLKTDEKTLWSLLESSYYKDGAYSPSEEAHKVLADNFGKLFELTVYAINPNNPEDKQVKSQKELYDLFPFHAIPAERVLGEDDAHNSSLGLLISGFFDTSEAELDPDVATEIKRLRSIVEKANKDVQKQSDEILSSVVNNSIGFGYPNIEELKLGVTTQLSIDDQIKNQTKLSYISGTANESLPSSHNGLGYKNLIKMEFLLAAFAKDIEKRGVACVPLLFIEEPESHMHPQMQTAFAAYLEKFLGKLSDVKIQTFLTSHSAHIANTMEFSKVRYTQKSNTGVIYKNLNTFAQDHPNNVDFIRKYLTLTKCDLFFADKAIFVEGASERLLLPDMIEKCEKSGEFSHCKYPLSAQYYALIEIGGAYAHKFIPFIDFLGVPCLILTDLDSVANSKGKNGKAVKKSVIVSQGETTSNETIKWWIRRNKGISENNTSKINLSEIKAITADDKTRGKCHIEFQTTENGLCGHSLEEAIRNVNRKHYNLSDKISEDELEFKGKSKTDFALDLIYKYSDYCVPDYIKSGLKWLNDQRVLE

SEQ ID NO: 65687 - protein, 580 aa, Bifidobacterium kashiwanohense JCM 15439 = DSM 21854
MSKECIGVNYGLAKAEADKVDARIIEALKSGHSFRVEAGAGSGKTYSLNRVIEWIQANKWSAYNRKKQNVICITYTNAAVDVIAERLAKDSFILPSTVHSFAWNAIKQYQGVLIEAVTTNPDYLPDEGDFNQVTEVAYTLGHRYKENGVQYLYHDDVLKLFCQLLDNAKFRRVFADKYPLILIDEYQDSYKPIIDRFINFFIAKSTGPQFGFFGDAWQTIYQSNKACGEIKHEKIEVIKKGSNFRSAPRIVQLLNNIRPELPQKSAIDGFDGEVLVITCDDYSGARRTERNFKNELPAAEFKARLNTIVTKIEQNTPADEDLKVLMITHKVLASQQGYEQLLDILNDALRNKEDPFLIFFADTIESIYHALDTSNTQLLFDTLGIKRYPITKKSEKTKWKTLYEQLTEVRTQKAIDVLKTIIDSQLIPIPPKVDGWYRLYMDAPETMYASKATIQQFLQLDYAQFIAVRDFLYPDAQFSTEHGVKGEEYDNVVFVISRGWNQYQFETYAPMITGHASIPKGKEASYERNRNLFYVCCSRPKKRLFFFVTVPIDSSFRTFLVKLTGEESILTYRQFMEASN

SEQ ID NO: 65688 - protein, 594 aa, Klebsiella pneumoniae; identical to SEQ ID NO: 63538

SEQ ID NO: 65689 - protein, 605 aa, Klebsiella pneumoniae; identical to SEQ ID NO: 63965

SEQ ID NO: 65690 - protein, 594 aa, Pseudomonas sp. 1-7; identical to SEQ ID NO: 64576

SEQ ID NO: 65691 - protein, 606 aa, Pseudomonas sp. 1-7
MPSSSVSSAYLAQAADLAGNPGQQAAYDSQGHCVVLAGPGRGKTKTLVLKLARILAEDVRAPRGAACITYSQECARELTRRLEGLGLREAPNLFIGTVHGFCLRHLLMPYGRLAKLPIPFPLAVATQRVSDRLLRQSGDALFGPNHPYKAIDLGRHRRSVLDRNSVMWRSEEELAAWAIAYEAALRNEGLIDYDDMVVFGQRLIVEHDWVLPLVQAKFPVLAVDEYQDLGVALHRIVKRLAFDGGVRLFAVGDADQSIYGFTGADGGLLTELAARDDIERVQLQLNYRSGTRIVNASELALGEARGYRANDPTRQASIAFVLRPGGLADQAAHAIAQIIPAALAAKPGRTLGDIAILYKDYRAGDVVAEVATASGLDYIRVDNAAPYRKVGLTSWVEDCAAWCAGGWRIGRPQLRGLIERYLAFRRAHLDESQAKREGQVLTALLWSLRQDVQPAREFVAALRTGILDDLLDAESALADQKEQLDRMTAALAEGGALASLDIVSLGGRDGSPAHLNLLTLHSAKGCEYDVVIMVGLDLGNLPWRNESPEKLRESRRLFYVGLTRARDEVHMLYSGFVDGRFGPMRLGRSPFLDELENRMRTAGLQQ

SEQ ID NO: 65692 - protein, 770 aa, Serratia sp. Ag1
MHIKHVEIGNFRKLKTVRIDFTPKTTVFVGANNSGKTSAMVALRRFLIERSEFSINDFTLSHWSKIDAGALKWESATDGEELEPIEWDSFTPFLDVWLDVSAKELHYVQKILPTLDWDGTSIGVRLRFEPKDTHALQFEYLTAKRAAAEVMAKACDGNKSEEKLDVVSTFALWPRSMMEFLAQRLRSTFEVRAYLLDPAKLKVPENGKACPQVLPDNSDPINGGDPFHGLIRIDEISAQRGFGHAGQSGGARNNDSQDDFAEPRVSKRLSSQLRNYYTQHLDPFDTPEPKDLEALLALHEAQTAFGKRLADCFSDALAELEDIGYPGVTDPKLTITTNIKPIDGLNHSSAVQYEVPTHLAGTSGAHRLPEDSNGLGYQNLVSIVFALMGFRDKWMKVGKAGKSKTSEEALIPPLHLVLIEEPEAHLHAQVQQVFIKQAYGVLRKHDKLKESPNLQTQLVVSTHSSHLAHEADFASLRYFRRLPAPTEVGAVPLTSVVNLSEIFDGLDKTERFVKRYLKATHCDLFFADGAILVEGPAERILVPHFVREREVYAYLKRSYITWLEIGGSHAHRLKKLIEHLGLSTLIITDIDAKDSITNAAVVPKRGAGQRARNETVKTWIPNEESLDVLLDMKSEKKVLSEPSGYAVRVAYQTPITVKFKSKDAVEALANTFEDALVYENMELFTKLDGHGLIAKFRDALTSSADLAELGVKVSDALKNGTKAEFALDILFSEEVDQLKVPIYIHEGLAWLAEQLKRKEDNIIGKVGAKA

SEQ ID NO: 65693 - protein, 624 aa, Serratia sp. Ag1
MSVLKPLESDDEIDAPVDVEIRKCLDLATPQSFFLFAGAGSGKTKSLVSALQYVRDTFGETLRLKGQRVAVITYTNAASEEIKRRLSFDPTIDVSTIHSFAWSLIDGFNRDIREWLRMDIETGIMQLQADEAKGRKGTTASATRISKIASKNKRLQNLNSVKRFVYSPTGENRGRDSLNHAEVIQLTSYFLRTKPAMQSILVGRYPILLIDESQDTNKQLIDALFTVQAQHKERFVLGLLGDMMQRIYSDGKDGLGSDLPADWATPGKQMNHRCPKRVVTLINKVRNATDKQVQRPRADSIEGSVRLFILPSDIADKSAAEQAIGLHMAKVTGDEMWQNLELCKNLILEHRMAANRMGFLELFVPLYEVDSWRTNLLNGSLPVIRFFSDEVLPLVKAKFNEDRFAMARIVRNFSPLLSPDTLRKADDQQSQLKLALAAIDHLSELFKDGADPSLGDVLRSVASCNLFFIPESLLPNVSGNKVASSENPATDKSNVDRQAERAEAIEKFLLAPFTQVERFMSYVSGKAHFDTHQGVKGLEFDRVMVIMDDKEARGFMFKYENLFGGKSIEDASIEGVRRLFYVTCSRARQSLALVAYTESPDRVRNFVVNEGWFNAEEIIMGVPE

SEQ ID NO: 65694 - protein, 770 aa, Serratia sp. Ag2; identical to SEQ ID NO: 65692

SEQ ID NO: 65695 - protein, 624 aa, Serratia sp. Ag2; identical to SEQ ID NO: 65693

SEQ ID NO: 65696 - protein, 729 aa, Staphylococcus aureus
MFISTLQIRNFRNYESEIFRFDNETNTIIGENDSGKTNALTALRILLDDSYYYSSKTLKESDFFHGIQNGWQGHWIIISATFEGISEEEFDNEICASISLNSESQTILEELISNADKGVGSISLFIRPNKAIRKQLFDISTELDSHQFNEFRNSIRLSDYEFYYTSKSNLNFCINENYDKLVGRLNDNIASNPEEDDEVLLGSRIDMSDIFKHISVVYVDALRDVLREMKNNRNPVKRIMETIESKISSDNVESLKTIIQQLNETITSVPEIRKIGENINRQLNSIIGSVYSPNLLLSSTMSDDMGSLAKFLSMKPEQNIDLDLLGLGHLNMIYLALKIVEFEACRSRELLNIMLIEEPEAHIHHHIQKTLFEGLNLQKNYTQILMTTHSVHLAEVSEISRMNVLKSFNGKSIVMNPANNLNSFAKEKLKKNNLNLINAVERYLDVKRNGLLFSKGVILVEGDAEEILIPQIVKKLFGINLDELGIGLINVGSTSFEYIASLFDDDRIQRKCAIVTDLDEQAIPSEHRLYKSTAQEKGQARKEKLSSLFNENNWVNCFYANTTFEIEFLDVNKENILTYVSPIIDDAFKDKKTITAYKEEIQSEQYLERNLAMLKLANHVGKGWFAIELGEKIDFLIKIPKYILNAIAFACQEIVDLSIYKKILLHTIDLYEETTELSALSASLKTSDTADLNIAIISLLEYFGKDEDVVYLINQIENYTKILYAEVSK

SEQ ID NO: 65697 - protein, 597 aa, Staphylococcus aureus; identical to SEQ ID NO: 62501

SEQ ID NO: 65698 - protein, 729 aa, Staphylococcus aureus; identical to SEQ ID NO: 62500

SEQ ID NO: 65699 - protein, 597 aa, Staphylococcus aureus; identical to SEQ ID NO: 62501

SEQ ID NO: 65700 - protein, 700 aa, Paenibacillus macerans
MHISSLKIRNFRNFKRANFIFKEGVNTIIGANGSGKTNALFALRLIIDDSLPRSSTNLLDTDFNRSLLNWRGHWIVISLHFDNLSNDDSSQALVFQGTHTTENSGSLNLYFRPKYEVRKRLFEMSQEFVEDEQFLEYLSSIKINQYESVLYGRGLADFSQDDVYTTLVGDFSSYNFPNPDEEDNSLLGTPANQYVFKNDFACTYAKALRDVIGDLKNPRTSPLLRMLSNLNINETSTETVSRTIKDLNWHITNLPEIRELADGVSQSLHKTVGYTYAPRIEINSNLSDDFKNTLRALNIKAGEFAGEDYIGDLYEMSLGGANLLYLALKLEEYNRLDHEQNKAAHFLLIEEPEAHLHNHIQKTLFQKYHDHENTQIILTTHSSHISSSCSLDSVNILYVEDNCCEVSQPSSGLDVDDVKRIERFLDATRSTLLFAKSAILVEGDAELILIPEMVKKAFGITLDEIGVSLINVGSTQFTNLAILFSKERIRRRCAIVTDNDISIVPLNDETYADKEFQKKCKQSQESGEERRKKLDEFCQDNSFISVFYATNTFEVELLKEGNRNVIENVIRKDIYKRKTDQDSSVEKINSPDLSVYGKEILRLANKEGKGWLALAIAARSDKNVVFPEYLLEALAFVATLQKDQITSVIKHHLGNGYKSFISTVKMLYGEKPTETEIIESFCSLHKDSMVTKFITLMGRG

SEQ ID NO: 65701 - protein, 584 aa, Paenibacillus macerans
MILLNTLSTEQREIVEFNDNLLVIACPGSGKTRTLVAKLIYEGMKLKKNEKVAAITYTNLAAEEIELRLEANFVDNQFYWGGTIHSFCTNWIIKPFSHVLDELKYGYSFLDEDDVQEITDNIMDTLNLRNIDFNTRRNQNGDFISINDENDLILKEYDRKLKKERLVDFDLILFYSYKILKKNTSIAKNLSTIFKWILIDEYQDTQELQYLIIGEIIKAGYNETKLLIVGDPNQGIYQTLGGVSKTKQEIVECIGGYQINEKSLNGNYRSTQQIINIYKNFQIYGDSIEAKGKNKDNTSLISFNRDVKVESLAQYIRNLIYELHNSKGIPYNEIAVIAPRWQELINMARSIKQLDPNLPLDAAGLSPLYRDDNNLFYHLAKLLLSTPAPDKVILRMRWANVLLESLEEKLPQISDSNLSPQKILKVINSFSSSSVLGIEYLKEGFSYFFNRINIDINLFSNLVLELNEFEKKCIKRQTRNGIGDSIAIYKNGFAKSGGITFITTHKCKGLEFDTVIGFCLLWGYLPHWTNIFSHETDENEISRKLLYVLSSRAKNNLFLIAESGRRTTRGTPYNANRHLIEVFR

SEQ ID NO: 65702 - protein, 588 aa, Bacillus paralicheniformis
MKISNIKVNNYRNLRTVDLDTNNVVILIGDNNSGKSNLLRAITLPFMNHDIGAVNKNLGWQDINSASKQDYYSFIEENLEEIKSSVCELDKFIDHIPSVSVEVTLTPQKIAEEYYVRNWINNLDDDTPSFTIKYEYKVEDPQDLLRHISDILKDVDSIDDLKMNLLPIEFYKHQTIIPTTNEKVSYTDLAYFKYNALAAERDDFSNKASQLGSKSLVSLLHSKMNTDDKKKVEKSYETFFNDLKNISSLEEVFNWQESSDLENAKDFFGKITLLPNVPSMSSLLNNVRLGYGDEYLNSQGLGYRNLIYLFVMLNSLSIESDVALNILTIEEPEAHLSVSNEHLLASFINTTMSNNHQLQLFISTHSSEFLNKLELKNVAIVAEGKTYALKNELEGDQLDYLAKKPNLDFLKFLYSRKCILVEGPTEEMLIKSYLSTQTKQLNDIEVISLHKGFKNMLDIWLKVNQNTNHKIGIIRDFDNQIKAKEDHETYNHHPNIYITTTQEYTLEPEFVNTSNNFQKLKKYFSTKYGWEDIDTNEKLSDKWMGAKMDTMLHFCQDIETEELKDVVMPNHISEVIHFLKTGEKMCIL

SEQ ID NO: 65703 - protein, 458 aa, Bacillus paralicheniformis
MYIVVAGAGAGKTTSMADLVISRLKEITDNKIIYVITYTNAARDRIKEKITEKEGNIPRQLKVETIHSFLLKEVIYPFNHLIYKNLYKSASQIPLPSKPAYKATKKKELREEHIIHVEDVTKTAKYLLCGKSNDTVKIKLRRDNALKMLSRYLDSIYVDEAQDMDKELSEVLTMFAHFDINVNLIGDPKQDLRNRGAFRKIISGDLTVEYKPENHRCPSTHVDFSNSFIPTEEQQTSTNEGGTLQYLLESNCSIQEEIESGLYDLAYIYQKNTRFKTHRVDKNKSENLLFYELKSLALKASSIKEKNLDLVAYVLLKKTANAMKNNKATEYIFAELEHDLSIVLNYKDKGKIRSAVDSYRNILTVEPGTLVDSIDAIKGLEGYNCLFIISTELAPYLFKKVVDHNKMMNYLYVGLTRSKRDLTIMVTTEVEKKYGHKYIHEKFNELGIEELKTYTRAF

SEQ ID NO: 65704 - protein, 708 aa, Bacillus megaterium
MYISDLEITNFRNFKNANFKFEPGVNTLIGENSSGKSNALYAIRLLLDDTLPINASKFLESDFNQNIIDWKGHWIVLKLTFKDLDSSEAASFLAHHSEDVTTDESIGTYALYYRPNKSVRKRLFEFTQQSRHIEDLDEILKDITVNDYETVFTCRVNADFNDEQMYKELVGDFEEGIFPDPEDDNANILGNISPHITLIKKEVSCTFVKALRNVISELKQRKSSPLLQLLRGTAKDIEIEEADAIKEQIKALNENISELNEIDILTKKIKASLNKTLGYTYSPNVNIKSELPEEMETLLHSLTLWVGDDVNSNQGKLDDVSLGGANLIYITLKLLEYELYQDQEEKAAHFLLIEEPEAHIHTHVQKTLFDKYHFENTQVIITTHSTHISSASKIDSVNILIKEPGFSKVCQPSKGLDGDTCKRIERYLDATRSTLLFAKGVILVEGDAELILIPAMFKAVFGLSLDEIGVSVINMSSTVFNHIASLFDDQRIHRRCAIITDFDEAIDVLPENPNDDNKEQKKMRDSQTAGQERAEVLNAIYSNNPWVEVFYASHTFEIDFALNFNKHEIKEILPAIYTRQHDIDEATKKLDSGNKIVVGKEAIRLANKVGKGWFALLLSESIDVFTFIPEYILKAIAFSSPNLTRDHLIAMASYRVKNQELHLSDDGEISLENMSLEDLVEIIKEAKDDDDLIKLINLLGVELREYAH

SEQ ID NO: 65705 - protein, 599 aa, Bacillus megaterium
MHIDLNPFQKAAIDEEENALVIACPGSGKTRVLTLKIAKELEKLKKRTDRIIALTFTNRAADEIEKRVHDLGIDVSKLWTGTIHSFCLQWIIKPYGSYLPELQKGFSILDEFKAQDLKNSFKGDFDIPGYEDFITRRDRAGNYVNEKSNFNEAAETYHKHILECKLIDFDLILYFSYLLVEKYPKIADKLSRIFKYFFIDEFQDTQDLQYKLIGNIVKAAEGECKIFLVGDPDQAIFKSLGGVVKSPSEISQEIGGYSVKKLGLNGNYRSTQRIIDLYSNFQSTGLSIESLTDYHDEGGIIAFDRVINKDKLVEKITGIIQEQISNGVSPNEICVLAPQWNFLTSMARKLKSHLPDVTFDAPGLTVLPRDRDNFWFKLTRIILITKEPDNYLIRMKWAKQLLEELVMLNGTVVYADIESCRKFLKTINSINIQKEDAVEFLEASFKYIFKKIGFDYASSDLLMGQWDSFFHGLSRRYEYSDFSDIPKDINYMKKMFNTKEGVVINTCQGVKGEEFHTVIAFGLLRGYIPHWSQIINQSISNEIAESNKLLYVICSRAKKNLFLFSENGRFTKNKQEYQVNNQLNTIAFEFNSLTSYRTE

SEQ ID NO: 65706 - protein, 677 aa, Bacillus subtilis Miyagi-4; identical to SEQ ID NO: 63176

SEQ ID NO: 65707 - protein, 579 aa, Bacillus subtilis Miyagi-4
MLAQKACYLLETNISTYPARILAISFKKDAAKNLKERVEKRSGKEFANRFVSLTYDSFAKQLMDRFHLAIPDFYRPTLEYEIVNFNRRDVTKLREEAEEPIGKIGWNYYFDYDLFAKTYANDKLPLITEKIDSIESWYKYQLWKSYINDKESSMLTFPMISRIVEYLFRSNPKILRAIRATYSHVFLDEFQDTTLIQYDLVRTIFMDSNVSVTAVGDLKQKIMGWAGAMEGVFNQFKEDFKAKDFELVLNHRSAPNLVRIQTSIINDMMGGSTVISPSDKWKNEEVGICEVWNFTNASEEAKTLALEIKTWIDQEKLQRRDIGILVRQRADMYCDMLINELSNLGIHSRIEDQWQDLLAENFMKYVIDVFSLATTDRDPNAWSSLISNVLNLRGENETKSYQIETEINSFIVEFKKTLKDETLKVTEKVVEQWLFKILTLVGLELIKGSYPEYRKGDYLERKVKQTAEFLFYSFEKHKVWNKAVDDFLGIFSIPIMSIHKSKGLEFETVILLGLEDGAFWNFENSPDDETFTFFVALSRAKTRMIFTFCKNRFYGQDKSKINVIYQMLENADVKQFEWT

SEQ ID NO: 65708 - protein, 623 aa, Pectobacterium carotovorum subsp. carotovorum
MYLSKLKIKNFRQFEDFSLELNKGLNLLVGENNAGKSSVIDAIRIVLDTTSVEWVSIKSTDFLSGKNELYIQLKFEDLSVRELGLFLEHLTNEEVTTELNKCCLYINLSAIITTNPFKKTQFIKTEIRSGSNNDGPAIERDIREYLASTYLKPLRDAEVELSAGRTSRLSQILGSNVSLAGDEGATQRIIELLIHATQAIQNDYSIQMTQEKISSLLNSLTFKSNIFTPFLSLLGSKEYTDMSAPEKAFALKSILEKLSLELNTSGIKHGLGYNSLLFMATELMLIRQEEDQYSLLLVEEPEAHLHPQLQLKFIKYLRTENNKLQCILSTHSPVLSSKAPLESLILMQDGKAFPLRKGCTALSGDDYIFLEKFLDSTKANMFFARGVLIVEGIAEMVLIPKIAELIGRPLEDYAVSLVNVNGLSRKRYAKVYRSNSASLSPSYLPIKVACVTDLDLWPNEAEATTSNSYGFKQKIQPNETTGRGGNLQHWLNELTSEQISQKKFTKAEFDGDLVKTFISNDWTFEFCLAKYGLSEELYEALHGNLVGYENLSSDVQIKSVQLYGEIESKGDGKSEVSYRLANILSKYSERPSELKSKLPPYIIEAIEYVTEAFPNEEAMPIEH

SEQ ID NO: 65709 - protein, 622 aa, Pectobacterium carotovorum subsp. carotovorum
MKRRCQLNIEISERDINDVERELNLSFDDARREIIQSYNDVQACPGSGKTTMVAAKLLIIAKKWKSLHQGVCVLTHTNVAKKEIIERLHTSIHGRKLLASPHFIGTIQEFVNKFIAIPYLRSQGFKITHIDDEICCARGWHLLNRGTKNYLERNRITSIQDMQYKFIDAGLKLNIPGFLRESQSNSYQDLINAKNTLIKEGYFFYHEMYEISKDYIHCNPDIIKAIQSHFPIIFIDEMQDTQKFQDEFLNTIFLNDKVKMQRFGDPDQAIYGTNEEENQTYNHSVLDKVENSHRFNNSIASIARNLSYNRINLTSEIAHPSQSLNTIFLVDDNSRTNVFEHFANLCSHAVPIDCEYPIKSVGAVGKKKENSLTICSYYDSFDKTGSTVAFKNTKLIQYIYAARQLNRNSESYRLILEGISHFGKISNSKITMQDGAQFDISVANIKKHLKLSSIFVDFNLLVMSLMANEISRDTWANSVPILLSYLGINVSNQDQFFLSFENDVINNTPSSSTRNSISIEVDGRIIENQIATIHSVKGETHAATLLLETKYHTDDITTLIDYILSENIAQPTETRKKKFMKQIYVALTRPKYLLCIAMNKSGFPIEHISKQEFAGWNICDLT

SEQ ID NO: 65710 - protein, 596 aa, Pectobacterium wasabiae; identical to SEQ ID NO: 63638

SEQ ID NO: 65711 - protein, 606 aa, Pectobacterium wasabiae; identical to SEQ ID NO: 63639

SEQ ID NO: 65712 - protein, 659 aa, Pectobacterium atrosepticum
MKITQMEIKGFKSFDNVGQTININSFTSLIGGNGTGKTAVLLALTRMFGVKSSDRIVQVEDFFVPPGDEIEDQNEREISIRVRFEFAELKDGEDDSVADFFKHLVSSEADEIPYCIAKLKAKWTKTNLAEGDIESDLVWEIGEYEKNITAYERSKIHVHYVPAYRDPAQQLKQTAGTIMHRLINAVEWSEQMGTTVEEVALSIGKQFQEEVGIKTITSSLGKNWKTLFSGGYFEELKIQPVMNGIEDVLKHIDTVFMPTPVTQPLPTERLSDGMKSLFYLSLVKSAFDIEDEIINSKEKELSISVEALDPPNLTIILIEEPENHLSPQYLGRIVKLCEEISENDRAQVILTTHAPALLNRVEPEDIRYFRLQDNKNTIVKEIILPKQVEDDVDKVDTFTYVKEAVKAYPEIYFAKVVILGEGDSEQIVIPKVAQVNGIELDTSLITFAPLGGRFVNHFWKLLNELSIPHVTLLDYDFRRGGGGWGRIKYIINQLIEVGCDEDIVLQTEGGKLTSKELKGMHKWDENEKDEKSWLDLFETYNVYFSYPYDLDWIMLNAFPASYHSFIPDNGGPKILKKTDAEYIDKTKNAIASVLKKDAEDIDIDSFDDHEQYYWYRYLFLGRGKPLSHNYVLNKLDNDSLKNNSPVVLKDLIEKVRGLL

SEQ ID NO: 65713 - protein, 615 aa, Pectobacterium atrosepticum
MPIIKDDNWVLKDIQEVEDEAMRVIRNSTNHNLVLAGPGAGKTELLAQKACFLIETGKCRNKKIIALSFKKDAAKNLQDRVNSRLNSKYRHKFESTTFDAFCKSIVDRFKSTLPKEYRPSDDYEIFFTNNKDFVEEVKKEAVNFQGLTSAELDKLKPYNFEENYIVTPYKRETEHTVDGRIRRFVWLHLLKGKSRVSFKMLNFLANYIIGKNKFLSNAINSTYDFAFIDEFQDTTYRQYEIFKSIFLDKKIKITAVGDTKQRIMGWAGALHNAFDIFKQDFGIENCNELVSNRRSLKNLINYQRMMEAFMNHADIKPDMKLIDNEGIAKLMQFDDSSFEGAYIALCIQQWISEGVNERDICILLRNPAKQYSENIIAALQLLKIKARIENEYQELLNDAVVQLTLQLLRFVCNRRSIECWDSTMELLCNIRGVSKKGDITRLERELSRFIKSNGVIKDKVIDYIYTLLSIFGVDEIKSYFPQYMNGNALEYSIKALASHLEALGIKNSISEAIDMLIGDDIIPLMTIHKSKGLEFKKVIIVGLEPGAYFGDDEEQIENQKTVFVGFSRAIEEVLMTRCNRRNNNYGRSLPQDISEIPLITNMLTYSGIEAENYQA

SEQ ID NO: 65714 - protein, 657 aa, Geobacillus icigianus
MYISSMRIQNFRCFDDFFIEFNEGLNVLIGSNNAGKTTIIKALEYIFRRTGVKSPTIDDFNKNVDLAVPPEITITVTLRSSKTDTTDDKAIVASWLTKLDTPWEAQLTYKFFLPEQDHKPYHDDYAKTSSTKERWALLEKNLKRYVSKIYGGNIINKIRAESEYLDKIHCESLDALRDVESNMFTGRNTLLKQLLMHFKDKVVAAEPADNGLTKAQIFDQYADLLVKNLIERVNQKEVLKFAEDTGASVGGTPALDGNLDENDVLSVLRLIIKDRTGIEIPIINNGMGYNNLIYISLILSKFKMITSEEYGENAKTFPILLIEEPEAHLHPALQYNFLKFLKEEVKNQTFSRQIFITTHSTHITSAVGLKPIICLEKDESGKIFAKYPDKVFLESNEDQESKKYVERYLDATKSAMLFAKSVILVEGMAELLLLPVLAELIGCDLDKHHVSLVRVDSLTFKHFIKLYGAGVTSERQKYALQKRVACIIDSDPAKLEKRNDSSSGKKRWKECWPFEINQDPENYEYREISGAVKKLLEQKNNCLNVEIFYKKEHGKTFEYDLAWDNYNSKLLFTDEVEIVEVDELKASNWENEDKERAKHASSFLLYAKGRKGELAFELASRIQENKDERLIVPDHIRKALEWVCYKDNQGVGQDGQY

SEQ ID NO: 65715 - protein, 147 aa, Geobacillus icigianus
MDNIRLISSDQRIPLSDLSRHFKVIAGPGAGKTHWLVEHIKNVLQNAENLTYTSKIACITYTTVGAEEVQSRLGMNQERVEVSTIHSFLYANVVKPYVYLLNDNHGKRLVNVEELDGHYENIATNGKIYQWKVKTRAHYLQDNKKLK

SEQ ID NO: 65716 - protein, 733 aa, Clostridium botulinum
MKIAFVDIQNFRKLKKCHIDFSKETTLFVGANNSGKTSAMDALGKFLAKRSFVFNDITLSNHEAINNIGVEWEKEEALLPDTIVLWEDIVPILDIWLSVANNELQYVSHIIPTLDWKGGILGIRFILKPKDISKLFEEYREVYFAARTTESKNTTKVLSLWPKNLCDFIEKRFASIFVLKAYILDPSKVNNKIPQNTDFQMECFEQNPLNGLIRIDMVGAQRGFADPGSEENGEKSIHSGGLSAQLRDYYDKHLDPEKTPTPEDFEVLQAIDSAKTIFNQNLKSKFNTAIEELEALGYPGVNDPQITIETKVNASETLNHDSAVQYSLGSDHNNDLKLPEKYNGLGYQNLVSMVFLLMRFRDDWMQVGKAKKTKEFQGKKMPPLHLVLLEEPEAHLHVQVQQVFIKKAYGVLRNNSFLKKHQDFSTQLVISSHSSNITHEMNFSDLRYFKRLQATEDCKVPTSEVVNLTDVFGKDDETNRFVTRYLKSTHCDLFFADALILVEGSAESMLIPHFIKKKYHELNQRYISILEINGRHSHRLKPLIEKLCLLTLAITDIDPADEEGYHKAQCPERNKGFISSNYAVTSWLLNEKSLDVLLDLPTNKKVVNFNCPYDYSIAIAYQTPQKILFDSKEVEALSSTFEDSLIYANLELFKNHNGDGIFQIANSVINNSKTFEELHLALYSKLREGSAGKAGFALDLIYSIEPEELIVPPYIDEGLNWLQEQLKQEVSNC

SEQ ID NO: 65717 - protein, 617 aa, Clostridium botulinum
MDKKECIGDDHIDDHVDEEIKKCFEKKNKKSFFTFAGAGSGKTKSLVNILTYIEEMYGYELLTYSRQVAVITYTNAACEEILNRIDFKSVFAVSTIHSFLWELIKNQQRDIKKWVKKNTETEILDLESQQLRGRASATSDNRAKKIKSKKERLLKIDMVKNFSYNPNGNNFRYDYLSHAEVIKMGSEFIAKSDTMQNILINKYPILLIDESQDTKKELIDALLSLYERHKSEIVIGMFGDTMQKVYTDGKDDLALCIPDDWVKPVKVMNHRSSKRIIKLANEIRKSFDDKMQSSRSDAIEGNAYLFIADSKSDKSKIESLVADSMYELTNDDKWLEPTECKTLILEHHMAGSRLGFYELFKTLYSVNSLKTGILDGTLPEIQLFINKVLPLISAYKRGEKFQVAKIIKQYSPLVNKKAFGESTKEPLLCLNNAYQSVNKLCELWDDGKIPTCLEVIANIESSGLFEIPNRLQGIADIKSNENIDEITNSLITSFSSSFSQIEAYAAYVNDETAFATHQGVKGLEFPRVVVVMDDEEAQGFLFSYEKLFGAKEKTNTDMKNEREGKDTSIARTKRLFYVACTRAKQSLAIIAYTHDCNAVKQTAIENSWFLEKEITIL

SEQ ID NO: 65718 - protein, 668 aa, Bacillus thermoamylovorans
MTKIKSPYISRVKIKNFRNFKDIDVNLSHKQVIIGENNVGKTNFLKAIQIILDPKFSDEDRFLNESDFYDGLVEPMKNGEIIEIIIEIRGYEHNKTVLSMLSDATISENPPTLRLTYKFFPSQDTNEYTYTIFQGDRPEVQFTHFHRKFLNIKVINAIRDVESEMRNSRKSPIKNLLRDYEFDKDELEDIGAKLKEQSNEILSIDELIDLEKKINNRFINTMGNQSFSKISLETIDVDPNRILNTLKLMIGEEKQRPTSDTSLGINNILYISLILISLEDKTIPTLLKKENYIELSEESDSEILEECYVKSSKGNYFLKDNLDDGLMLKLYSFMDNYSLSKEGFTILAIEEPEAHLHPSFQRIIYKDVMKNNTSVLMTTHSPYITSVAPLNSIVHLRTTQEGTIINTTADLNLSDKEKQDLERYIDVKRGEIYFGKGVILVEGIAEEYLIPAFAEILGKPLDLKGIICCNINSTNFDPYVKFLDMLGIPYVCITDGDYYAWVKEKEEPKRKYHIVVDDSHISNGYLGLERIGDLLVKLQKINNSSLPKDLDEQEELFAKNGFFIGYYTMEVDIMDACSESNQGKDIICNIFNELTTGGERQKENFKRELNSGDYWSCLRKIENCENEVGKGRFAQRLSLMCIKDHIPKYIENAIDYIYSKIEEVGKYE

SEQ ID NO: 65719 - protein, 607 aa, Bacillus thermoamylovorans
MNSTYLEKLEQIKKDKDQFAAFNSNCSTVVKAGPGSGKTTVLTLKIMKLLNDKIKYPRGLACLTYNREAVKEFTNRLYELGYVKRNNVFLGTVHAFCIAEVISPFAHLYDYDIPLPLKIVSEKEKNKLFKDTVIQLNYDPNQIKIIDMDKERTLGIEGISCVSVEPYDIGLKVAKEYENRLHAMGMVDFIDIVKYATLLIQKEEYVRKCLEAKFPWILIDEYQDLGKPLHEMVLSLFHKTNIKIFAVGDPDQSIYGFNGAIPDYLNELYSSPNIEAIELKTNYRSHQDIINASIIGLNQQNRNYVSGKRFDKDAEFHFITCEEEMDDQYKEVAYSIIPSCQQKGIPLEEICVLVHSEKQIQSMRKILDEANIPYYISKLEFKRSDIVIWLEQCALWVISNSNVSFSSLFDYWNNLLQKHNQTITAERNILERKRLYSILKESIKHFKSLYKWLEFLIKNLKLHSILYDSDIYPDEVDNLNALIKVAKDGSFRDFDITRFANLGKPINQITLSTRHSSKGLEFEVVILLGMEQGNFPYYKNENDPEKLAEERRVFFVSISRAKRVCYLLRSKKYTRKTRFGYKTFNYKPSMFWEELYESKKNLGTTVN

SEQ ID NO: 65720 - protein, 717 aa, Bacillus thermoamylovorans
MYLKTLSLYNFRKFAEREDSSPGLTVHFNKNLNLIVGENDSGKTAIIDAIRYLLGSLSDDYEKITMEDFYCINKDEFAKSFIIEGIFTDLNEKEAGIFLEWLSFDADNEYQLRVILKAERKTNENGKEYIDKKILAGEVNCELRLNSQARDLLKTTYLKPLRDANSELKPGFRSRLVNILKAHPIFQSGESNELVQVMKEANTKIEKFFQKEYTKGHSLIKDIENVLSDFYDNTDLKKSKAKFNVSKNDLTSILRRLSLNTEEINLGLGNQNLLFIATEMLLLNNFLNESESIGPNITLIEEIEAHLHTQAQIRLIKFLESELEKNNYSSQFILTTHSSNLVSSINPCNIIMIHNDFCYPMNKDYTLLNENDYKFLERFLDATKCNLFFAKGIILVEGESEMFLIPALAELIGLPLHKSGVSVINVHGTSFERYLKLFSRSEHWIEELNYPKLNIPISIITDIDIKPYIYYEKEGFKSIYSIQNNTHLQGILKIINKKEEDLNTEFIGKEYSTLKKLAKDFKFEVNNENENELVHALKLDISEKYIEESKDKKLQDIEEKYRSYNCNFKIFTAPEWTLEYSLSKSCLREMLYKVIHTFRYKNAFEGKRLKQFEEFKQIIKEDNDFSDEIAYEIFKPIDKKLVSKAEVAQELSVYLKDLFERKKDNKEELEKIQNKIMQDDYLKYLIEAIQHVSTVNVVEKSEEEFKEEFEEKVGVFQ

SEQ ID NO: 65721 - protein, 601 aa, Bacillus thermoamylovorans
MISTEVLFLKEIETKLLPKGATFSEQQKSVIFHNNTANIVAGPGSGKTTVLIAKCAMLLKENIGNSKGICLITHTNVAVDEIKSGLSKIGFNNIEYPNFLGTIQEFFNYFFGRKAFHIIFGDKNIRIMDDEEYRERFDHFFDRLKPNWYTNNNPNVKSKNPQLIINQDLTYDVISDANSTYREAFNDSIKHLLKFGIVTNKQCLELSAWYIKKHLSKIREALSNRFEYVLLDEAQDTNKFQYELLNSLFLDNIKFQRFGDPYQALYSIFDTKEDAWIPSEEASYINKIEIAETSRFNENIANLVRNVCIEKYDSFRSVSSVNSFQPYFITYDDGLELKLKYKELISTLEEQSSEYKSSNKKDAILSAKHDDLMSLFEEYIVSNSKVKKSESGVKQIYSLILRIISKEIDLNLQQTEEKLNSLLENKKIIAKLIKDLITKDNIESTISSIILEIEKIKNDIIEPSKKEKIKEQLNSFKNEMESSRKNAIVEQEKEEFYIGTVHSVKGETHRSTLLVLNTVFSDWHGTYSYEILELLNNYLIGHYIDLENISNLQLKRETKNALKLAYVAFSRPTHLVAIGIHKDKLTEKLKEELIEFGWKEW

SEQ ID NO: 65722 - protein, 589 aa, Staphylococcus argenteus
MEIEWIKINGFRNFDNDKINLSKNTLIIGANDVGKTNLLYALRLIFDRSLSDRELDLSNNDYNVYTKSETIEITVKLTNVYEDCLISTFKEDIKDGSLFIQYKNSKQGEYSILTGSSEKLLVPKNSRFYLKRLNMEYVHTNRNLTAFIKKEKNQILEYAKSQLNDEKNYQDKNVIEGIENKLNDINIEVDKLNYIQESLIKVNEELESLAIHNEGQKLTFKNVNSNIDRMLNNIELTYNTDEGALTIGGDGRNNQIFLATWISKQKNIKSLERVTFYAIEEPEAHLHPHQQRKLSNYLLENFSEQIFITTHSPHIATDFKPNKIVKLYRQNKKTKIAKGGCSEDLALNFDDFGYRLNVITSDLFFVNAVFLVEGPSEKLFYNALSKSLNIDLDRLNVSIISVDGVGFKPYLKICLALDIPFVLRTDNDIFTKTKKVNDKNVEFSYQAGISRVIGIYEDILTSENKDELLTYWDKYKHETEWEKSKGTPQVAHEHVKYIIETVELDNIYFAEKDLENDIVNSALFNSLKEFYQAEDKNDIVKKMQTAKANNMFNYLKNNIDKLSYLESDPLAKPLYQIKDLAEKVASFYE

SEQ ID NO: 65723 - protein, 538 aa, Staphylococcus argenteus
MSRNLNLTKEQNEVINEEGNLVVTANPGSGKTLTIVEKILNISQTLYSYQGVIAISFTRQSSKELEVRYNKKKTNDNNHFFGTIDKFYISEIIIPFSKQICGIRKSIEVKNSLENHPQYESLLKLKENSNNQEINVLLEKSLKEGLIFLEICGETALYILKKVPQCAYYLKSRYTHIFIDEYQDCGEIQHKIFLELINHGIKGIAVGDLNQAIFAFSYRFPKYLHSLIGNQDFRHVLLTRNFRCHKSISDYSLQLIEKRKVTNTDVKRVFKVNVIGNDKTVIDAIEKNFVNLKKKYKLNNNDFAILCHSRSSAKRASKFLNIKNKLFDYIDFEKETGILANFYKDLLNSYFLYKINKTTVLDFVIKYLNEEVNYFNFRKGLETVNEIFNLEVTNFVSNIEKFYDLAQLVYPDDFDEVIFNKLVELLKNRKDLNSFKPATEDEINIMTVHKSKGLEFKCVFLLDLYKYVFPRENIDEESLNQYLHLHYVGITRAIEACYIIVATERYRPSKEDYCNAIESPFLYRNNVQDLREDIIWKI

SEQ ID NO: 65724 - protein, 698 aa, Flavobacterium psychrophilum FPG101; identical to SEQ ID NO: 62716

SEQ ID NO: 65725 - protein, 633 aa, Flavobacterium psychrophilum FPG101; identical to SEQ ID NO: 62717

SEQ ID NO: 65726 - protein, 596 aa, Pectobacterium wasabiae; identical to SEQ ID NO: 63638

SEQ ID NO: 65727 - protein, 606 aa, Pectobacterium wasabiae; identical to SEQ ID NO: 63639

SEQ ID NO: 65728 - protein, 594 aa, Proteus vulgaris
MYLSKLGIRNFRNFEAADISLAGSVVLLGENRVGKSNLLFAIRLVIDPTLPDSARLLKLSDFWDGCDLESSPQIEVHLEFSDFDSDPSLSALLTDFRIAEDPSVARLSYIFRKKEEVDGAPRSGEDCEFIVFGGGQESRAIPGRVRRRISIDMLDALRDAEAQLASWRNSPLRPLLEDAFSSLSRADLDRVAIELQSATETMEKFPSIRELEKSLRGGILDLAGTTHDLDARLRFAPTDPLRLMRSISMFIDDGKRGIIEASLGSANVALISLKLAEFAWRREKNERNFSLLCIEEPEAHLHPQLQRAVFDKLFNNADKDQSLIVTSHSPTLATIAPLRSVVRIYRDPDGKSRVFSLAKLPITSEELDDIERYLTATRSELLFANGVIFVEGDAEEVLLPGFAQAIGINLDQLGITVCNVAGVNFKPYVKLAASLGLPFSVITDWDPLDGTKQPMGKTRSIDIWQAYSDVSKKLKKLTPENIIWFNNNSYETCKATFEKIGIFLNNQTFEVAVANTTGLKEALLDILDEQEFGMLRSSRIASWRNGIVPDPTQLLAMISDIGKGRLASKLKKKAPELAPPEYIASAIRYVVSNV

SEQ ID NO: 65729 - protein, 593 aa, Proteus vulgaris
MSNQRSLSEALNELLPNREQYDAATYTSHCVVIAGPGSGKTKTLTTAMARTLIDEITDPRGVACITYNNECASELEGRLACFNVTVDDRNFIGTVHSFALNQVLIPYSRCIPGLLSNDFRVATRDESRAAVEVAYQARFGAVGDPHARWKFAEEKRRRDVNRLLPAWRNNNPELADFIEGYEAELRRLGLIDFDDMPLIAFRIINEHEWVRAAIRSRYPVLFVDEYQDLGYALHELVLLLCFNGGIRLFAVGDADQSIYGFNGANPRLLDSLVSRADVRLFRLRFNYRSGAKIIRASLGALGEDRDYVGPDGTPEGELGFHGIKGNYDAQAHFIAHDLISSLLERGFQPERIGVLYRAAWLGDKVADEFKARNIAIIRADSNALIKRNSRLACFIEGCSQWVTGGWKEASPPFNLLLSQALFLVYGRRVNRAEEQLLTIQLITFLRNGIDKAESAHEWLKRLNDEIITIWMNISQNTLQEWDVIAELLKRTDPAKGLDVTLDVFSGKVKGTGCITLSTLHSAKGREFDVAIMFGVNKYDFPSSRDLASNNALREARRLFYVGVTRPRKELHMVYETGKHSPWIAELYYRSQKI

SEQ ID NO: 65730 - protein, 622 aa, Proteus vulgaris
MYLAELTIKNFRKLREATLKFQPGLNVLVGPNNVGKSAVIDALRTLLAGHDETYPRLDGSDRHRPHEGDPTGDISFHFVFRDLSFEDEADFIAALKPNGGKNMEAHIHVLYTDMDKTGRFKVRRWCGDHPEVSLTSDMMENLRGVYLQPLRDASQGLRPNRNSQLSRLLHLLTDDTGRDTINTALKQLDETLKQDKSIQSTHKAISTRHDSMMGTQLAQELAVGLSVTDFQRLSSRLTLTAEAMEIEKNGLGFNNLIFMAVVLSELAKNTDSAFRSLIIEEPEAHLHPQLQRVLLQYLAGIPTGEGEKPVQLFVTSHSPNFASNSKLDSLVCLIENEAGVETFFPRDIKFEKGKREKLERYLDVTRAELFFARRVIFVEGAAELMLIDALAKKMNFDLREYGVSLISVEGLNFDSFLPLFGEQGLRIPVAVVTDADPFEEIEAVAGGEQAKEEIDDLLSEAAYQEEIDAPDDEEPAGNTEKKKKTKRKEVYPALGDQVRLSANTIKMQNLEDDFVKVFHGLKTLEYDLALIEANRDLMLIALADPHPKISKALRNIVDAQSDNTAKTKALFCGMFERKGNGNIQKGRFAQALAEQISKENNFEVPEYLKKAIHHVCQGVVKP

SEQ ID NO: 65731 - protein, 575 aa, Proteus vulgaris
MKLSKEQIEIIKAPLGPIAVTACAGSGKTATAIRRLIAIRQKMQNSRGRVVLLSFSNVAVNTFNAGYAELAASLPDDANRRRVEVDTLDGFFTKHILRPHAYRSMNAPQAAYLVSGSEPFLTRFKYWNGGHPPLPLKDIKIIILDGNFVFYSNTRNCLELLDKVKVLKIIHDLGRLGAYTHEIGRYWVYRTLYSQPAVLRALAARYPQILVDESQDLGTLHKEILKLLITAGVQVTLIGDVNQGIYGFAGADGEFLKSYEDRAEVTGYKLTRNYRSLPSIINIANILCGRHDEADRLEEYGGAYFIGYKDSELSKLTEAFKAHIDELGMQHHNAVILCRSTDRAAVIAGKTPPPGQGIVKMLAEASLLRDQHSDYHGCFKLVCQAIINLLKDVPHGLSSRLQGLSHDDEMKGLKRLLWRFSRSADVGLPSSALIAKTDWHSKLLTNVRALLEKIEKHYGYKVTGKVSTKLTKKALPDQPLVSVASAQGHGLRVETVHQVKGESIDAVMYVAKKANIKALLSGTNDEEGRIGYVAITRAKNLFWLAVPQSCLKELRKDLTKAGFQEWIKPAVVNPT

SEQ ID NO: 65732 - protein, 301 aa, Nonlabens ulvanivorans
MYINNLKLWNFRKFGSSDNFDINKPNLNLDFSKGLNVLIGQNDSGKTAIIDSIKLVLKTHSYDWIKVKHEDFHLASNRFRIEIRIEDLTNQEAKNFTEWIGWTGEGENAKPYLRLIYDVNRNLEDNYIIPSDIRAGVDETGYQLTAEAREYLKATYLKPLRDAKSELIPRKNSRLAQILQGHEAFKGQENTHLLVNLFKEFNISIENYFEGKDNNDQDLTGTNLKGKELKDEIDKYIKSFYSDSKESNFSVNNGSLKSILEKLELTIKDEINLGLGILTDCQWHQSYYTCIRKIGMVLDLV

SEQ ID NO: 65733 - protein, 354 aa, Nonlabens ulvanivorans
MLAMINITNSDIEYAEKILLPENHHFDDERLEFIRDFTSLDLQAVPGSGKTTALLAKLIILEKYLPLKDNRGILVISHTNTAVDEIKERIGNYCPKLFSYPNFIGTIQSFVDIHLAIPCFTNLYKSKPYRIDNEIYNERIKKKLSTIWHFRYGLTAQDARKISYLSNLNEGLFYNFRSGFDNDGNIILLNKINGEKLEIKKPRGRTRIENYTDYTQVEKTLIYNWLLELKKDLLQNDGVLHFDDAYFLGNLYLKQFSLSKKLLQFRFEYIFVDEMQDMDIHQYNLLELLFYNNNVSHSIIQRIGDINQAIFNGFSDSENVWEFRENLKYLQGSHRLNPKIASIVEKLALTPKLN

SEQ ID NO: 65734 - protein, 671 aa, Mollicutes bacterium HR1
MKLQKMKVCNFRCFGEEITVQMSDLTCLVGDNSSGKTALLDAIKKILGNNPKDRGLVRSDFHLGKSEKPEDIQSKKMSIELVFEFPEVTRSSEDMGAIPIFRRHFVVSDPKSYPYIRIRLEAEWERSSNPEGSIESRVVYVVCPEGEKYTEDKLINAKRKELDEIRLIYIPANRNVEKEIKLNSDSIFMRLFNLVKWNDDKIDEVEKASTSLNSIVTSEDQIKVINDSIMHNWGNFNSDYRFNKSQILFSNSEITEILKKVSIGFTPSVTERDFLVEEMGDGSKSLLYFSLISALLDAESELSKLKFNDEIKIPSHTIFIAEEPENNIAPHLLGQLIQSIMDVSTKHKCQAIISSHSVSIISRINPIDIRLLFNKKSTYSSDAYSLELSSDDVENFKYIKNTIMKTPSIYFSKLVILVEGESEKLFIPRLLKDSDVNIDEFYISVVSIDSRFVTNYWKFLSQYKIPYLTLLDLDSERVHGGYKTISYLIKELSKFRKDFEDFEFEDGTCLIKDNIIDKMKDWGENKDEDYLSWIEYLEKYNVFLSYPLDLDFMLLRAYENSYKNLLENNEGPRIKKIGKISEIEKMEEKPDEYVNRVEQDLEAVLKGDGGDGSSFSNSEKKIMIWYKYFFLGKGKPISHYRALSVIDKKTLIDHLPEMLNRLVDSIKESLV
